United States Patent Application Publication US 2011/0183924 A1 - sequence listing, part 280

SEQ ID NO: 859495 - protein, 1008 aa, Homo sapiens
MFHGIKWSCGNGTEEFSVEHLVQQILDTHPTKPAPRTHACLCSGGLGSGSLTHKCSSTKHRIISPKVEPRALTLTSIPHPHPPEPPPLIAPLPPELPKAHTSPSSSSSSSSSGFAEPLEIRPSPPTSRGGSSRGGTAILLLTGLEQRAGGLTPTRHLAPQADPRPSMSLAVVVGTEPSAPPAPPSPAFDPDRFLNSPQRGQTYGGGQGVSPDFPEAEAAHTPCSALEPAAALEPQAAARGPPPQSVAGGRRGNCFFIQDDDSGEELKGHGAAPPIPSPPPSPPPSPAPLEPSSRVGRGEALFGGPVGASELEPFSLSSFPDLMGELISDEAPSIPAPTPQLSPALSTITDFSPEWSYPEGGVKVLITGPWTEAAEHYSCVFDHIAVPASLVQPGVLRCYCPAHEVGLVSLQVAGREGPLSASVLFEYRARRFLSLPSTQLDWLSLDDNQFRMSILERLEQMEKRMAEIAAAGQVPCQGPDAPPVQDEGQGPGFEARVVVLVESMIPRSTWKGPERLAHGSPFRGMSLLHLAAAQGYARLIETLSQWRSVETGSLDLEQEVDPLNVDHFSCTPLMWACALGHLEAAVLLFRWNRQALSIPDSLGRLPLSVAHSRGHVRLARCLEELQRQEPSVEPPFALSPPSSSPDTGLSSVSSPSELSDGTFSVTSAYSSAPDGSPPPAPLPASEMTMEDMAPGQLSSGVPEAPLLLMDYEATNSKGPLSSLPALPPASDDGAAPEDADSPQAVDVIPVDMISLAKQIIEATPERIKREDFVGLPEAGASMRERTGAVGLSETMSWLASYLENVDHFPSSTPPSELPFERGRLAVPSAPSWAEFLSASTSGKMESDFALLTLSDHEQRELYEAARVIQTAFRKYKGRRLKEQQEVAAAVIQRCYRKYKQFALYKKMTQAAILIQSKFRSYYEQKRFQQSRRAAVLIQQHYRSYRRRPGPPHRTSATLPARNKGSFLTKKQDQAARKIMRFLRRCRHRMRELKQNQELEGLPQPGLAT

SEQ ID NO: 859496 - protein, 668 aa, Homo sapiens
PPGFKRFSCLSLLSSWDYKGGVKVLITGPWTEAAEHYSCVFDHIAVPASLVQPGVLRCYCPAHEVGLVSLQVAGREGPLSASVLFEYRARRFLSLPSTQLDWLSLDDNQFRMSILERLEQMEKRMAEIAAAGQVPCQGPDAPPVQDEGQGPGFEARVVVLVESMIPRSTWKGPERLAHGSPFRGMSLLHLAAAQGYARLIETLSQWRSVETGSLDLEQEVDPLNVDHFSCTPLMWACALGHLEAAVLLFRWNRQALSIPDSLGRLPLSVAHSRGHVRLARCLEELQRQEPSVEPPFALSPPSSSPDTGLSSVSSPSELSDGTFSVTSAYSSAPDGSPPPAPLPASEMTMEDMAPGQLSSGVPEAPLLLMDYEATNSKGPLSSLPALPPASDDGAAPEDADSPQAVDVIPVDMISLAKQIIEATPERIKREDFVGLPEAGASMRERTGAVGLSETMSWLASYLENVDHFPSSTPPSELPFERGRLAVPSAPSWAEFLSASTSGKMESDFALLTLSDHEQRELYEAARVIQTAFRKYKGRRLKEQQEVAAAVIQRCYRKYKQFALYKKMTQAAILIQSKFRSYYEQKRFQQSRRAAVLIQQHYRSYRRRPGPPHRTSATLPARNKGSFLTKKQDQAARKIMRFLRRCRHRMRELKQNQELEGLPQPGLAT

SEQ ID NO: 859497 - protein, 227 aa, Homo sapiens
MADLLGSILSSMEKPPSLGDQETRRKAREQAARLKKLQEQEKQQKVEFRKRMEKEVSDFIQDSGQIKKKFQPMNKIERSILHDVVEVAGLTSFSFGEDDDCRYVMIFKKEFAPSDEELDSYRRGEEWDPQKAEEKRKLKELAQRQEEEAAQQGPVVVSPASDYKDKYSHLIGKGAAKDAAHMLQANKTYGCVPVANKRDTRSIEEAMNEIRAKKRLRQSGEELPPTS

SEQ ID NO: 859498 - protein, 227 aa, Homo sapiens; identical to SEQ ID NO: 859497

SEQ ID NO: 859499 - protein, 1220 aa, Homo sapiens; identical to SEQ ID NO: 859494

SEQ ID NO: 859500 - protein, 1220 aa, Homo sapiens; identical to SEQ ID NO: 859494

SEQ ID NO: 859501 - protein, 1220 aa, Homo sapiens; identical to SEQ ID NO: 859494

SEQ ID NO: 859502 - protein, 1220 aa, Homo sapiens; identical to SEQ ID NO: 859494

SEQ ID NO: 859503 - protein, 1220 aa, Homo sapiens; identical to SEQ ID NO: 859494

SEQ ID NO: 859504 - protein, 1131 aa, Homo sapiens
MGTDSPSPRPLRPGVTLPPGALTMNTKDTTEVAENSHHLKIFLPKKLLECLPRCPLLPPERLRWNTNEEIASYLITFEKHDEWLSCAPKTRPQNGSIILYNRKKVKYRKDGYLWKKRKDGKTTREDHMKLKVQGMELQCLYGCYVHSSIVPTFHRRCYWLLQNPDIVLVHYLNVPALEDCGKGCSPIFCSISSDRREWLKWSREELLGQLKPMFHGIKWSCGNGTEEFSVEHLVQQILDTHPTKPAPRTHACLCSGGLGSGSLTHKCSSTKHRIISPKVEPRALTLTSIPHPHPPEPPPLIAPLPPELPKAHTSPSSSSSSSSSGFAEPLEIRPSPPTSRGGSSRGGTAILLLTGLEQRAGGLTPTRHLAPQADPRPSMSLAVVVGTEPSAPPAPPSPAFDPDRFLNSPQRGQTYGGGQGVSPDFPEAEAAHTPCSALEPAAALEPQAAARGPPPQSVAGGRRGNCFFIQDDDSGEELKGHGAAPPIPSPPPSPPPSPAPLEPSSRVGRGEALFGGPVGASELEPFSLSSFPDLMGELISDEAPSIPAPTPQLSPALSTITDFSPEWSYPEGGVKVLITGPWTEAAEHYSCVFDHIAVPASLVQPGVLRCYCPAHEVGLVSLQVAGREGPLSASVLFEYRARRFLSLPSTQLDWLSLDDNQFRMSILERLEQMEKRMAEIAAAGQVPCQGPDAPPVQDEGQGPGFEARVVVLVESMIPRSTWKGPERLAHGSPFRGMSLLHLAAAQGYARLIETLSQWRSVETGSLDLEQEVDPLNVDHFSCTPLMWACALGHLEAAVLLFRWNRQALSIPDSLGRLPLSVAHSRGHVRLARCLEELQRQEPSVEPPFALSPPSSSPDTGLSSVSSPSELSDGTFSVTSAYSSAPDGSPPPAPLPASEMTMEDMAPGQLSSGVPEAPLLLMDYEATNSKGPLSSLPALPPASDDGAAPEDADSPQAVDVIPVDMISLAKQIIEATPERIKREDFVGLPEAGASMRERTGAVGLSETMSWLASYLENVDHFPSSTPPSELPFERGRLAVPSAPSWAEFLSASTSGKMESDFALLTLSDHEQRELYEAARVIQTAFRKYKGRRLKEQQEVAAAVIQRCYRKYKQVRPFSLKSVTSNPPTHTHA

SEQ ID NO: 859505 - protein, 907 aa, Homo sapiens
MGTDSPSPRPLRPGVTLPPGALTMNTKDTTEVAENSHHLKIFLPKKLLECLPRCPLLPPERLRWNTNEEIASYLITFEKHDEWLSCAPKTRPQNGSIILYNRKKVKYRKDGYLWKKRKDGKTTREDHMKLKVQGMELQCLYGCYVHSSIVPTFHRRCYWLLQNPDIVLVHYLNVPALEDCGKGCSPIFCSISSDRREWLKWSREELLGQLKPMFHGIKWSCGNGTEEFSVEHLVQQILDTHPTKPAPRTHACLCSGGLGSGSLTHKCSSTKHRIISPKVEPRALTLTSIPHPHPPEPPPLIAPLPPELPKAHTSPSSSSSSSSSGFAEPLEIRPSPPTSRGGSSRGGTAILLLTGLEQRAGGLTPTRHLAPQADPRPSMSLAVVVGTEPSAPPAPPSPAFDPDRFLNSPQRGQTYGGGQGVSPDFPEAEAAHTPCSALEPAAALEPQAAARGPPPQSVAGGRRGNCFFIQDDDSGEELKGHGAAPPIPSPPPSPPPSPAPLEPSSRVGRGEALFGGPVGASELEPFSLSSFPDLMGELISDEAPSIPAPTPQLSPALSTITDFSPEWSYPEGGVKVLITGPWTEAAEHYSCVFDHIAVPASLVQPGVLRCYCPAHEVGLVSLQVAGREGPLSASVLFEYRARRFLSLPSTQLDWLSLDDNQFRMSILERLEQMEKRMAEIAAAGQVPCQGPDAPPVQDEGQGPGFEARVVVLVESMIPRSTWKGPERLAHGSPFRGMSLLHLAAAQGYARLIETLSQWRSVETGSLDLEQEVDPLNVDHFSCTPLMWACALGHLEAAVLLFRWNRQALSIPDSLGRLPLSVAHSRGHVRLARCLEELQRQEPSVEPPFALSPPSSSPDTGLSSVSSPSELSDGTFSVTSAYSSAPDGSPPPALQPGRQSKTLSQKKK

SEQ ID NO: 859506 - protein, 975 aa, Homo sapiens
MGTDSPSPRPLRPGVTLPPGALTMNTKDTTEVAENSHHLKIFLPKKLLECLPRCPLLPPERLRWNTNEEIASYLITFEKHDEWLSCAPKTRPQNGSIILYNRKKVKYRKDGYLWKKRKDGKTTREDHMKLKVQGMELQCLYGCYVHSSIVPTFHRRCYWLLQNPDIVLVHYLNVPALEDCGKGCSPIFCSISSDRREWLKWSREELLGQLKPMFHGIKWSCGNGTEEFSVEHLVQQILDTHPTKPAPRTHACLCSGGLGSGSLTHKCSSTKHRIISPKVEPRALTLTSIPHPHPPEPPPLIAPLPPELPKAHTSPSSSSSSSSSGFAEPLEIRPSPPTSRGGSSRGGTAILLLTGLEQRAGGLTPTRHLAPQADPRPSMSLAVVVGTEPSAPPAPPSPAFDPDRFLNSPQRGQTYGGGQGVSPDFPEAEAAHTPCSALEPAAALEPQAAARGPPPQSVAGGRRGNCFFIQDDDSGEELKGHGAAPPIPSPPPSPPPSPAPLEPSSRVGRGEALFGGPVGASELEPFSLSSFPDLMGELISDEAPSIPAPTPQLSPALSTITDFSPEWSYPEGGVKVLITGPWTEAAEHYSCVFDHIAVPASLVQPGVLRCYCPAHEVGLVSLQVAGREGPLSASVLFEYRARRFLSLPSTQLDWLSLDDNQFRMSILERLEQMEKRMAEIAAAGQVPCQGPDAPPVQDEGQGPGFEARVVVLVESMIPRSTWKGPERLAHGSPFRGMSLLHLAAAQGYARLIETLSQWRSVETGSLDLEQEVDPLNVDHFSCTPLMWACALGHLEAAVLLFRWNRQALSIPDSLGRLPLSVAHSRGHVRLARCLEELQRQEPSVEPPFALSPPSSSPDTGLSSVSSPSELSDGTFSVTSAYSSAPDGSPPPAPLPASEMTMEDMAPGQLSSGVPEAPLLLMDYEATNSKGPLSSLPALPPASDDGAAPEDADSPQAVDVIPVLLILMELWGLEVE

SEQ ID NO: 859507 - protein, 117 aa, Homo sapiens
TPAPGTCTVPRPPRARGLCSRLLQNIPLCGRDPPTSEVLLGPPLRRGAAQSAKRPIRRRPSAAQGPAPAPHPGRLPSQDCAPAPWGGVLTPTPASLHIAEPDGPPPISILDTWRSPC

SEQ ID NO: 859508 - protein, 275 aa, Homo sapiens
MPSVRSIFCFFHQRLLSHQEAGPGSPEDHEIPAALPTQDEGTEAEKEKHISLQNNYEKSQETFKQLQSDFYGRESELLATRQDLKSVEEKLSLATGGLDFKQKSILWKLKLIDSQNLKTAKANMWSRIQQERTAIAGAIVKHYKTFRKEPGPERKRTWYTEKEIGIQYKDWFYRKKIWKALERYSRPKRLYQGKKEGTKQFPGNKILRPFKFRNQRFPLGIALPRIQPTVPNLPTSHVGRALVTGLLPEGQLIHSLLLETPKGLGSRRRRYYGNC

SEQ ID NO: 859509 - protein, 1197 aa, Homo sapiens
MNTKDTTEVAENSHHLKIFLPKKLLECLPRCPLLPPERLRWNTNEEIASYLITFEKHDEWLSCAPKTRPQNGSIILYNRKKVKYRKDGYLWKKRKDGKTTREDHMKLKVQGMELQCLYGCYVHSSIVPTFHRRCYWLLQNPDIVLVHYLNVPALEDCGKGCSPIFCSISSDRREWLKWSREELLGQLKPMFHGIKWSCGNGTEEFSVEHLVQQILDTHPTKPAPRTHACLCSGGLGSGSLTHKCSSTKHRIISPKVEPRALTLTSIPHPHPPEPPPLIAPLPPELPKAHTSPSSSSSSSSSGFAEPLEIRPSPPTSRGGSSRGGTAILLLTGLEQRAGGLTPTRHLAPQADPRPSMSLAVVVGTEPSAPPAPPSPAFDPDRFLNSPQRGQTYGGGQGVSPDFPEAEAAHTPCSALEPAAALEPQAAARGPPPQSVAGGRRGNCFFIQDDDSGEELKGHGAAPPIPSPPPSPPPSPAPLEPSSRVGRGEALFGGPVGASELEPFSLSSFPDLMGELISDEAPSIPAPTPQLSPALSTITDFSPEWSYPEGGVKVLITGPWTEAAEHYSCVFDHIAVPASLVQPGVLRCYCPAHEVGLVSLQVAGREGPLSASVLFEYRARRFLSLPSTQLDWLSLDDNQFRMSILERLEQMEKRMAEIAAAGQVPCQGPDAPPVQDEGQGPGFEARVVVLVESMIPRSTWKGPERLAHGSPFRGMSLLHLAAAQGYARLIETLSQWRSVETGSLDLEQEVDPLNVDHFSCTPLMWACALGHLEAAVLLFRWNRQALSIPDSLGRLPLSVAHSRGHVRLARCLEELQRQEPSVEPPFALSPPSSSPDTGLSSVSSPSELSDGTFSVTSAYSSAPDGSPPPAPLPASEMTMEDMAPGQLSSGVPEAPLLLMDYEATNSKGPLSSLPALPPASDDGAAPEDADSPQAVDVIPVDMISLAKQIIEATPERIKREDFVGLPEAGASMRERTGAVGLSETMSWLASYLENVDHFPSSTPPSELPFERGRLAVPSAPSWAEFLSASTSGKMESDFALLTLSDHEQRELYEAARVIQTAFRKYKGRRLKEQQEVAAAVIQRCYRKYKQFALYKKMTQAAILIQSKFRSYYEQKRFQQSRRAAVLIQQHYRSYRRRPGPPHRTSATLPARNKGSFLTKKQDQAARKIMRFLRRCRHRMRELKQNQELEGLPQPGLAT

SEQ ID NO: 859510 - protein, 1215 aa, Homo sapiens
MNTKDTTEVAENSHHLKIFLPKKLLECLPRCPLLPPERLRWNTNEEIASYLITFEKHDEWLSCAPKTRPQNGSIILYNRKKVKYRKDGYLWKKRKDGKTTREDHMKLKVQGMEEQGRVGEQTSPPPTPACLLQCLYGCYVHSSIVPTFHRRCYWLLQNPDIVLVHYLNVPALEDCGKGCSPIFCSISSDRREWLKWSREELLGQLKPMFHGIKWSCGNGTEEFSVEHLVQQILDTHPTKPAPRTHACLCSGGLGSGSLTHKCSSTKHRIISPKVEPRALTLTSIPHPHPPEPPPLIAPLPPELPKAHTSPSSSSSSSSSGFAEPLEIRPSPPTSRGGSSRGGTAILLLTGLEQRAGGLTPTRHLAPQADPRPSMSLAVVVGTEPSAPPAPPSPAFDPDRFLNSPQRGQTYGGGQGVSPDFPEAEAAHTPCSALEPAAALEPQAAARGPPPQSVAGGRRGNCFFIQDDDSGEELKGHGAAPPIPSPPPSPPPSPAPLEPSSRVGRGEALFGGPVGASELEPFSLSSFPDLMGELISDEAPSIPAPTPQLSPALSTITDFSPEWSYPEGGVKVLITGPWTEAAEHYSCVFDHIAVPASLVQPGVLRCYCPAHEVGLVSLQVAGREGPLSASVLFEYRARRFLSLPSTQLDWLSLDDNQFRMSILERLEQMEKRMAEIAAAGQVPCQGPDAPPVQDEGQGPGFEARVVVLVESMIPRSTWKGPERLAHGSPFRGMSLLHLAAAQGYARLIETLSQWRSVETGSLDLEQEVDPLNVDHFSCTPLMWACALGHLEAAVLLFRWNRQALSIPDSLGRLPLSVAHSRGHVRLARCLEELQRQEPSVEPPFALSPPSSSPDTGLSSVSSPSELSDGTFSVTSAYSSAPDGSPPPAPLPASEMTMEDMAPGQLSSGVPEAPLLLMDYEATNSKGPLSSLPALPPASDDGAAPEDADSPQAVDVIPVDMISLAKQIIEATPERIKREDFVGLPEAGASMRERTGAVGLSETMSWLASYLENVDHFPSSTPPSELPFERGRLAVPSAPSWAEFLSASTSGKMESDFALLTLSDHEQRELYEAARVIQTAFRKYKGRRLKEQQEVAAAVIQRCYRKYKQFALYKKMTQAAILIQSKFRSYYEQKRFQQSRRAAVLIQQHYRSYRRRPGPPHRTSATLPARNKGSFLTKKQDQAARKIMRFLRRCRHRMRELKQNQELEGLPQPGLAT

SEQ ID NO: 859511 - protein, 1185 aa, Homo sapiens
MGTDSPSPRPLRPGVTLPPGALTMNTKDTTEVAENSHHLKIFLPKKLLECLPRCPLLPPERLRWNTNEEIASYLITFEKHDEWLSCAPKTRPQNGSIILYNRKKVKYRKDGYLWKKRKDGKTTREDHMKLKVQGMELQCLYGCYVHSSIVPTFHRRCYWLLQNPDIVLVHYLNVPALEDCGKGCSPIFCSISSDRREWLKWSREELLGQLKPMFHGIKWSCGNGTEEFSVEHLVQQILDTHPTKPAPRTHACLCSGGLGSGSLTHKCSSTKHRIISPKVEPRALTLTSIPHPHPPEPPPLIAPLPPELPKAHTSPSSSSSSSSSGFAEPLEIRPSPPTSRGGSSRGGTAILLLTGLEQRAGGLTPTRHLAPQADPRPSMSLAVVVGTEPSAPPAPPSPAFDPDRFLNSPQRGQTYGGGQGVSPDFPEAEAAHTPCSALEPAAALEPQAAARGPPPQSVAGGRRGNCFFIQDDDSGEELKGHGAAPPIPSPPPSPPPSPAPLEPSSRVGRGEALFGGPVGASELEPFSLSSFPDLMGELISDEAPSIPAPTPQLSPALSTITDFSPEWSYPEGGVKVLITGPWTEAAEHYSCVFDHIAVPASLVQPGVLRCYCPVLNFDWLSLDDNQFRMSILERLEQMEKRMAEIAAAGQVPCQGPDAPPVQDEGQGPGFEARVVVLVESMIPRSTWKGPERLAHGSPFRGMSLLHLAAAQGYARLIETLSQWRSVETGSLDLEQEVDPLNVDHFSCTPLMWACALGHLEAAVLLFRWNRQALSIPDSLGRLPLSVAHSRGHVRLARCLEELQRQEPSVEPPFALSPPSSSPDTGLSSVSSPSELSDGTFSVTSAYSSAPDGSPPPAPLPASEMTMEDMAPGQLSSGVPEAPLLLMDYEATNSKGPLSSLPALPPASDDGAAPEDADSPQAVDVIPVDMISLAKQIIEATPERIKREDFVGLPEAGASMRERTGAVGLSETMSWLASYLENVDHFPSSTPPSELPFERGRLAVPSAPSWAEFLSASTSGKMESDFALLTLSDHEQRELYEAARVIQTAFRKYKGRRLKEQQEVAAAVIQRCYRKYKQFALYKKMTQAAILIQSKFRSYYEQKRFQQSRRAAVLIQQHYRSYRRRPGPPHRTSATLPARNKGSFLTKKQDQAARKIMRFLRRCRHRMRELKQNQELEGLPQPGLAT

SEQ ID NO: 859512 - protein, 842 aa, Homo sapiens [sequence omitted]

SEQ ID NO: 859513 - protein, 1227 aa, Homo sapiens
MGTDSPSPRPLRPGVTLPPGALTMNTKDTTEVAENSHHLKIFLPKKLLECLPRCPLLPPERLRWNTNEEIASYLITFEKHDEWLSCAPKTRPQNGSIILYNRKKVKYRKDGYLWKKRKDGKTTREDHMKLKVQGMELQCLYGCYVHSSIVPTFHRRCYWLLQNPDIVLVHYLNVPALEDCGKGCSPIFCSISSDRREWLKWSREELLGQLKPMFHGIKWSCGNGTEEFSVEHLVQQILDTHPTKPAPRTHACLCSGGLGSGSLTHKCSSTKHRIISPKVEPRALTLTSIPHPHPPEPPPLIAPLPPELPKAHTSPSSSSSSSSSGFAEPLEIRPSPPTSRGGSSRGGTAILLLTGLEQRAGGLTPTRHLAPQADPRPSMSLAVVVGTEPSAPPAPPSPAFDPDRFLNSPQRGQTYGGGQGVSPDFPEAEAAHTPCSALEPAAALEPQAAARGPPPQSVAGGRRGNCFFIQDDDSGEELKGHGAAPPIPSPPPSPPPSPAPLEPSSRVGRGEALFGGPVGASELEPFSLSSFPDLMGELISDEAPSIPAPTPQLSPALSTITDFSPEWSYPEGGVKVLITGPWTEAAEHYSCVFDHIAVPASLVQPGVLRCYCPAHEVGLVSLQVAGREGPLSASVLFEYRARRFLSLPSTQLDWLSLDDNQFRMSILERLEQMEKRMAEIAAAGQVPCQGPDAPPVQDEGQGPGFEARVVVLVESMIPRSTWKGPERLAHGSPFRGMSLLHLAAAQGYARLIETLSQWRSVETGSLDLEQEVDPLNVDHFSCTPLMWACALGHLEAAVLLFRWNRQALSIPDSLGRLPLSVAHSRGHVRLARCLEELQRQEPSVEPPFALSPPSSSPDTGLSSVSSPSELSDGTFSVTSAYSSAPDGSPPPAPLPASEMTMEDMAPGQLSSGVPEAPLLLMDYEATNSKGPLSSLPALPPASDDGAAPEDADSPQAVDVIPVDMISLAKQIIEATPERIKREDFVGLPEAGASMRERTGAVGLSETMSWLASYLENVDHFPSSTPPSELPFERGRLAVPSAPSWAEFLSASTSGKMESDFALLTLSDHEQRELYEAARVIQTAFRKYKGRRLKEQQEVAAAVIQRCYRKYKQLTWIALKFALYKKMTQAAILIQSKFRSYYEQKRFQQSRRAAVLIQQHYRSYRRRPGPPHRTSATLPARNKGSFLTKKQDQAARKIMRFLRRCRHRMRELKQNQELEGLPQPGLAT

SEQ ID NO: 859514 - protein, 1220 aa, Homo sapiens; identical to SEQ ID NO: 859494

SEQ ID NO: 859515 - protein, 1220 aa, Homo sapiens; identical to SEQ ID NO: 859494

SEQ ID NO: 859516 - protein, 176 aa, Homo sapiens
MEKEVSDFIQDSGQIKKKFQPMNKIERSILHDVVEVAGLTSFSFGEDDDCRYVMIFKKEFAPSDEELDSYRRGEEWDPQKAEEKRKLKELAQRQEEEAAQQGPVVVSPASDYKDKYSHLIGKGAAKDAAHMLQANKTYGCVPVANKRDTRSIEEAMNEIRAKKRLRQSGEELPPTS

SEQ ID NO: 859517 - protein, 1220 aa, Homo sapiens; identical to SEQ ID NO: 859494

SEQ ID NO: 859518 - protein, 1220 aa, Homo sapiens; identical to SEQ ID NO: 859494

SEQ ID NO: 859519 - protein, 1131 aa, Homo sapiens; identical to SEQ ID NO: 859504

SEQ ID NO: 859520 - protein, 710 aa, Homo sapiens
MGTDSPSPRPLRPGVTLPPGALTMNTKDTTEVAENSHHLKIFLPKKLLECLPRCPLLPPERLRWNTNEEIASYLITFEKHDEWLSCAPKTRPQNGSIILYNRKKVKYRKDGYLWKKRKDGKTTREDHMKLKVQGMELQCLYGCYVHSSIVPTFHRRCYWLLQNPDIVLVHYLNVPALEDCGKGCSPIFCSISSDRREWLKWSREELLGQLKPMFHGIKWSCGNGTEEFSVEHLVQQILDTHPTKPAPRTHACLCSGGLGSGSLTHKCSSTKHRIISPKVEPRALTLTSIPHPHPPEPPPLIAPLPPELPKAHTSPSSSSSSSSSGFAEPLEIRPSPPTSRGGSSRGGTAILLLTGLEQRAGGLTPTRHLAPQADPRPSMSLAVVVGTEPSAPPAPPSPAFDPDRFLNSPQRGQTYGGGQGVSPDFPEAEAAHTPCSALEPAAALEPQAAARGPPPQSVAGGRRGNCFFIQDDDSGEELKGHGAAPPIPSPPPSPPPSPAPLEPSSRVGRGEALFGGPVGASELEPFSLSSFPDLMGELISDEAPSIPAPTPQLSPALSTITDFSPEWSYPEGGVKVLITGPWTEAAEHYSCVFDHIAVPASLVQPGVLRCYCPAHEVGLVSLQVAGREGPLSASVLFEYRARRFLSLPSTQLDWLSLDDNQFRMSILERLEQMEKRMAEIAAAGQVPCQGPDAPPVQECGDWKLGLRAGG

SEQ ID NO: 859521 - protein, 510 aa, Homo sapiens
MEEPQAGDAARFSCPPNFTAKPPASESPRFSLEALTGPDTELWLIQAPADFAPECFNGRHVPLSGSQIVKGKLAGKRHRYRVLSSCPQAGEATLLAPSTEAGGGLTCASAPQGTLRILEGPQQSLSGSPLQPIPASPPPQIPPGLRPRFCAFGGNPPVTGPRSALAPNLLTSGKKKKEMQVTEAPVTQEAVNGHGALEVDMALGSPEMDVRKKKKKKNQQLKEPEAAGPVGTEPTVETLEPLGVLFPSTTKKRKKPKGKETFEPEDKTVKQEQINTEPLEDTVLSPTKKRKRQKGTEGMEPEEGVTVESQPQVKVEPLEEAIPLPPTKKRKKEKGQMAMMEPGTEAMEPVEPEMKPLESPGGTMAPQQPEGAKPQAQAALAAPKKKTKKEKQQDATVEPETEVVGPELPDDLEPQAAPTSTKKKKKKKERGHTVTEPIQPLEPELPGEGQPEARATPGSTKKRKKQSQESRMPETVPQEEMPGPPLNSESGEEAPTGRDKKRKQQQQQPV

SEQ ID NO: 859522 - protein, 497 aa, Homo sapiens
MPLHSSLGNRARLSQKKTKKKSKNLPSPVPLKPLPSLFLSVSFNGRHVPLSGSQIVKGKLAGKRHRYRVLSSCPQAGEATLLAPSTEAGGGLTCASAPQGTLRILEGPQQSLSGSPLQPIPASPPPQIPPGLRPRFCAFGGNPPVTGPRSALAPNLLTSGKKKKEMQVTEAPVTQEAVNGHGALEVDMALGSPEMDVRKKKKKKNQQLKEPEAAGPVGTEPTVETLEPLGVLFPSTTKKRKKPKGKETFEPEDKTVKQEQINTEPLEDTVLSPTKKRKRQKGTEGMEPEEGVTVESQPQVKVEPLEEAIPLPPTKKRKKEKGQMAMMEPGTEAMEPVEPEMKPLESPGGTMAPQQPEGAKPQAQAALAAPKKKTKKEKQQDATVEPETEVVGPELPDDLEPQAAPTSTKKKKKKKERGHTVTEPIQPLEPELPGEGQPEARATPGSTKKRKKQSQESRMPETVPQEEMPGPPLNSESGEEAPTGRDKKRKQQQQQPV

SEQ ID NO: 859523 - protein, 487 aa, Homo sapiens
MVSGLVDGKEGPGPDPKSGFLNLSQERIEVSHFNGRHVPLSGSQIVKGKLAGKRHRYRVLSSCPQAGEATLLAPSTEAGGGLTCASAPQGTLRILEGPQQSLSGSPLQPIPASPPPQIPPGLRPRFCAFGGNPPVTGPRSALAPNLLTSGKKKKEMQVTEAPVTQEAVNGHGALEVDMALGSPEMDVRKKKKKKNQQLKEPEAAGPVGTEPTVETLEPLGVLFPSTTKKRKKPKGKETFEPEDKTVKQEQINTEPLEDTVLSPTKKRKRQKGTEGMEPEEGVTVESQPQVKVEPLEEAIPLPPTKKRKKEKGQMAMMEPGTEAMEPVEPEMKPLESPGGTMAPQQPEGAKPQAQAALAAPKKKTKKEKQQDATVEPETEVVGPELPDDLEPQAAPTSTKKKKKKKERGHTVTEPIQPLEPELPGEGQPEARATPGSTKKRKKQSQESRMPETVPQEEMPGPPLNSESGEEAPTGRDKKRKQQQQQPV

SEQ ID NO: 859524 - protein, 510 aa, Homo sapiens; identical to SEQ ID NO: 859521

SEQ ID NO: 859525 - protein, 520 aa, Homo sapiens
MWTGKEVSVDPISPSAADAARFSCPPNFTAKPPASESPRFSLEALTGPDTELWLIQAPADFAPECFNGRHVPLSGSQIVKGKLAGKRHRYRVLSSCPQAGEATLLAPSTEAGGGLTCASAPQGTLRILEGPQQSLSGSPLQPIPASPPPQIPPGLRPRFCAFGGNPPVTGPRSALAPNLLTSGKKKKEMQVTEAPVTQEAVNGHGALEVDMALGSPEMDVRKKKKKKNQQLKEPEAAGPVGTEPTVETLEPLGVLFPSTTKKRKKPKGKETFEPEDKTVKQEQINTEPLEDTVLSPTKKRKRQKGTEGMEPEEGVTVESQPQVKVEPLEEAIPLPPTKKRKKEKGQMAMMEPGTEAMEPVEPEMKPLESPGGTMAPQQPEGAKPQAQAALAAPKKKTKKEKQQDATVEPETEVVGPELPDDLEPQAAPTSTKKKKKKKERGHTVTEPIQPLEPELPGEGQPEARATPGSTKKRKKQSQESRMPETVPQEEMPGPPLNSESGEEAPTGRDKKRKQQQQQPV

SEQ ID NO: 859526 - protein, 436 aa, Homo sapiens
MGLARALRRLSGALDSGDSRAGDEEEAGPGLCRNGWAPAPVQSPVGRRRGRFVKKDGHCNVRFVNLGGQGARYLSDLFTTCVDVRWRWMCLLFSCSFLASWLLFGLAFWLIASLHGDLAAPPPPAPCFSHVASFLAAFLFALETQTSIGYGVRSVTEECPAAVAAVVLQCIAGCVLDAFVVGAVMAKMAKPKKRNETLVFSENAVVALRDHRLCLMWRVGNLRRSHLVEAHVRAQLLQPRVTPEGEYIPLDHQDVDVGFDGGTDRIFLVSPITIVHEIDSASPLYELGRAELARADFELVVILEGMVEATAMTTQCRSSYLPGELLWGHRFEPVLFQRGSQYEVDYRHFHRTYEVPGTPVCSAKELDERAEQASHSLKSSFPGSLTAFCYENELALSCCQEEDEDDETEEGNGVETEDGAASPRVLTPTLALTLPP

SEQ ID NO: 859527 - protein, 1032 aa, Homo sapiens
MSQQGYVATPPYSQPQPGIGLSPPHYGHYGDPSHTASPTGMMKPAGPLGATATRGMLPPGPPPPGPHQFGQNGAHATGHPPQRFPGPPPVNNVASSHAPYQPSAQSSYPGPISTSSVTQLGSQLSAMQINSYGSGMAPPSQGPPGPLSATSLQTPPRPPQPSILQPGSQVLPPPPTTLNGPGASPLPLPMYRPDGLSGPPPPNAQYQPPPLPGQTLGAGYPPQQANSGPQMAGAQLSYPGGFPGGPAQMAGPPQPQKKLDPDSIPSPIQVIENDRASRGGQVYATNTRGQIPPLVTTDCMIQDQGNASPRFIRCTTYCFPCTSDMAKQAQIPLAAVIKPFATIPSNESPLYLVNHGESGPVRCNRCKAYMCPFMQFIEGGRRYQCGFCNCVNDVPPFYFQHLDHIGRRLDHYEKPELSLGSYEYVATLDYCRKSKPPNPPAFIFMIDVSYSNIKNGLVKLICEELKTMLEKIPKEEQEETSAIRVGFITYNKVLHFFNVKSNLAQPQMMVVTDVGEVFVPLLDGFLVNYQESQSVIHNLLDQIPDMFADSNENETVFAPVIQAGMEALKAADCPGKLFIFHSSLPTAEAPGKLKNRDDKKLVNTDKEKILFQPQTNVYDSLAKDCVAHGCSVTLFLFPSQYVDVASLGLVPQLTGGTLYKYNNFQMHLDRQQFLNDLRNDIEKKIGFDAIMRVRTSTGFRATDFFGGILMNNTTDVEMAAIDCDKAVTVEFKHDDKLSEDSGALIQCAVLYTTISGQRRLRIHNLGLNCSSQLADLYKSCETDALINFFAKSAFKAVLHQPLKVIREILVNQTAHMLACYRKNCASPSAASQLILPDSMKVLPVYMNCLLKNCVLLSRPEISTDERAYQRQLVMTMGVADSQLFFYPQLLPIHTLDVKSTMLPAAVRCSESRLSEEGIFLLANGLHMFLWLGVSSPPELIQGIFNVPSFAHINTDMTLLPEVGNPYSQQLRMIMGIIQQKRPYSMKLTIVKQREQPEMVFRQFLVEDKGLYGGSSYVDFLCCVHKEICQLLN

SEQ ID NO: 859528 - protein, 1032 aa, Homo sapiens; identical to SEQ ID NO: 859527

SEQ ID NO: 859529 - protein, 385 aa, Homo sapiens
HFDKMANIQKFDQYNTFQMHLDRQQFLNDLRNDIEKKIGFDAIMRVRTSTGFRATDFFGGILMNNTTDVEMAAIDCDKAVTVEFKHDDKLSEDSGALIQCAVLYTTISGQRRLRIHNLGLNCSSQLADLYKSCETDALINFFAKSAFKAVLHQPLKVIREILVNQTAHMLACYRKNCASPSAASQLILPDSMKVLPVYMNCLLKNCVLLSRPEISTDERAYQRQLVMTMGVADSQLFFYPQLLPIHTLDVKSTMLPAAVRCSESRLSEEGIFLLANGLHMFLWLGVSSPPELIQGIFNVPSFAHINTDMTLLPEVGNPYSQQLRMIMGIIQQKRPYSMKLTIVKQREQPEMVFRQFLVEDKGLYGGSSYVDFLCCVHKEICQLLN

SEQ ID NO: 859530 - protein, 217 aa, Homo sapiens [sequence omitted]

SEQ ID NO: 859531 - protein, 248 aa, Homo sapiens
SSAINAEWSFKAVLHQPLKVIREILVNQTAHMLACYRKNCASPSAASQLILPDSMKVLPVYMNCLLKNCVLLSRPEISTDERAYQRQLVMTMGVADSQLFFYPQLLPIHTLDVKSTMLPAAVRCSESRLSEEGIFLLANGLHMFLWLGVSSPPELIQGIFNVPSFAHINTDMTLLPEVGNPYSQQLRMIMGIIQQKRPYSMKLTIVKQREQPEMVFRQFLVEDKGLYGGSSYVDFLCCVHKEICQLLN

SEQ ID NO: 859532 - protein, 1015 aa, Homo sapiens [sequence omitted]

SEQ ID NO: 859533 - protein, 853 aa, Homo sapiens
MSQQGYVATPPYSQPQPGIGLSPPHYGHYGDPSHTASPTGMMKPAGPLGATATRGMLPPGPPPPGPHQFGQNGAHATGHPPQRFPGPPPVNNVASSHAPYQPSAQSSYPGPISTSSVTQLGSQLSAMQINSYGSGMAPPSQGPPGPLSATSLQTPPRPPQPSILQPGSQVLPPPPTTLNGPGASPLPLPMYRPDGLSGPPPPNAQYQPPPLPGQTLGAGYPPQQANSGPQMAGAQLSYPGGFPGGPAQMAGPPQPQKKLDPDSIPSPIQVIENDRASRGGQVYATNTRGQIPPLVTTDCMIQDQGNASPRFIRCTTYCFPCTSDMAKQAQIPLAAVIKPFATIPSNESPLYLVNHGESGPVRCNRCKAYMCPFMQFIEGGRRYQCGFCNCVNDVPPFYFQHLDHIGRRLDHYEKPELSLGSYEYVATLDYCRKSKPPNPPAFIFMIDVSYSNIKNGLVKLICEELKTMLEKIPKEEQEETSAIRVGFITYNKVLHFFNVKSNLAQPQMMVVTDVGEVFVPLLDGFLVNYQESQSVIHNLLDQIPDMFADSNENETVFAPVIQAGMEALKAADCPGKLFIFHSSLPTAEAPGKLKNRDDKKLVNTDKEKILFQPQTNVYDSLAKDCVAHGCSVTLFLFPSQYVDVASLGLVPQLTGGTLYKYNNFQMHLDRQQFLNDLRNDIEKKIGFDAIMRVRTSTGFRATDFFGGILMNNTTDVEMAAIDCDKAVTVEFKHDDKLSEDSGALIQCAVLYTTISGQRRLRIHNLGLNCSSQLADLYKSCETDALINFFAKSAFKAVLHQPLKVIREILVNQTAHMLACYRKNCASPSAASQVSYLWHIDVKVLQTTTHFFST

SEQ ID NO: 859534 - protein, 837 aa, Homo sapiens
MSQQGYVATPPYSQPQPGIGLSPPHYGHYGDPSHTASPTGMMKPAGPLGATATRGMLPPGPPPPGPHQFGQNGAHATGHPPQRFPGPPPVNNVASSHAPYQPSAQSSYPGPISTSSVTQLGSQLSAMQINSYGSGMAPPSQGPPGPLSATSLQTPPRPPQPSILQPGSQVLPPPPTTLNGPGASPLPLPMYRPDGLSGPPPPNAQYQPPPLPGQTLGAGYPPQQANSGPQMAGAQLSYPGGFPGGPAQMAGPPQPQKKLDPDSIPSPIQVIENDRASRGGQVYATNTRGQIPPLVTTDCMIQDQGNASPRFIRCTTYCFPCTSDMAKQAQIPLAAVIKPFATIPSNESPLYLVNHGESGPVRCNRCKAYMCPFMQFIEGGRRYQCGFCNCVNDVPPFYFQHLDHIGRRLDHYEKPELSLGSYEYVATLDYCRKSKPPNPPAFIFMIDVSYSNIKNGLVKLICEELKTMLEKIPKEEQEETSAIRVGFITYNKVLHFFNVKSNLAQPQMMVVTDVGEVFVPLLDGFLVNYQESQSVIHNLLDQIPDMFADSNENETVFAPVIQAGMEALKAADCPGKLFIFHSSLPTAEAPGKLKNRDDKKLVNTDKEKILFQPQTNVYDSLAKDCVAHGCSVTLFLFPSQYVDVASLGLVPQLTGGTLYKYNNFQMHLDRQQFLNDLRNDIEKKIGFDAIMRVRTSTGFRATDFFGGILMNNTTDVEMAAIDCDKAVTVEFKHDDKLSEDSGALIQCAVLYTTISGQRRLRIHNLGLNCSSQLADLYKSCETDALINFFAKSAFKAVLHQPLKVIREILVNQTAHMLACYRKNCASPSAASQFTCEK

SEQ ID NO: 859535 - protein, 629 aa, Homo sapiens
RRTCQEVGWRGGRALSPVPLRRRAKRRPRVRRSPHPPCPHPRAAAASAGRPSASQVRRSDPRQQVATMVKIVTVKTQAYQDQKPGTSGLRKRVKVFQSSANYAENFIQSIISTVEPAQRQEATLVVGGDGRFYMKEAIQLIARIAAANGIGRLVIGQNGILSTPAVSCIIRKIKAIGGIILTASHNPGGPNGDFGIKFNISNGGPAPEAITDKIFQISKTIEEYAVCPDLKVDLGVLGKQQFDLENKFKPFTVEIVDSVEAYATMLRSIFDFSALKELLSGPNRLKIRIDAMHGVVGPYVKKILCEELGAPANSAVNCVPLEDFGGHHPDPNLTYAADLVETMKSGEHDFGAAFDGDGDRNMILGKHGFFVNPSDSVAVIAANIFSIPYFQQTGVRGFARSMPTSGALDRVASATKIALYETPTGWKFFGNLMDASKLSLCGEESFGTGSDHIREKDGLWAVLAWLSILATRKQSVEDILKDHWQKYGRNFFTRYDYEEVEAEGANKMMKDLEALMFDRSFVGKQFSANDKVYTVEKADNFEYSDPVDGSISRNQGLRLIFTDGSRIVFRLSGTGSAGATIRLYIDSYEKDVAKINQDPQVMLAPLISIALKVSQLQERTGRTAPTVIT

SEQ ID NO: 859536 - protein, 356 aa, Homo sapiens
PEAGITGAHHNTRLIFVFLVEMGFHHVGQAGLELLTSGDAPTLASQSAGIPGVSHHAPNLTYAADLVETMKSGEHDFGAAFDGDGDRNMILGKHGFFVNPSDSVAVIAANIFSIPYFQQTGVRGFARSMPTSGALDRVASATKIALYETPTGWKFFGNLMDASKLSLCGEESFGTGSDHIREKDGLWAVLAWLSILATRKQSVEDILKDHWQKYGRNFFTRYDYEEVEAEGANKMMKDLEALMFDRSFVGKQFSANDKVYTVEKADNFEYSDPVDGSISRNQGLRLIFTDGSRIVFRLSGTGSAGATIRLYIDSYEKDVAKINQDPQVMLAPLISIALKVSQLQERTGRTAPTVIT

SEQ ID NO: 859537 - protein, 268 aa, Homo sapiens
MILGKHGFFVNPSDSVAVIAANIFSIPYFQQTGVRGFARSMPTSGALDRVASATKIALYETPTGWKFFGNLMDASKLSLCGEESFGTGSDHIREKDGLWAVLAWLSILATRKQSVEDILKDHWQKYGRNFFTRYDYEEVEAEGANKMMKDLEALMFDRSFVGKQFSANDKVYTVEKADNFEYSDPVDGSISRNQGLRLIFTDGSRIVFRLSGTGSAGATIRLYIDSYEKDVAKINQDPQVMLAPLISIALKVSQLQERTGRTAPTVIT

SEQ ID NO: 859538 - protein, 629 aa, Homo sapiens; identical to SEQ ID NO: 859535

SEQ ID NO: 859539 - protein, 534 aa, Homo sapiens
RRTCQEVGWRGGRALSPVPLRRRAKRRPRVRRSPHPPCPHPRAAAASAGRPSASQVRRSDPRQQVATMVKIVTVKTQAYQDQKPGTSGLRKRVKVFQSSANYAENFIQSIISTVEPAQRQEATLVVGGDGRFYMKEAIQLIARIAAANGIGRLVIGQNGILSTPAVSCIIRKIKAIGGIILTASHNPGGPNGDFGIKFNISNGGPAPEAITDKIFQISKTIEEYAVCPDLKVDLGVLGKQQFDLENKFKPFTVEIVDSVEAYATMLRSIFDFSALKELLSGPNRLKIRIDAMHGVVGPYVKKILCEELGAPANSAVNCVPLEDFGGHHPDPNLTYAADLVETMKSGEHDFGAAFDGDGDRNMILGKHGFFVNPSDSVAVIAANIFSIPYFQQTGVRGFARSMPTSGALDRVASATKIALYETPTGWKFFGNLMDASKLSLCGEESFGTGSDHIREKDGLWAVLAWLSILATRKQSVEDILKDHWQKYGRNFFTRYDYEEVEAEGANKMMVQVPFSFVNLSPHFLFTCNPTKCNF

SEQ ID NO: 859540 - protein, 359 aa, Homo sapiens
RRTCQEVGWRGGRALSPVPLRRRAKRRPRVRRSPHPPCPHPRAAAASAGRPSASQVRRSDPRQQVATMVKIVTVKTQAYQDQKPGTSGLRKRVKVFQSSANYAENFIQSIISTVEPAQRQEATLVVGGDGRFYMKEAIQLIARIAAANGIGRLVIGQNGILSTPAVSCIIRKIKAIGGIILTASHNPGGPNGDFGIKFNISNGGPAPEAITDKIFQISKTIEEYAVCPDLKVDLGVLGKQQFDLENKFKPFTVEIVDSVEAYATMLRSIFDFSALKELLSGPNRLKIRIDAMHGVVGPYVKKILCEELGAPANSAVNCVPLEDFGGHHPDPYQATPRACLVGQKWKATLGSYSLPSMSQ

SEQ ID NO: 859541 - protein, 622 aa, Homo sapiens
RRTCQEVGWRGGRALSPVPLRRRAKRRPRVRRSPHPPCPHPRAAAASAGRPSASQVRRSDPRQQVATMVKIVTVKTQAYQDQKPGTSGLRKRVKVFQSSANYAENFIQSIISTVEPAQRQEATLVVGGDGRFYMKEAIQLIARIAAANGIGRLVIGQNGILSTPAVSSIGGIILTASHNPGGPNGDFGIKFNISNGGPAPEAITDKIFQISKTIEEYAVCPDLKVDLGVLGKQQFDLENKFKPFTVEIVDSVEAYATMLRSIFDFSALKELLSGPNRLKIRIDAMHGVVGPYVKKILCEELGAPANSAVNCVPLEDFGGHHPDPNLTYAADLVETMKSGEHDFGAAFDGDGDRNMILGKHGFFVNPSDSVAVIAANIFSIPYFQQTGVRGFARSMPTSGALDRVASATKIALYETPTGWKFFGNLMDASKLSLCGEESFGTGSDHIREKDGLWAVLAWLSILATRKQSVEDILKDHWQKYGRNFFTRYDYEEVEAEGANKMMKDLEALMFDRSFVGKQFSANDKVYTVEKADNFEYSDPVDGSISRNQGLRLIFTDGSRIVFRLSGTGSAGATIRLYIDSYEKDVAKINQDPQVMLAPLISIALKVSQLQERTGRTAPTVIT

SEQ ID NO: 859542 - protein, 294 aa, Homo sapiens
KGTKAPRWLKSIWNMICSCFDGMDRNMILGKHGFFVNPSDSVAVIAANIFSIPYFQQTGVRGFARSMPTSGALDRVASATKIALYETPTGWKFFGNLMDASKLSLCGEESFGTGSDHIREKDGLWAVLAWLSILATRKQSVEDILKDHWQKYGRNFFTRYDYEEVEAEGANKMMKDLEALMFDRSFVGKQFSANDKVYTVEKADNFEYSDPVDGSISRNQGLRLIFTDGSRIVFRLSGTGSAGATIRLYIDSYEKDVAKINQDPQVMLAPLISIALKVSQLQERTGRTAPTVIT

SEQ ID NO: 859543 - protein, 152 aa, Homo sapiens
MYELGVNQCRGWHSSPVYDYEEVEAEGANKMMKDLEALMFDRSFVGKQFSANDKVYTVEKADNFEYSDPVDGSISRNQGLRLIFTDGSRIVFRLSGTGSAGATIRLYIDSYEKDVAKINQDPQVMLAPLISIALKVSQLQERTGRTAPTVIT

SEQ ID NO: 859544 - protein, 269 aa, Homo sapiens
RRTCQEVGWRGGRALSPVPLRRRAKRRPRVRRSPHPPCPHPRAAAASAGRPSASQVRRSDPRQQVATMVKIVTVKTQAYQDQKPGTSGLRKRVKVFQSSANYAENFIQSIISTVEPAQRQEATLVVGGDGRFYMKEAIQLIARIAAANGIGRLVIGQNGILSTPAVSCIIRKIKAIGGIILTASHNPGGPNGDFGIKFNISNGGPAPEAITDKIFQISKTIEEYAVCPDLKVDLGVLGKQQFDLENKFKPFTVEIVDSVEAYATMLRII

SEQ ID NO: 859545 - protein, 142 aa, Homo sapiens
SSGFGAAPNPARCCFAPFPVIGHPPVVTPLHRKVNCRHVGRGPAGSAEELRMEAAEEALMGPTIPDPSLLPGGPLVSFLVWAEAITWMPTWEGTSNVGPQPLSSSKSLHSPRGHPAPYSHGTGWTQRLWTRGLPLSRDPPSD

SEQ ID NO: 859546 - protein, 103 aa, Homo sapiens
YQGGFIKPVNTPKKINILQMKKKKKKKKKQRGSAPWLAGLGGGSSGELGRPREDPSPGSLLRDDIIRPPPCLQGPPPLHAELLPRGLLPIYTSRYFNPPAIIS

SEQ ID NO: 859547 - protein, 70 aa, Homo sapiens
PPPEAFFKTPYAESHQQPEEKKRRREERPKKGPGQATPNPQPSGKLEPRSSRPAWATWQNPVSTKNTKIS

SEQ ID NO: 859548 - protein, 114 aa, Homo sapiens
SPALFYSPPVARGRAPLPSDPPLGSFSKPRCPPRGFYMGERRPPHCVAVPTVSSFGTRRYGPRDKHTPSGSTPPSPHGGVLKTSFSRARAAPHNCFFFFFFSFFFVFLKSLITS

SEQ ID NO: 859549 - protein, 114 aa, Homo sapiens; identical to SEQ ID NO: 859548

SEQ ID NO: 859550 - protein, 114 aa, Homo sapiens; identical to SEQ ID NO: 859548

SEQ ID NO: 859551 - protein, 114 aa, Homo sapiens; identical to SEQ ID NO: 859548

SEQ ID NO: 859552 - protein, 114 aa, Homo sapiens; identical to SEQ ID NO: 859548

SEQ ID NO: 859553 - protein, 114 aa, Homo sapiens; identical to SEQ ID NO: 859548

SEQ ID NO: 859554 - protein, 456 aa, Homo sapiens
MDKLNKITVPASQKLRQLQKMVHDIKNNEGGIMNKIKKLKVKAPPSVPRRDYASESPADEEEQWSDDFDSDYENPDEHSDSEMYVMPAEENADDSYEPPPVEQETRPVHPALPFARGEYIDNRSSQRHSPPFSKTLPSKPSWPSEKARLTSTLPALTALQKPQVPPKPKGLLEDEADYVVPVEDNDENYIHPTESSSPPPEKAPMVNRSTKPNSSTPASPPGTASGRNSGAWETKSPPPAAPSPLPRAGKKPTTPLKTTPVASQQNASSVCEEKPIPAERHRGSSHRQEAVQSPVFPPAQKQIHQKPIPLPRFTEGGNPTVDGPLPSFSSNSTISEQEAGVLCKPWYAGACDRKSAEEALHRSNKDGSFLIRKSSGHDSKQPYTLVVFFNKRVYNIPVRFIEATKQYALGRKKNGEEYFGSVAEIIRNHQHSPLVLIDSQNNTKDSTRLKYAVKVS

SEQ ID NO: 859555 - protein, 252 aa, Homo sapiens [sequence omitted]

SEQ ID NO: 859556 - protein, 433 aa, Homo sapiens
MDKLNKITVPASQKLRQLQKMVHDIKNNEGGIMNKIKKLKVKAPPSVPRRDYASESPADEEEQWSDDFDSDYENPDEHSDSEMYVMPAEENADDSYEPPPVEQETRPVHPALPFARGEYIDNRSSQRHSPPFSKTLPSKPSWPSEKARLTSTLPALTALQKPQVPPKPKGLLEDEADYVVPVEDNDENYIHPTESSSPPPEKGRNSGAWETKSPPPAAPSPLPRAGKKPTTPLKTTPVASQQNASSVCEEKPIPAERHRGSSHRQEAVQSPVFPPAQKQIHQKPIPLPRFTEGGNPTVDGPLPSFSSNSTISEQEAGVLCKPWYAGACDRKSAEEALHRSNKDGSFLIRKSSGHDSKQPYTLVVFFNKRVYNIPVRFIEATKQYALGRKKNGEEYFGSVAEIIRNHQHSPLVLIDSQNNTKDSTRLKYAVKVS

SEQ ID NO: 859557 - protein, 208 aa, Homo sapiens [sequence omitted]

SEQ ID NO: 859558 - protein, 433 aa, Homo sapiens; identical to SEQ ID NO: 859556

SEQ ID NO: 859559 - protein, 215 aa, Homo sapiens
AHLFLFPRKKPTTPLKTTPVASQQNASSVCEEKPIPAERHRGSSHRQEAVQSPVFPPAQKQIHQKPIPLPRFTEGGNPTVDGPLPSFSSNSTISEQEAGVLCKPWYAGACDRKSAEEALHRSNKDGSFLIRKSSGHDSKQPYTLVVFFNKRVYNIPVRFIEATKQYALGRKKNGEEYFGSVAEIIRNHQHSPLVLIDSQNNTKDSTRLKYAVKVS

SEQ ID NO: 859560 - protein, 208 aa, Homo sapiens [sequence omitted]

SEQ ID NO: 859561 - protein, 208 aa, Homo sapiens [sequence omitted]

SEQ ID NO: 859562 - protein, 1093 aa, Homo sapiens
PRLLKNQTKNLLQKIDMDSKMKKMAELQLSVVSDPKNRKAIENQIQQWEQNLEKFHMDLFRMRCYLASLQGGELPNPKSLLAAASRPSKLALGRLGILSVSSFHALVCSRDDSALRKRTLSLTQRGRNKKGIFSSLKGLDTLARKGKEKRPSITQIFDSSGSHGFSGTQLPQNSSNSSEVDELLHIYGSTVDGVPRDNAWEIQTYVHFQDNHGVTVGIKPEHRVEDILTLACKMRQLEPSHYGLQLRKLVDDNVEYCIPAPYEYMQQQVYDEIEVFPLNVYDVQLTKTGSVCDFGFAVTAQVDERQHLSRIFISDVLPDGLAYGEGLRKGNEIMTLNGEAVSDLDLKQMEALFSEKSVGLTLIARPPDTKATLCTSWSDSDLFSRDQKSLLPPPNQSQLLEEFLDNFKKNTANDFSNVPDITTGLKRSQTDGTLDQVSHREKMEQTFRSAEQITALCRSFNDSQANGMEGPRENQDPPPRPLARHLSDADRLRKVIQELVDTEKSYVKDLSCLFELYLEPLQNETFLTQDEMESLFGSLPEMLEFQKVFLETLEDGISASSDFNTLETPSQFRKLLFSLGGSFLYYADHFKLYSGFCANHIKVQKVLERAKTDKAFKAFLDARNPTKQHSSTLESYLIKPVQRVLKYPLLLKELVSLTDQESEEHYHLTEALKAMEKVASHINEMQKIYEDYGTVFDQLVAEQSGTEKEVTELSMGELLMHSTVSWLNPFLSLGKARKDLELTVFVFKRAVILVYKENCKLKKKLPSNSRPAHNSTDLDPFKFRWLIPISALQVRLGNPAGTENNSIWELIHTKSEIEGRPETIFQLCCSDSESKTNIVKVIRSILRENFRRHIKCELPLEKTCKDRLVPLKNRVPVSAKLASSRSLKVLKNSSSNEWTGETGKGTLLDSDEGSLSSGTQSSGCPTAEGRQDSKSTSPGKYPHPGLADFADNLIKESDILSDEDDDHRQTVKQGSPTKDIEIQFQRLRISEDPDVHPEAEQQPGPESGEGQKGGEQPKLVRGHFCPIKRKANSTKRDRGTLLKAQIRHQSLDSQSENATIDLNSVLEREFSVQSLTSVVSEECFYETESHGKS

SEQ ID NO: 859563 - protein, 626 aa, Homo sapiens
MEGPRENQDPPPRPLARHLSDADRLRKVIQELVDTEKSYVKDLSCLFELYLEPLQNETFLTQDEMESLFGSLPEMLEFQKVFLETLEDGISASSDFNTLETPSQFRKLLFSLGGSFLYYADHFKLYSGFCANHIKVQKVLERAKTDKAFKAFLDARNPTKQHSSTLESYLIKPVQRVLKYPLLLKELVSLTDQESEEHYHLTEALKAMEKVASHINEMQKIYEDYGTVFDQLVAEQSGTEKEVTELSMGELLMHSTVSWLNPFLSLGKARKDLELTVFVFKRAVILVYKENCKLKKKLPSNSRPAHNSTDLDPFKFRWLIPISALQVRLGNPAGTENNSIWELIHTKSEIEGRPETIFQLCCSDSESKTNIVKVIRSILRENFRRHIKCELPLEKTCKDRLVPLKNRVPVSAKLASSRSLKVLKNSSSNEWTGETGKGTLLDSDEGSLSSGTQSSGCPTAEGRQDSKSTSPGKYPHPGLADFADNLIKESDILSDEDDDHRQTVKQGSPTKDIEIQFQRLRISEDPDVHPEAEQQPGPESGEGQKGGEQPKLVRGHFCPIKRKANSTKRDRGTLLKAQIRHQSLDSQSENATIDLNSVLEREFSVQSLTSVVSEECFYETESHGKS

SEQ ID NO: 859564 - protein, 1054 aa, Homo sapiens
RAIQSSAWRQGGRPSSPQASRARQLPSIEIQQWEQNLEKFHMDLFRMRCYLASLQGGELPNPKSLLAAASRPSKLALGRLGILSVSSFHALVCSRDDSALRKRTLSLTQRGRNKKGIFSSLKGLDTLARKGKEKRPSITQVDELLHIYGSTVDGVPRDNAWEIQTYVHFQDNHGVTVGIKPEHRVEDILTLACKMRQLEPSHYGLQLRKLVDDNVEYCIPAPYEYMQQQVYDEIEVFPLNVYDVQLTKTGSVCDFGFAVTAQVDERQHLSRIFISDVLPDGLAYGEGLRKGNEIMTLNGEAVSDLDLKQMEALFSEKSVGLTLIARPPDTKATLCTSWSDSDLFSRDQKSLLPPPNQSQLLEEFLDNFKKNTANDFSNVPDITTGLKRSQTDGTLDQVSHREKMEQTFRSAEQITALCRSFNDSQANGMEGPRENQDPPPRPLARHLSDADRLRKVIQELVDTEKSYVKDLSCLFELYLEPLQNETFLTQDEMESLFGSLPEMLEFQKVFLETLEDGISASSDFNTLETPSQFRKLLFSLGGSFLYYADHFKLYSGFCANHIKVQKVLERAKTDKAFKAFLDARNPTKQHSSTLESYLIKPVQRVLKYPLLLKELVSLTDQESEEHYHLTEALKAMEKVASHINEMQKIYEDYGTVFDQLVAEQSGTEKEVTELSMGELLMHSTVSWLNPFLSLGKARKDLELTVFVFKRAVILVYKENCKLKKKLPSNSRPAHNSTDLDPFKFRWLIPISALQVRLGNPAGTENNSIWELIHTKSEIEGRPETIFQLCCSDSESKTNIVKVIRSILRENFRRHIKCELPLEKTCKDRLVPLKNRVPVSAKLASSRSLKVLKNSSSNEWTGETGKGTLLDSDEGSLSSGTQSSGCPTAEGRQDSKSTSPGKYPHPGLADFADNLIKESDILSDEDDDHRQTVKQGSPTKDIEIQFQRLRISEDPDVHPEAEQQPGPESGEGQKGGEQPKLVRGHFCPIKRKANSTKRDRGTLLKAQIRHQSLDSQSENATIDLNSVLEREFSVQSLTSVVSEECFYETESHGKS

SEQ ID NO: 859565 - protein, 1054 aa, Homo sapiens; identical to SEQ ID NO: 859564

SEQ ID NO: 859566 - protein, 1078 aa, Homo sapiens
RAIQSSAWRQGGRPSSPQASRARQLPSIEIQQWEQNLEKFHMDLFRMRCYLASLQGGELPNPKSLLAAASRPSKLALGRLGILSVSSFHALVCSRDDSALRKRTLSLTQRGRNKKGIFSSLKGLDTLARKGKEKRPSITQIFDSSGSHGFSGTQLPQNSSNSSEVDELLHIYGSTVDGVPRDNAWEIQTYVHFQDNHGVTVGIKPEHRVEDILTLACKMRQLEPSHYGLQLRKLVDDNVEYCIPAPYEYMQQQVYDEIEVFPLNVYDVQLTKTGSVCDFGFAVTAQVDERQHLSRIFISDVLPDGLAYGEGLRKGNEIMTLNGEAVSDLDLKQMEALFSEKSVGLTLIARPPDTKATLCTSWSDSDLFSRDQKSLLPPPNQSQLLEEFLDNFKKNTANDFSNVPDITTGLKRSQTDGTLDQVSHREKMEQTFRSAEQITALCRSFNDSQANGMEGPRENQDPPPRPLARHLSDADRLRKVIQELVDTEKSYVKDLSCLFELYLEPLQNETFLTQDEMESLFGSLPEMLEFQKVFLETLEDGISASSDFNTLETPSQFRKLLFSLGGSFLYYADHFKLYSGFCANHIKVQKVLERAKTDKAFKAFLDARNPTKQHSSTLESYLIKPVQRVLKYPLLLKELVSLTDQESEEHYHLTEALKAMEKVASHINEMQKIYEDYGTVFDQLVAEQSGTEKEVTELSMGELLMHSTVSWLNPFLSLGKARKDLELTVFVFKRAVILVYKENCKLKKKLPSNSRPAHNSTDLDPFKFRWLIPISALQVRLGNPAGTENNSIWELIHTKSEIEGRPETIFQLCCSDSESKTNIVKVIRSILRENFRRHIKCELPLEKTCKDRLVPLKNRVPVSAKLASSRSLKVLKNSSSNEWTGETGKGTLLDSDEGSLSSGTQSSGCPTAEGRQDSKSTSPGKYPHPGLADFADNLIKESDILSDEDDDHRQTVKQGSPTKDIEIQFQRLRISEDPDVHPEAEQQPGPESGEGQKGGEQPKLVRGHFCPIKRKANSTKRDRGTLLKAQIRHQSLDSQSENATIDLNSVLEREFSVQSLTSVVSEECFYETESHGKS

SEQ ID NO: 859567 - protein, 112 aa, Homo sapiens
MLCVSACVLVLQRVCVWVVFVFTAPGAYFRLLDSLCSPYASDAFWVGSKPAVSRRRFFLGETRPLSWPGVSLGTGWGPGCSNNGARPPREVFRKPFWAPGAPQFFFFVLYLI

SEQ ID NO: 859568 - protein, 1054 aa, Homo sapiens; identical to SEQ ID NO: 859564

SEQ ID NO: 859569 - protein, 118 aa, Homo sapiens; identical to SEQ ID NO: 806695

SEQ ID NO: 859570 - protein, 209 aa, Homo sapiens
SRQQLESFSNPQIEPLNEGLGFSFSSPLSALKTQSFLLINLIFFSPSLALVAQLEVQWRNLGSLHFHLQGQSDSPAQASPVAGITSCDFRQSPFLELDTNLPANRVPAGLEKRLCAAAASILGKPADRVNVTVRPGLAMALSGSTEPCAQLSISSIGVVGTAEDNRSHSAHFFEFLTKELALGQDRILIRFFPLESWQIGKIGTVMTFL

SEQ ID NO: 859571 - protein, 118 aa, Homo sapiens; identical to SEQ ID NO: 806695

SEQ ID NO: 859572 - protein, 118 aa, Homo sapiens; identical to SEQ ID NO: 806695

SEQ ID NO: 859573 - protein, 118 aa, Homo sapiens; identical to SEQ ID NO: 806695

SEQ ID NO: 859574 - protein, 118 aa, Homo sapiens; identical to SEQ ID NO: 806695

SEQ ID NO: 859575 - protein, 93 aa, Homo sapiens
YLFHCVLPPCVLVNVTVRPGLAMALSGSTEPCAQLSISSIGVVGTAEDNRSHSAHFFEFLTKELALGQDRILIRFFPLESWQIGKIGTVMTFL

SEQ ID NO: 859576 - protein, 128 aa, Homo sapiens
MPFLELDTNLPANRVPAGLEKRLCAAAASILGKPADRVNVTVRPGLAMALSGSTEPCAQLSISSIGVVGTAEDNRSHSAHFFEFLTKELALGQDRISLCCPGWSAVARSWLTAVSTFLGSGESPTSAF

SEQ ID NO: 859577 - protein, 146 aa, Homo sapiens
MRSQVAVAPRPSSLVREPWVPPAFLPPELFPFLCPPCRSWSWTRICPPTECPRGWRNDSAPPLPPSWANLRTDTYPLFPLGVLADWQDRDGHDFFMIGHGGIQGICELAASSREISWQSEGLEITSFGLSRMQHSCDHIILFFILI

SEQ ID NO: 859578 - protein, 233 aa, Homo sapiens
MPFLELDTNLPANRVPAGLEKRLCAAAASILGKPADRKRGPGSTGRGEVGGPGVRPCPCSASPTVTPNLFPRDHSPLLSSRQALTFRAPRSRGSPSARLSLVALPSHDPGVTFRDRGPYRDPCPANTARFGFRALGSRPQRSPAGSNFGQNFSCPPQRVNVTVRPGLAMALSGSTEPCAQLSISSIGVVGTAEDNRSHSAHFFEFLTKELALGQDRCVGVVGDPCGTAADWSH

SEQ ID NO: 859579 - protein, 118 aa, Homo sapiens; identical to SEQ ID NO: 806695

SEQ ID NO: 859580 - protein, 118 aa, Homo sapiens; identical to SEQ ID NO: 806695

SEQ ID NO: 859581 - protein, 118 aa, Homo sapiens; identical to SEQ ID NO: 806695

SEQ ID NO: 859582 - protein, 118 aa, Homo sapiens; identical to SEQ ID NO: 806695

SEQ ID NO: 859583 - protein, 106 aa, Homo sapiens
MPFLELDTNLPANRVPAGLEKRLCAAAASILGKPADRVNVTVRPGLAMALSGSTEPCAQLSISSIGVVGTAEDNRSHSAHFFEFLTKELALGQDRVPGEVHGRLTE

SEQ ID NO: 859584 - protein, 112 aa, Homo sapiens; identical to SEQ ID NO: 806696

SEQ ID NO: 859585 - protein, 78 aa, Homo sapiens
AAIWRYEEILEIEAMCVETRPNNSKFLKTSFHQPRTSLIITVVEPFYIFTSNEGGFLLLYHLVLSAFWILAVLIEKSE

SEQ ID NO: 859586 - protein, 161 aa, Homo sapiens
MKAVSPVRPSGRKAPSGCGGGELALRCLAEHGHSLGGSAAAAAAAAAARCKAAEAAADEPALCLQCDMNDCYSRLRRLVPTIPPNKKVSKVEILQHVIDYILDLQLALETHPALLRQPPPPAPPHHPAGTCPAAPPRTPLTALNTDPAGAVNKQGDSILCR

SEQ ID NO: 859587 - protein, 117 aa, Homo sapiens
MGDFTHKLDGIFESERIKYGFNWVLCKYVNCVYNVVCLIFKRKGFVSDYTRIKVYRPKGLLMRSNSDIYMNMKYLVPSSQLKWQCLNRNEQNYMLAGYNQSKCLKIDSVLSMLFPQL

SEQ ID NO: 859588 - protein, 161 aa, Homo sapiens; identical to SEQ ID NO: 859586

SEQ ID NO: 859589 - protein, 161 aa, Homo sapiens; identical to SEQ ID NO: 859586

SEQ ID NO: 859590 - protein, 161 aa, Homo sapiens; identical to SEQ ID NO: 859586

SEQ ID NO: 859591 - protein, 161 aa, Homo sapiens; identical to SEQ ID NO: 859586

SEQ ID NO: 859592 - protein, 242 aa, Homo sapiens
MSGCDAREGDCCSRRCGAQDKEHPRYLIPELCKQFYHLGWVTGTGGGISLKHGDEIYIAPSGVQKERIQPEDMFVCDINEKDISGPSPSKKLKKSQCTPLFMNAYTMRGAGAVIHTHSKAAVMATLLFPGREFKITHQEMIKGIKKCTSGGYYRYDDMLVVPIIENTPEEKDLKDRMAHAMNEYPDSCAVLVRRHGVYVWGETWEKAKTMCECYDYLFDIAVSMKKVGLDPSQLPVGENGIV

SEQ ID NO: 859593 - protein, 242 aa, Homo sapiens; identical to SEQ ID NO: 859592

SEQ ID NO: 859594 - protein, 251 aa, Homo sapiens
RPAPGLPSAPPDCICGLAAASQAKRRAQSRAEIGGRAGPWSGPCLAVMLGRETVVPGDAARSDEIYIAPSGVQKERIQPEDMFVCDINEKDISGPSPSKKLKKSQCTPLFMNAYTMRGAGAVIHTHSKAAVMATLLFPGREFKITHQEMIKGIKKCTSGGYYRYDDMLVVPIIENTPEEKDLKDRMAHAMNEYPDSCAVLVRRHGVYVWGETWEKAKTMCECYDYLFDIAVSMKKVGLDPSQLPVGENGIV

SEQ ID NO: 859595 - protein, 205 aa, Homo sapiens
MRRAVAYMAIKIEAQGHQSFAIPSGVQKERIQPEDMFVCDINEKDISGPSPSKKLKKSQCTPLFMNAYTMRGAGAVIHTHSKAAVMATLLFPGREFKITHQEMIKGIKKCTSGGYYRYDDMLVVPIIENTPEEKDLKDRMAHAMNEYPDSCAVLVRRHGVYVWGETWEKAKTMCECYDYLFDIAVSMKKVGLDPSQLPVGENGIV

SEQ ID NO: 859596 - protein, 146 aa, Homo sapiens
MSGCDAREGDCCSRRCGAQDKEHPRYLIPELCKQFYHLGWVTGTGGGISLKHGDEIYIAPSGVQKERIQPEDMFVCDINEKDISGPSPSKKLKKSQCTPLFMNAYTMRGAGAVIHTHSKAAVMATLLFPGREFKITHQEMINMMIC

SEQ ID NO: 859597 - protein, 242 aa, Homo sapiens; identical to SEQ ID NO: 859592

SEQ ID NO: 859598 - protein, 242 aa, Homo sapiens; identical to SEQ ID NO: 859592

SEQ ID NO: 859599 - protein, 259 aa, Homo sapiens
MRRAVAYMAIKIEAQGHQSFAIPSGTFWLWRSLLSQDKEHPRYLIPELCKQFYHLGWVTGTGGGISLKHGDEIYIAPSGVQKERIQPEDMFVCDINEKDISGPSPSKKLKKSQCTPLFMNAYTMRGAGAVIHTHSKAAVMATLLFPGREFKITHQEMIKGIKKCTSGGYYRYDDMLVVPIIENTPEEKDLKDRMAHAMNEYPDSCAVLVRRHGVYVWGETWEKAKTMCECYDYLFDIAVSMKKVGLDPSQLPVGENGIV

SEQ ID NO: 859600 - protein, 285 aa, Homo sapiens
GLLRRPRGGAEHSAEPLCLRPLFPQPRVGAGPRRRTVVSQTKRTGVPGVPGGGQAVGFSAGSLGFAAPGSEMSKPPPKPVKPGQVKVFRALYTFEPRTPDELYFEEGDIIYITDMSDTNWWKGTSKGRTGLIPSNYVAEQAESIDNPLHEAAKRGNLSWLRECLDNRVGVNGLDKAGSTALYWACHGGHKDIVEMLFTQPNIELNQQNKLGDTALHAAAWKGYADIVQLLLAKGARTDLRNIEKKLAFDMATNAACASLLKKKQGTDAVRTLSNAEDYLDDEDSD

SEQ ID NO: 859601 - protein, 239 aa, Homo sapiens
ATAKRAPVPSAPLPAARSPRGPQPLSPRSSWVRGMPGQVKVFRALYTFEPRTPDELYFEEGDIIYITDMSDTNWWKGTSKGRTGLIPSNYVAEQAESIDNPLHEAAKRGNLSWLRECLDNRVGVNGLDKAGSTALYWACHGGHKDIVEMLFTQPNIELNQQNKLGDTALHAAAWKGYADIVQLLLAKGARTDLRNIEKKLAFDMATNAACASLLKKKQGTDAVRTLSNAEDYLDDEDSD

SEQ ID NO: 859602 - protein, 207 aa, Homo sapiens
GLLRRPRGGAEHSAEPLCLRPLFPQPRVGAGPRRRTVVSQTKRTGVPGVPGGGQAVGFSAGSLGFAAPGSEMSKPPPKPVKPGQVKVFRALYTFEPRTPDELYFEEGDIIYITDMSDTNWWKGTSKGRTGLIPSNYVAEQAESIDNPLHEAAKRGNLSWLRECLDNRVGVNGLDKAGSTALYWACHGGHKGITFCLLYVSMLLKMCF

SEQ ID NO: 859603 - protein, 179 aa, Homo sapiens
GLLRRPRGGAEHSAEPLCLRPLFPQPRVGAGPRRRTVVSQTKRTGVPGVPGGGQAVGFSAGSLGFAAPGSEMSKPPPKPVKPGQVKVFRALYTFEPRTPDELYFEEGDIIYITDMSDTNWWKGTSKGRTGLIPSNYVAEQAESIDNPLHEAAKRGNLSWLRECLDNRVGVNGLDKAVYV

SEQ ID NO: 859604 - protein, 527 aa, Homo sapiens
MGSSEVSIIPGLQKEEKAAVERRRLHVLKALKKLRIEADEAPVVAVLGSGGGLRAHIACLGVLSEMKEQGLLDAVTYLAGVSGSTWAISSLYTNDGDMEALEADLKHRFTRQEWDLAKSLQKTIQAARSENYSLTDFWAYMVISKQTRELPESHLSNMKKPVEEGTLPYPIFAAIDNDLQPSWQEARAPETWFEFTPHHAGFSALGAFVSITHFGSKFKKGRLVRTHPERDLTFLRGLWGSALGNTEVIREYIFDQLRNLTLKGLWRRAVANAKSIGHLIFARLLRLQESSQGEHPPPEDEGGEPEHTWLTEMLENWTRTSLEKQEQPHEDPERKGSLSNLMDFVKKTGICASKWEWGTTHNFLYKHGGIRDKIMSSRKHLHLVDAGLAINTPFPLVLPPTREVHLILSFDFSAGDPFETIRATTDYCRRHKIPFPQVEEAELDLWSKAPASCYILKGETGPVVMHFPLFNIDACGGDIEAWSDTYDTFKLADTYTLDVVVLLLALAKKNVRENKKKILRELMNVAG

SEQ ID NO: 859605 - protein, 142 aa, Homo sapiens
  misc_feature (14)..(14): Xaa can be any naturally occurring amino acid
RKVCKKSRWYGRNXRDDPFETIRATTDYCRRHKIPFPQVEEAELDLWSKAPASCYILKGETGPVVMHFPLFNIDACGGDIEAWSDTYDTFKLADTYTLDVVVLLLALAKKNVRENKKKILRELMNVAGLYYPKDSARSCCLA

SEQ ID NO: 859606 - protein, 220 aa, Homo sapiens
SLLNSPWLSRLLSLGSLSNLMDFVKKTGICASKWEWGTTHNFLYKHGGIRDKIMSSRKHLHLVDAGLAINTPFPLVLPPTREVHLILSFDFSAGDPFETIRATTDYCRRHKIPFPQVEEAELDLWSKAPASCYILKGETGPVVMHFPLFNIDACGGDIEAWSDTYDTFKLADTYTLDVVVLLLALAKKNVRENKKKILRELMNVAGLYYPKDSARSCCLA

SEQ ID NO: 859607 - protein, 379 aa, Homo sapiens
MGSSEVSIIPGLQKEEKAAVERRRLHVLKALKKLRIEADEAPVVAVLGSGGGLRAHIACLGVLSEMKEQGLLDAVTYLAGVSGSTWAISSLYTNDGDMEALEADLKHRFTRQEWDLAKSLQKTIQAARSENYSLTDFWAYMVISKQTRELPESHLSNMKKPVEEGTLPYPIFAAIDNDLQPSWQEARAPETWFEFTPHHAGFSALGAFVSITHFGSKFKKGRLVRTHPERDLTFLRGLWGSALGNTEVIREYIFDQLRNLTLKGLWRRAVANAKSIGHLIFARLLRLQESSQGEHPPPEDEGGEPEHTWLTEMLENWTRTSLEKQEQPHEDPERKGSLSNLMDFVKKTGICASKWEWGTTHNFLYKHGWLHQELFCGLN

SEQ ID NO: 859608 - protein, 401 aa, Homo sapiens
MGSSEVSIIPGLQKEEKAAVERRRLHVLKALKKLRIEADEAPVVAVLGSGGGLRAHIACLGVLSEMKEQGLLDAVTYLAGVSGSTWAISSLYTNDGDMEALEADLKHRFTRQEWDLAKSLQKTIQAARSENYSLTDFWAYMVISKQTRELPESHLSNMKKPVEEGTLPYPIFAAIDNDLQPSWQEARAPETWFEFTPHHAGFSALGAFVSITHFGSKFKKGRLVRTHPERDLTFLRGLWGSALGNTEVIREYIFDQLRNLTLKGLWRRAVANAKSIGHLIFARLLRLQESSQGEHPPPEDEGGEPEHTWLTEMLENWTRTSLEKQEQPHEDPERKGTMCSVISVINSKCHQPSPPSCSSPPLWASPAGDMTRCPTGTVWIFVPFHISCWNVIPQCKLVQPL

SEQ ID NO: 859609 - protein, 541 aa, Homo sapiens
MGSSEVSIIPGLQKEEKAAVERRRLHVLKALKKLRIEADEAPVVAVLGSGGGLRAHIACLGVLSEMKEQGLLDAVTYLAGVSGSTWAISSLYTNDGDMEALEADLKHRFTRQEWDLAKSLQKTIQAARSENYSLTDFWAYMVISKQTRELPESHLSNMKKPVEEGTLPYPIFAAIDNDLQPSWQEARAPETWFEFTPHHAGFSALGAFVSITHFGSKFKKGRLVRTHPERDLTFLRGLWGSALGNTEVIREYIFDQLRNLTLKGLWRRAVANAKSIGHLIFARLLRLQESSQGEHPPPEDEGGEPEHTWLTEMLENWTRTSLEKQEQPHEDPERKGSLSNLMDFVKKTGICASKWEWGTTHNFLYKHGGIRDKIMSSRKHLHLVDAGLAINTPFPLVLPPTREVHLILSFDFSAGDPFETIRATTDYCRRHKIPFPQVEEAELDLWSKAPASCYILKGETGPVVMHFPLFNIDACGGDIEAWSDTYDTFKLADTYTLDVVVLLLALAKKNVRENKKKILRELMNVAGLYYPKDSARSCCLA

SEQ ID NO: 859610 - protein, 541 aa, Homo sapiens; identical to SEQ ID NO: 859609

SEQ ID NO: 859611 - protein, 428 aa, Homo sapiens
MGSSEVSIIPGLQKEEKAAVERRRLHVLKALKKLRIEADEAPVVAVLGSGGGLRAHIACLGVLSEMKEQGLLDAVTYLAGVSGSTWAISSLYTNDGDMEALEADLKHRFTRQEWDLAKSLQKTIQAARSENYSLTDFWAYMVISKQTRELPESHLSNMKKPVEEGTLPYPIFAAIDNDLQPSWQEARAPETWFEFTPHHAGFSALGAFVSITHFGSKFKKGRLVRTHPERDLTFLRGLWGSALGNTEVIREYIFDQLRNLTLKGLWRRAVANAKSIGHLIFARLLRLQESSQGEHPPPEDEGGEPEHTWLTEMLENWTRTSLEKQEQPHEDPERKGSLSNLMDFVKKTGICASKWEWGTTHNFLYKHGGIRDKIMSSRKHLHLVDAGLAINTPFPLVLPPTREVHLILSFDFSAGDPFEQLCGLIQCA

SEQ ID NO: 859612 - protein, 315 aa, Homo sapiens
MGSSEVSIIPGLQKEEKAAVERRRLHVLKALKKLRIEADEAPVVAVLGSGGGLRAHIACLGVLSEMKEQGLLDAVTYLAGVSGSTWAISSLYTNDGDMEALEADLKHRFTRQEWDLAKSLQKTIQAARSENYSLTDFWAYMVISKQTRELPESHLSNMKKPVEEGTLPYPIFAAIDNDLQPSWQEARAPETWFEFTPHHAGFSALGAFVSITHFGSKFKKGRLVRTHPERDLTFLRGLWGSALGNTEVIREYIFDQLRNLTLKGLWRRAVANAKSIGHLIFARLLRLQESSQGEHPPPEDEGGEPEHTWSWSMSV

SEQ ID NO: 859613 - protein, 1516 aa, Homo sapiens
MDSPPKLTGETLIVHHIPLVHCQVPDRQCCGGAGGGGGSTRPNPFCPPELGITQPDQDLGQADSLLFSSLHSAPGGTARSIDSTKSRSRDGRGPGAPKRHNPFLLQEGVGEPGLGDLYDDSIGDSATQQSFHLHGTGQPNFHLSSFQLPPSGPRVGRPWGTTRSRAGVVEGQEQEPVMTLDTQQCGTSHCCRPELEAETMELDECGGPGGSGSGGGASDTSGFSFDQEWKLSSDESPRNPGCSGSGDQHCRCSSTSSQSEAADQSMGYVSDSSCNSSDGVLVTFSTLYNKMHGTPRANLNSAPQSCSDSSFCSHSDPGAFYLDLQPSPFESKMSYESHHPESGGREGGYGCPHASSPELDANCNSYRPHCEPCPAVADLTACFQSQARLVVATQNYYKLVTCDLSSQSSPSPAGSSITSCSEEHTKISPPPGPGPDPGPSQPSEYYLFQKPEVQPEEQEAVSSSTQAAAAVGPTVLEGQVYTNTSPPNLSTGRQRSRSYDRSLQRSPPVRLGSLERMLSCPVRLSEGPAAMAGPGSPPRRVTSFAELAKGRKKTGGSGSPPLRVSVGDSSQEFSPIQEAQQDRGAPLDEGTCCSHSLPPMPLGPGMDLLGPDPSPPWSTQVCQGPHSSEMPPAGLRATGQGPLAQLMDPGPALPGSPANSHTQRDARARADGGGTESRPVLRYSKEQRPTTLPIQPFVFQHHFPKQLAKARALHSLSQLYSLSGCSRTQQPAPLAAPAAQVSVPAPSGEPQASTPRATGRGARKAGSEPETSRPSPLGSYSPIRSVGPFGPSTDSSASTSCSPPPEQPTATESLPPWSHSCPSAVRPATSQQPQKEDQKILTLTEYRLHGTGSLPPLGSWRSGLSRAESLARGGGEGSMATRPSNANHLSPQALKWREYRRKNPLGPPGLSGSLDRRSQEARLARRNPIFEFPGSLSAASHLNCRLNGQAVKPLPLTCPDFQDPFSLTEKPPAEFCLSPDGSSEAISIDLLQKKGLVKAVNIAVDLIVAHFGTSRDPGVKAKLGNSSVSPNVGHLVLKYLCPAVRAVLEDGLKAFVLDVIIGQRKNMPWSVVEASTQLGPSTKVLHGLYNKVSQFPELTSHTMRFNAFILGLLNIRSLEFWFNHLYNHEDIIQTHYQPWGFLSAAHTVCPGLFEELLLLLQPLALLPFSLDLLFQHRLLQSGQQQRQHKELLRVSQDLLLSAHSTLQLARARGQEGPGDVDRAAQGERVKGVGASEGGEEEEEEEETEEVAEAAGGSGRARWARGGQAGWWYQLMQSSQVYIDGSIEGSRFPRGSSNSSSEKKKGAGGGGPPQAPPPREGVVEGAEACPASEEALGRERGWPFWMGSPPDSVLAELRRSREREGPAASPAENEEGASEPSPGGIKWGHLFGSRKAQREARPTNRLPSDWLSLDKSMFQLVAQTVGSRREPEPKESLQEPHSPALPSSPPCEVQALCHHLATGPGQLSFHKGDILRVLGRAGGDWLRCSRGPDSGLVPLAYVTLTPTPSPTPGSSQN

SEQ ID NO: 859614 - protein, 518 aa, Homo sapiens
MHKARQVQGKARQGTSRDPGVKAKLGNSSVSPNVGHLVLKYLCPAVRAVLEDGLKAFVLDVIIGQRKNMPWSVVEASTQLGPSTKVLHGLYNKVSQFPELTSHTMRFNAFILGLLNIRSLEFWFNHLYNHEDIIQTHYQPWGFLSAAHTVCPGLFEELLLLLQPLALLPFSLDLLFQHRLLQSGQQQRQHKELLRVSQDLLLSAHSTLQLARARGQEGPGDVDRAAQGERVKGVGASEGGEEEEEEEETEEVAEAAGGSGRARWARGGQAGWWYQLMQSSQVYIDGSIEGSRFPRGSSNSSSEKKKGAGGGGPPQAPPPREGVVEGAEACPASEEALGRERGWPFWMGSPPDSVLAELRRSREREGPAASPAENEEGASEPSPGGIKWGHLFGSRKAQREARPTNRLPSDWLSLDKSMFQLVAQTVGSRREPEPKESLQEPHSPALPSSPPCEVQALCHHLATGPGQLSFHKGDILRVLGRAGGDWLRCSRGPDSGLVPLAYVTLTPTPSPTPGSSQN

SEQ ID NO: 859615 - protein, 158 aa, Homo sapiens
  misc_feature (8)..(8): Xaa can be any naturally occurring amino acid
PGWYAPEXWDIVDHAVWASEPSPGGIKWGHLFGSRKAQREARPTNRLPSDWLSLDKSMFQLVAQTVGSRREPEPKESLQEPHSPALPSSPPCEVQALCHHLATGPGQLSFHKGDILRVLGRAGGDWLRCSRGPDSGLVPLAYVTLTPTPSPTPGSSQN

SEQ ID NO: 859616 - protein, 178 aa, Homo sapiens
MDSPPKLTGETLIVHHIPLVHCQVPDRQCCGGAGGGGGSTRPNPFCPPELGITQPDQDLGQADSLLFSSLHSAPGGTARSIDSTKSRSRDGRGPGAPKRHNPFLLQEGVGEPGLGDLYDDSIGDSATQQSFHLHGTGQPNFHLSSLVCKRREDKGPKECHVALLLCEDSSCGGSCRLY

SEQ ID NO: 859617 - protein, 1516 aa, Homo sapiens; identical to SEQ ID NO: 859613

SEQ ID NO: 859618 - protein, 1516 aa, Homo sapiens; identical to SEQ ID NO: 859613

SEQ ID NO: 859619 - protein, 427 aa, Homo sapiens
MTSAQPAPLSAAALPRLSFKVPLGPGSGSLCGSVPLSFPLDIIQTHYQPWGFLSAAHTVCPGLFEELLLLLQPLALLPFSLDLLFQHRLLQSGQQQRQHKELLRVSQDLLLSAHSTLQLARARGQEGPGDVDRAAQGERVKGVGASEGGEEEEEEEETEEVAEAAGGSGRARWARGGQAGWWYQLMQSSQVYIDGSIEGSRFPRGSSNSSSEKKKGAGGGGPPQAPPPREGVVEGAEACPASEEALGRERGWPFWMGSPPDSVLAELRRSREREGPAASPAENEEGASEPSPGGIKWGHLFGSRKAQREARPTNRLPSDWLSLDKSMFQLVAQTVGSRREPEPKESLQEPHSPALPSSPPCEVQALCHHLATGPGQLSFHKGDILRVLGRAGGDWLRCSRGPDSGLVPLAYVTLTPTPSPTPGSSQN

SEQ ID NO: 859620 - protein, 159 aa, Homo sapiens
MDHSHHMGMSYMDSNSTMQPSHHHPTTSASHSHGGGDSSMMMMPMTFYFGFKNVELLFSGLVINTAGEMAGAFVAVFLLAMFYEGLKIARESLLRKSQVSIRYNSMPVPGPNGTILMETHKTVGQQMLSFPHLLQTSRSAGITGMSHHTCPSPPRITQT

SEQ ID NO: 859621 - protein, 146 aa, Homo sapiens
MTFYFGFKNVELLFSGLVINTAGEMAGAFVAVFLLAMFYEGLKIARESLLRKSQVSIRYNSMPVPGPNGTILMETHKTVGQQMLSFPHLLQTVLHIIQVVISYFLMLIFMTYNGYLCIAVAAGAGTGYFLFSWKKAVVVDITEHCH

SEQ ID NO: 859622 - protein, 190 aa, Homo sapiens
MDHSHHMGMSYMDSNSTMQPSHHHPTTSASHSHGGGDSSMMMMPMTFYFGFKNVELLFSGLVINTAGEMAGAFVAVFLLAMFYEGLKIARESLLRKSQVSIRYNSMPVPGPNGTILMETHKTVGQQMLSFPHLLQTVLHIIQVVISYFLMLIFMTYNGYLCIAVAAGAGTGYFLFSWKKAVVVDITEHCH

SEQ ID NO: 859623 - protein, 190 aa, Homo sapiens; identical to SEQ ID NO: 859622

SEQ ID NO: 859624 - protein, 79 aa, Homo sapiens
AGDLEDPPIITHVGITACHLHDLQRVPLHCSSSRGRYRILPLQLEEGSGSGYHRALPLTSNSMAWPYRLQWEVVEDLKT

SEQ ID NO: 859625 - protein, 386 aa, Homo sapiens
EARRGAARGRSRSYGTKAPPPPCLPPRWSNASRRRGSRRRWRRWSSSRGPATRGASTSLRTALPPAAEPSLLAMSQSRHRAEAPPLEREDSGTFSLGKMITAKPGKTPIQVLHEYGMKTKNIPVYECERSDVQIHVPTFTFRVTVGDITCTGEGTSKKLAKHRAAEAAINILKANASICFAVPDPLMPDPSKQPKNQLNPIGSLQELAIHHGWRLPEYTLSQEGGPAHKREYTTICRLESFMETGKGASKKQAKRNAAEKFLAKFSNISPENHISLTNVVGHSLGCTWHSLRNSPGEKINLLKRSLLSIPNTDYIQLLSEIAKEQGFNITYLDIDELSANGQYQCLAELSTSPITVCHGSGISCGNAQSDAAHNALQYLKIIAERK

SEQ ID NO: 859626 - protein, 386 aa, Homo sapiens; identical to SEQ ID NO: 859625

SEQ ID NO: 859627 - protein, 386 aa, Homo sapiens; identical to SEQ ID NO: 859625

SEQ ID NO: 859628 - protein, 386 aa, Homo sapiens; identical to SEQ ID NO: 859625

SEQ ID NO: 859629 - protein, 288 aa, Homo sapiens
MITAKPGKTPIQVLHEYGMKTKNIPVYECERSDVQIHVPTFTFRVTVGDITCTGEGTSKKLAKHRAAEAAINILKANASICFAVPDPLMPDPSKQPKNQLNPIGSLQELAIHHGWRLPEYTLSQEGGPAHKREYTTICRLESFMETGKGASKKQAKRNAAEKFLAKFSNISPENHISLTNVVGHSLGCTWHSLRNSPGEKINLLKRSLLSIPNTDYIQLLSEIAKEQGFNITYLDIDELSANGQYQCLAELSTSPITVCHGSGISCGNAQSDAAHNALQYLKIIAERK

SEQ ID NO: 859630 - protein, 178 aa, Homo sapiens
EARRGAARGRSRSYGTKAPPPPCLPPRWSNASRRRGSRRRWRRWSSSRGPATRGASTSLRTALPPAAEPSLLAMSQSRHRAEAPPLEREDSGTFSLGKMITAKPGKTPIQVLHEYGMKTKNIPVYECERSDVQIHVPTFTFRVTVGDITCTGEGTSKKLAKHRAAEAAINILKANASI

SEQ ID NO: 859631 - protein, 200 aa, Homo sapiens
MPDPSKQPKNQLNPIGSLQELAIHHGWRLPEYTLSQEGGPAHKREYTTICRLESFMETGKGASKKQAKRNAAEKFLAKFSNISPENHISLTNVVGHSLGCTWHSLRNSPGEKINLLKRSLLSIPNTDYIQLLSEIAKEQGFNITYLDIDELSANGQYQCLAELSTSPITVCHGSGISCGNAQSDAAHNALQYLKIIAERK

SEQ ID NO: 859632 - protein, 127 aa, Homo sapiens
MQSTPFCGFCSLGKMITAKPGKTPIQVLHEYGMKTKNIPVYECERSDVQIHVPTFTFRVTVGDITCTGEGTSKKLAKHRAAEAAINILKANASIWNWLFIMAGDFLNIPFPRREDLLIRENILQFAG

SEQ ID NO: 859633 - protein, 180 aa, Homo sapiens
MQSTPFCGFCSLGKMITAKPGKTPIQVLHEYGMKTKNIPVYECERSDVQIHVPTFTFRVTVGDITCTGEGTSKKLAKHRAAEAAINILKANASICFAVPDPLMPDPSKQPKNQLNPIGSLQELAIHHGWRLPEYTLSQEGGPAHKREYTTICRLESFMETDKCSRTFFRMYLAFLEEFSW

SEQ ID NO: 859634 - protein, 261 aa, Homo sapiens
EARRGAARGRSRSYGTKAPPPPCLPPRWSNASRRRGSRRRWRRWSSSRGPATRGASTSLRTALPPAAEPSLLAMSQSRHRAEAPPLEREDSGTFSLGKMITAKPGKTPIQVLHEYGMKTKNIPVYECERSDVQIHVPTFTFRVTVGDITCTGEGTSKKLAKHRAAEAAINILKANASICFAVPDPLMPDPSKQPKNQLNPIGSLQELAIHHGWRLPEYTLSQEGGPAHKREYTTICRLESFMETGTYFLQLKAFEIFSDDE

SEQ ID NO: 859635 - protein, 177 aa, Homo sapiens
MQSTPFCGFCSLGKMITAKPGKTPIQVLHEYGMKTKNIPVYECERSDVQIHVPTFTFRVTVGDITCTGEGTSKKLAKHRAAEAAINILKANASICFAVPDPLMPDPSKQPKNQLNPIGSLQELAIHHGWRLPEYTLSQEGGPAHKREYTTICRLESFMETGTYFLQLKAFEIFSDDE

SEQ ID NO: 859636 - protein, 386 aa, Homo sapiens; identical to SEQ ID NO: 859625

SEQ ID NO: 859637 - protein, 302 aa, Homo sapiens
MQSTPFCGFCSLGKMITAKPGKTPIQVLHEYGMKTKNIPVYECERSDVQIHVPTFTFRVTVGDITCTGEGTSKKLAKHRAAEAAINILKANASICFAVPDPLMPDPSKQPKNQLNPIGSLQELAIHHGWRLPEYTLSQEGGPAHKREYTTICRLESFMETGKGASKKQAKRNAAEKFLAKFSNISPENHISLTNVVGHSLGCTWHSLRNSPGEKINLLKRSLLSIPNTDYIQLLSEIAKEQGFNITYLDIDELSANGQYQCLAELSTSPITVCHGSGISCGNAQSDAAHNALQYLKIIAERK

SEQ ID NO: 859638 - protein, 329 aa, Homo sapiens
RPAEEQRGGVAGATAPRLRPHPACPLAGATQAGGGGVGGGGGAGAPPGDQRPGERARRSAPLFLQPLSRPFSPCPRAGTAPRPRRWSARTVGPSGEGTSKKLAKHRAAEAAINILKANASICFAVPDPLMPDPSKQPKNQLNPIGSLQELAIHHGWRLPEYTLSQEGGPAHKREYTTICRLESFMETGKGASKKQAKRNAAEKFLAKFSNISPENHISLTNVVGHSLGCTWHSLRNSPGEKINLLKRSLLSIPNTDYIQLLSEIAKEQGFNITYLDIDELSANGQYQCLAELSTSPITVCHGSGISCGNAQSDAAHNALQYLKIIAERK

SEQ ID NO: 859639 - protein, 228 aa, Homo sapiens
MQVFGELNFFVFSSSKISWLSFAVPDPLMPDPSKQPKNQLNPIGSLQELAIHHGWRLPEYTLSQEGGPAHKREYTTICRLESFMETGKGASKKQAKRNAAEKFLAKFSNISPENHISLTNVVGHSLGCTWHSLRNSPGEKINLLKRSLLSIPNTDYIQLLSEIAKEQGFNITYLDIDELSANGQYQCLAELSTSPITVCHGSGISCGNAQSDAAHNALQYLKIIAERK

SEQ ID NO: 859640 - protein, 386 aa, Homo sapiens; identical to SEQ ID NO: 859625

SEQ ID NO: 859641 - protein, 361 aa, Homo sapiens
EARRGAARGRSRSYGTKAPPPPCLPPRWSNASRRRGSRRRWRRWSSSRGPATRGASTSLRTALPPAAEPSLLAMSQSRHRAEAPPLEREDSGTFSLGKMITAKPGKTPIQVLHEYGMKTKNIPVYECERSDVQIHVPTFTFRVTVGDITCTGEGTSKKLAKHRAAEAAINILKANASICFAVPDPLMPDPSKQPKNQLNPIGSLQELAIHHGWRLPEYTLSQEGGPAHKREYTTICRLESFMETGKGASKKQAKRNAAEKFLAKFSNISPENHISLTNVVGHSLGCTWHSLRNSPGEKINLLKRSLLSIPNTDYIQLLSEIAKEQGFNITYLDIGMIFFSLAFPRHVYLKMCLRNKNVFEE

SEQ ID NO: 859642 - protein, 221 aa, Homo sapiens
EARRGAARGRSRSYGTKAPPPPCLPPRWSNASRRRGSRRRWRRWSSSRGPATRGASTSLRTALPPAAEPSLLAMSQSRHRAEAPPLEREDSGTFSLGKMITAKPGKTPIQVLHEYGMKTKNIPVYECERSDVQIHVPTFTFRVTVGDITCTGEGTSKKLAKHRAAEAAINILKANASICFAVPDPLMPDPSKQPKNQLNPIGSLQVSCTVLCLLMKYIISL

SEQ ID NO: 859643 - protein, 114 aa, Homo sapiens
MLSGARCRLASALRGTRAPPSAVARRCLHASGSRPLADRGKKTEEPPRDFDPALLEFLVCPLSKKPLRYEASTNELINEELGIAYPIIDGIPNMIPQAARMTRQSKKQEEVEQR

SEQ ID NO: 859644 - protein, 108 aa, Homo sapiens
MLSGARCRLASALRGTRAPPSAVARRCLHASGSRPLADRGKKTEEPPRDFDPALLEFLVCPLSKKPLRYEASTNELINEELGIAYPIIDGIPNMIPQAARMTRQSSDL

SEQ ID NO: 859645 - protein, 885 aa, Homo sapiens
AAAVGAKPGPRSQSRSRAGRGVMAGPRGALLAWCRRQCEGYRGVEIRDLSSSFRDGLAFCAILHRHRPDLLDFDSLSKDNVFENNRLAFEVAEKELGIPALLDPNDMVSMSVPDCLSIMTYVSQYYNHFCSPGQAGVSPPRKGLAPCSPPSVAPTPVEPEDVAQGEELSSGSLSEQGTGQTPSSTCAACQQHVHLVQRYLADGRLYHRHCFRCRRCSSTLLPGAYENGPEEGTFVCAEHCARLGPGTRSGTRPGPFSQPKQQHQQQLAEDAKDVPGGGPSSSAPAGAEADGPKASPEARPQIPTKPRVPGKLQELASPPAGRPTPAPRKASESTTPAPPTPRPRSSLQQENLVEQAGSSSLVNGRLHELPVPKPRGTPKPSEGTPAPRKDPPWITLVQAEPKKKPAPLPPSSSPGPPSQDSRQVENGGTEEVAQPSPTASLESKPYNPFEEEEEDKEEEAPAAPSLATSPALGHPESTPKSLHPWYGITPTSSPKTKKRPAPRAPSASPLALHASRLSHSEPPSATPSPALSVESLSSESASQTAGAELLEPPAVPKSSSEPAVHAPGTPGNPVSLSTNSSLASSGELVEPRVEQMPQASPGLAPRTRGSSGPQPAKPCSGATPTPLLLVGDRSPVPSPGSSSPQLQVKSSCKENPFNRKPSPAASPATKKATKGSKPVRPPAPGHGFPLIKRKVQADQYIPEEDIHGEMDTIERRLDALEHRGVLLEEKLRGGLNEGREDDMLVDWFKLIHEKHLLVRRESELIYVFKQQNLEQRQADVEYELRCLLNKPEKDWTEEDRAREKVLMQELVTLIEQRNAIINCLDEDRQREEEEDKMLEAMIKKKEFQREAEPEGKKKGKFKTMKMLKLLGNKRDAKSKSPRDKS

SEQ ID NO: 859646 - protein, 885 aa, Homo sapiens; identical to SEQ ID NO: 859645

SEQ ID NO: 859647 - protein, 885 aa, Homo sapiens; identical to SEQ ID NO: 859645

SEQ ID NO: 859648 - protein, 885 aa, Homo sapiens; identical to SEQ ID NO: 859645

SEQ ID NO: 859649 - protein, 885 aa, Homo sapiens; identical to SEQ ID NO: 859645

SEQ ID NO: 859650 - protein, 67 aa, Homo sapiens
  misc_feature (24)..(24): Xaa can be any naturally occurring amino acid
EQTTAYIQTLNLFPTFPPFLFCCXCLLQLQQTQHEKPVGDCPLLEQLLGCALFEGGALLPSDQSGGR

SEQ ID NO: 859651 - protein, 837 aa, Homo sapiens
VSLPSYGGGDGGHDNFQLSGALGDFDSLSKDNVFENNRLAFEVAEKELGIPALLDPNDMVSMSVPDCLSIMTYVSQYYNHFCSPGQAGVSPPRKGLAPCSPPSVAPTPVEPEDVAQGEELSSGSLSEQGTGQTPSSTCAACQQHVHLVQRYLADGRLYHRHCFRCRRCSSTLLPGAYENGPEEGTFVCAEHCARLGPGTRSGTRPGPFSQPKQQHQQQLAEDAKDVPGGGPSSSAPAGAEADGPKASPEARPQIPTKPRVPGKLQELASPPAGRPTPAPRKASESTTPAPPTPRPRSSLQQENLVEQAGSSSLVNGRLHELPVPKPRGTPKPSEGTPAPRKDPPWITLVQAEPKKKPAPLPPSSSPGPPSQDSRQVENGGTEEVAQPSPTASLESKPYNPFEEEEEDKEEEAPAAPSLATSPALGHPESTPKSLHPWYGITPTSSPKTKKRPAPRAPSASPLALHASRLSHSEPPSATPSPALSVESLSSESASQTAGAELLEPPAVPKSSSEPAVHAPGTPGNPVSLSTNSSLASSGELVEPRVEQMPQASPGLAPRTRGSSGPQPAKPCSGATPTPLLLVGDRSPVPSPGSSSPQLQVKSSCKENPFNRKPSPAASPATKKATKGSKPVRPPAPGHGFPLIKRKVQADQYIPEEDIHGEMDTIERRLDALEHRGVLLEEKLRGGLNEGREDDMLVDWFKLIHEKHLLVRRESELIYVFKQQNLEQRQADVEYELRCLLNKPEKDWTEEDRAREKVLMQELVTLIEQRNAIINCLDEDRQREEEEDKMLEAMIKKKEFQREAEPEGKKKGKFKTMKMLKLLGNKRDAKSKSPRDKS

SEQ ID NO: 859652 - protein, 885 aa, Homo sapiens; identical to SEQ ID NO: 859645

SEQ ID NO: 859653 - protein, 894 aa, Homo sapiens
AAAVGAKPGPRSQSRSRAGRGVMAGPRGALLAWCRRQCEGYRGVEIRDLSSSFRDGLAFCAILHRHRPDLLDFDSLSKDNVFENNRLAFEVAEKELGIPALLDPNDMVSMSVPDCLSIMTYVSQYYNHFCSPGQAGVSPPRKGLAPCSPPSVAPTPVEPEDVAQGEELSSGSLSEQGTGQTPSSTCAACQQHVHLVQRYLADGRLYHRHCFRCRRCSSTLLPGAYENGPEEGTFVCAEHCARLGPGTRSGTRPGPFSQPKQQHQQQLAEDAKDVPGGGPSSSAPAGAEADGPKASPEARPQIPTKPRVPGKLQELASPPAGRPTPAPRKASESTTPAPPTPRPRSSLQQENLVEQAGSSSLVNGRLHELPVPKPRGTPKPSEGTPAPRKDPPWITLVQAEPKKKPAPLPPSSSPGPPSQDSRQVENGGTEEVAQPSPTASLESKPYNPFEEEEEDKEEEAPAAPSLATSPALGHPESTPKSLHPWYGITPTSSPKTKKRPAPRAPSASPLALHASRLSHSEPPSATPSPALSVESLSSESASQTAGAELLEPPAVPKSSSEPAVHAPGTPGNPVSLSTNSSLASSGELVEPRVEQMPQASPGLAPRTRGSSGPQPAKPCSGATPTPLLLVGDRSPVPSPGSSSPQLQVKSSCKENPFNRKPSPAASPATKKATKGSKPVRPPAPGHGFPLIKRKVQADQYIPEEDIHGEMDTIERRLDALEHRGVLLEEKLRGGLNEGREDDMLVDWFKLIHEKHLLVRRESELIYVFKQQNLEQRQADVEYELRCLLNKPEKDWTEEDRAREKVLMQELVTLIEQRNAIINCLDEDRQREEEEDKMLEAMIKKKGEALAGDEAEFQREAEPEGKKKGKFKTMKMLKLLGNKRDAKSKSPRDKS

SEQ ID NO: 859654 - protein, 885 aa, Homo sapiens; identical to SEQ ID NO: 859645

SEQ ID NO: 859655 - protein, 71 aa, Homo sapiens
MGLRRAPLCVQNTVPGWARGHGRGPGLGPSHSQSSSTSSNSQKMPRMFQEAAPAPVLLQGLRPMDPRPALR

SEQ ID NO: 859656 - protein, 228 aa, Homo sapiens
APGGGGRGWGPSGVRGNKMATETVELHKLKLAELKQECLARGLETKGIKQDLIHRLQAYLEEHAEEEANEEDVLGDETEEEETKPIELPVKEEEPPEKTVDVAAEKKVVKITSEIPQTERMQKRAERFNVPVSLESKKAARAARFGISSVPTKGLSSDNKPMVNLDKLKERAQRFGLNVSSISRKSEDDEKLKKRKERFGIVTSSAGTGTTEDTEAKKRKRAERFGIA

SEQ ID NO: 859657 - protein, 210 aa, Homo sapiens
MATETVELHKLKLAELKQECLARGLETKGIKQDLIHRLQAYLEEHAEEEANEEDVLGDETEEEETKPIELPVKEEEPPEKTVDVAAEKKVVKITSEIPQTERMQKRAERFNVPVSLESKKAARAARFGISSVPTKGLSSDNKPMVNLDKLKERAQRFGLNVSSISRKSEDDEKLKKRKERFGIVTSSAGTGTTEDTEAKKRKRAERFGIA

SEQ ID NO: 859658 - protein, 228 aa, Homo sapiens; identical to SEQ ID NO: 859656

SEQ ID NO: 859659 - protein, 108 aa, Homo sapiens
MQKRAERFNVPVSLESKKAARAARFGISSVPTKGLSSDNKPMVNLDKLKERAQRFGLNVSSISRKSEDDEKLKKRKERFGIVTSSAGTGTTEDTEAKKRKRAERFGIA

SEQ ID NO: 859660 - protein, 183 aa, Homo sapiens
RVPYLRSYTLLQAYLEEHAEEEANEEDVLGDETEEEETKPIELPVKEEEPPEKTVDVAAEKKVVKITSEIPQTERMQKRAERFNVPVSLESKKAARAARFGISSVPTKGLSSDNKPMVNLDKLKERAQRFGLNVSSISRKSEDDEKLKKRKERFGIVTSSAGTGTTEDTEAKKRKRAERFGIA

SEQ ID NO: 859661 - protein, 169 aa, Homo sapiens
GLWIRSCFIPLVSRHILKNMEEETKPIELPVKEEEPPEKTVDVAAEKKVVKITSEIPQTERMQKRAERFNVPVSLESKKAARAARFGISSVPTKGLSSDNKPMVNLDKLKERAQRFGLNVSSISRKSEDDEKLKKRKERFGIVTSSAGTGTTEDTEAKKRKRAERFGIA

SEQ ID NO: 859662 - protein, 228 aa, Homo sapiens; identical to SEQ ID NO: 859656

SEQ ID NO: 859663 - protein, 95 aa, Homo sapiens
ESKKAARADLGLGFLQFQQKVCQSDNKPMVNLDKLKERAQRFGLNVSSISRKSEDDEKLKKRKERFGIVTSSAGTGTTEDTEAKKRKRAERFGIA

SEQ ID NO: 859664 - protein, 169 aa, Homo sapiens
MATETVELHKLKLAELKQECLARGLETKGIKQDLIHRLQAYLEEHAEEEANEEDVLGDETEEEETKPIELPVKEEEPPEKTVDVAAEKKVVKITSEIPQTERMQKRAERFNVPVSLESKKAARAARFGISSVPTKGLSSDNKPMVNLDKLKERAQRFGLNVSSISRKVM

SEQ ID NO: 859665 - protein, 180 aa, Homo sapiens
MATETVELHKLKLAELKQECLARGLETKGIKQDLIHRLQAYLEEHAEEEANEEDVLGDETEEEETKPIELPVKEEEPPEKTVDVAAEKKVVKITSEIPQTERMQKRAERFNVPVSLESKKAARAARFGISSVPTKGLSSDNKPMVNLDKLKERAQRFGLNVSSISRKAKKRKRAERFGIA

SEQ ID NO: 859666 - protein, 136 aa, Homo sapiens
MATETVELHKLKLAELKQECLARGLETKGIKQDLIHRLQAYLEEHAEEEANEEDVLGDETEEEETKPIELPVKEEEPPEKTVDVAAEKKVVKITSEIPQTERMQKRAERFNVPVSLESKKAARAARFGISSVPTKV

SEQ ID NO: 859667 - protein, 210 aa, Homo sapiens; identical to SEQ ID NO: 859657

SEQ ID NO: 859668 - protein, 228 aa, Homo sapiens; identical to SEQ ID NO: 859656

SEQ ID NO: 859669 - protein, 233 aa, Homo sapiens
MELHFLFFFSLWELPFYSLVFILLTKEKFYFFSPQLAELKQECLARGLETKGIKQDLIHRLQAYLEEHAEEEANEEDVLGDETEEEETKPIELPVKEEEPPEKTVDVAAEKKVVKITSEIPQTERMQKRAERFNVPVSLESKKAARAARFGISSVPTKGLSSDNKPMVNLDKLKERAQRFGLNVSSISRKSEDDEKLKKRKERFGIVTSSAGTGTTEDTEAKKRKRAERFGIA

SEQ ID NO: 859670 - protein, 228 aa, Homo sapiens; identical to SEQ ID NO: 859656

SEQ ID NO: 859671 - protein, 108 aa, Homo sapiens
MQKRAERFNVPVSLESKKAARAARLGFLQFQQKVCQSDNKPMVNLDKLKERAQRFGLNVSSISRKSEDDEKLKKRKERFGIVTSSAGTGTTEDTEAKKRKRAERFGIA

SEQ ID NO: 859672 - protein, 71 aa, Homo sapiens
LNDVVDTHERKERRGLAGDDSLNLPPLHSEDDEKLKKRKERFGIVTSSAGTGTTEDTEAKKRKRAERFGIA

SEQ ID NO: 859673 - protein, 169 aa, Homo sapiens; identical to SEQ ID NO: 859664

SEQ ID NO: 859674 - protein, 180 aa, Homo sapiens
APGGGGRGWGPSGVRGNKMATETVELHKLKLAELKQECLARGLETKGIKQDLIHRLQAYLEEHAEEEANEEDVLGDETEEEETKPIELPVKEEEPPEKTVDVAAEKKVVKITSEIPQTERMQKRAERFNVPVSLESKKAARAARFGISSVPTKGKSTEILLRKLPFYSFFSGITGFISPK

SEQ ID NO: 859675 - protein, 716 aa, Homo sapiens
MPLPEPSEQEGESVKAGQEPSPKPGTDVIPAAPRKPREFSKLVLLTASDQDEDGVGSKPQEVHCVLSLEMAGPATLASTLQILPVEEQGGVVQPALEMPEQKCSKLDAAAPQSLEFLRTPFGGRLLVLESFLYKQEKAVGDKVYWKCRQHAELGCRGRAITRGLRATVMRGHCHAPDEQGLEARRQREKLPSLALPEGLGEPQGPEGPGGRVEEPLEGVGPWQCPEEPEPTPGLVLSKPALEEEEAPRALSLLSLPPKKRSILGLGQARPLEFLRTCYGGSFLVHESFLYKREKAVGDKVYWTCRDHALHGCRSRAITQGQRVTVMRGHCHQPDMEGLEARRQQEKAVETLQAGQDGPGSQVDTLLRGVDSLLYRRGPGPLTLTRPRPRKRAKVEDQELPTQPEAPDEHQDMDADPGGPEFLKTPLGGSFLVYESFLYRREKAAGEKVYWTCRDQARMGCRSRAITQGRRVTVMRGHCHPPDLGGLEALRQREKRPNTAQRGSPGGPEFLKTPLGGSFLVYESFLYRREKAAGEKVYWTCRDQARMGCRSRAITQGRRVMVMRRHCHPPDLGGLEALRQREHFPNLAQWDSPDPLRPLEFLRTSLGGRFLVHESFLYRKEKAAGEKVYWMCRDQARLGCRSRAITQGHRIMVMRSHCHQPDLAGLEALRQRERLPTTAQQEDPEKIQVQLCFKTCSPESQQIYGDIKDVRLDGESQ

SEQ ID NO: 859676 - protein, 765 aa, Homo sapiens
MPLPEPSEQEGESVKAGQEPSPKPGTDVIPAAPRKPREFSKLVLLTASDQDEDGVGSKPQEVHCVLSLEMAGPATLASTLQILPVEEQGGVVQPALEMPEQKCSKLDAAAPQSLEFLRTPFGGRLLVLESFLYKQEKAVGDKVYWKCRQHAELGCRGRAITRGLRATVMRGHCHAPDEQGLEARRQREKLPSLALPEGLGEPQGPEGPGGRVEEPLEGVGPWQCPEEPEPTPGLVLSKPALEEEEAPRALSLLSLPPKKRSILGLGQARPLEFLRTCYGGSFLVHESFLYKREKAVGDKVYWTCRDHALHGCRSRAITQGQRVTVMRGHCHQPDMEGLEARRQQEKAVETLQAGQDGPGSQVDTLLRGVDSLLYRRGPGPLTLTRPRPRKRAKVEDQELPTQPEAPDEHQDMDADPGGPEFLKTPLGGSFLVYESFLYRREKAAGEKVYWTCRDQARMGCRSRAITQGRRVTVMRGHCHPPDLGGLEALRQREKRPNTAQRGSPGAGLSFQWLFRILQLLGHAPVLLCPSGSSCLPSLPAPHGPCPALSIPLEGGPEFLKTPLGGSFLVYESFLYRREKAAGEKVYWTCRDQARMGCRSRAITQGRRVMVMRRHCHPPDLGGLEALRQREHFPNLAQWDSPDPLRPLEFLRTSLGGRFLVHESFLYRKEKAAGEKVYWMCRDQARLGCRSRAITQGHRIMVMRSHCHQPDLAGLEALRQRERLPTTAQQEDPEKIQVQLCFKTCSPESQQIYGDIKDVRLDGESQ

SEQ ID NO: 859677 - protein, 803 aa, Homo sapiens
MPLPEPSEQEGESVKAGQEPSPKPGTDVIPAAPRKPREFSKLVLLTASDQDEDGVGSKPQEVHCVLSLEMAGPATLASTLQILPVEEQGGVVQPALEMPEQKCSKLDAAAPQSLEFLRTPFGGRLLVLESFLYKQEKAVGDKVYWKCRQHAELGCRGRAITRGLRATVMRGHCHAPDEQGLEARRQREKLPSLALPEGLGEPQGPEGPGGRVEEPLEGVGPWQCPEEPEPTPGLVLSKPALEEEEAPRALSLLSLPPKKRSILGLGQARPLEFLRTCYGGSFLVHESFLYKREKAVGDKVYWTCRDHALHGCRSRAITQGQRVTVMRGHCHQPDMEGLEARRQQEKAVETLQAGQDGPGSQVDTLLRGVDSLLYRRGPGPLTLTRPRPRKRAKVEDQELPTQPEAPDEHQDMDADPGGPEFLKTPLGGSFLVYESFLYRREKAAGEKVYWTCRDQARMGCRSRAITQGRRVTVMRGHCHPPDLGGLEALRQREKRPNTAQRGSPERQCCEVPASSSPPLLTPQSPGVTPLPARLSGATPLSPIRLLSSFVPRGPRVIPLTNQARRTLHASLGGCWGRTSDAADTASLKAWQGGPEFLKTPLGGSFLVYESFLYRREKAAGEKVYWTCRDQARMGCRSRAITQGRRVMVMRRHCHPPDLGGLEALRQREHFPNLAQWDSPDPLRPLEFLRTSLGGRFLVHESFLYRKEKAAGEKVYWMCRDQARLGCRSRAITQGHRIMVMRSHCHQPDLAGLEALRQRERLPTTAQQEDPEKIQVQLCFKTCSPESQQIYGDIKDVRLDGESQ

SEQ ID NO: 859678 - protein, 716 aa, Homo sapiens; identical to SEQ ID NO: 859675

SEQ ID NO: 859679 - protein, 704 aa, Homo sapiens
MPLPEPSEQEGESVKAGQEPSPKPGTDVIPAAPRKPREFSKLVLLTASDQDEDGVGSKPQEVHCVLSLEMAGPATLASTLQILPVEEQGGVVQPALEMPEQKCSKLDAAAPQSLEFLRTPFGGRLLVLESFLYKQEKAVGDKVYWKCRQHAELGCRGRAITRGLRATVMRGHCHAPDEQGLEARRQREKLPSLALPEGLGEPQGPEGPGGRVEEPLEGVGPWQCPEEPEPTPGLVLSKPALEEEEAPRALSLLSLPPKKRSILGLGQARPLEFLRTCYGGSFLVHESFLYKREKAVGDKVYWTCRDHALHGCRSRAITQGQRVTVMRGHCHQPDMEGLEARRQQEKAVETLQAGQDGPGSQVDTLLRGVDSLLYRRGPGPLTLTRPRPRKRAKVEDQELPTQPEAPDEHQDMDADPGGPEFLKTPLGGSFLVYESFLYRREKAAGEKVYWTCRDQARMGCRSRAITQGRRVTVMRGHCHPPDLGGLEALRQREKRPNTAQRGSPGGPEFLKTPLGGSFLVYESFLYRREKAAGEKVYWTCRDQARMGCRSRAITQGRRVMVMRRHCHPPDLGGLEALRQREHFPNLAQWDSPDPLRPLEFLRTSLGGRFLVHESFLYRKEKAAGEKVYWMCRDQARLGCRSRAITQGHRIMVMRSHCHQPDLAGLEALRQRERLPTTAQQEDPEKIQVQLCFKTCSPESQQIYG

SEQ ID NO: 859680 - protein, 710 aa, Homo sapiens
MPLPEPSEQEGESVKAGQEPSPKPGTDVIPAAPRKPREFSKLVLLTASDQDEDGVGSKPQEVHCVLSLEMAGPATLASTLQILPVEEQGGVVQPALEMPEQKCSKLDAAAPQSLEFLRTPFGGRLLVLESFLYKQEKAVGDKVYWKCRQHAELGCRGRAITRGLRATVMRGHCHAPDEQGLEARRQREKLPSLALPEGLGEPQGPEGPGGRVEEPLEGVGPWQCPEEPEPTPGLVLSKPALEEEEAPRALSLLSLPPKKRSILGLGQARPLEFLRTCYGGSFLVHESFLYKREKAVGDKVYWTCRDHALHGCRSRAITQGQRVTVMRGHCHQPDMEGLEARRQQEKAVETLQAGQDGPGSQVDTLLRGVDSLLYRRGPGPLTLTRPRPRKRAKVEDQELPTQPEAPDEHQDMDADPGGPEFLKTPLGGSFLVYESFLYRREKAAGEKVYWTCRDQARMGCRSRAITQGRRVTVMRGHCHPPDLGGLEALRQREKRPNTAQRGSPGGPEFLKTPLGGSFLVYESFLYRREKAAGEKVYWTCRDQARMGCRSRAITQGRRVMVMRRHCHPPDLGGLEALRQREHFPNLAQWDSPDPLRPLEFLRTSLGGRFLVHESFLYRKEKAAGEKVYWMCRDQARLGCRSRAITQGHRIMVMRSHCHQPDLAGLEALRQRERLPTTAQQEDPEKIQVQLCFKTCSPESQQIYGKSQPLV

SEQ ID NO: 859681 - protein, 517 aa, Homo sapiens
MPLPEPSEQEGESVKAGQEPSPKPGTDVIPAAPRKPREFSKLVLLTASDQDEDGVGSKPQEVHCVLSLEMAGPATLASTLQILPVEEQGGVVQPALEMPEQKCSKLDAAAPQSLEFLRTPFGGRLLVLESFLYKQEKAVGDKVYWKCRQHAELGCRGRAITRGLRATVMRGHCHAPDEQGLEARRQREKLPSLALPEGLGEPQGPEGPGGRVEEPLEGVGPWQCPEEPEPTPGLVLSKPALEEEEAPRALSLLSLPPKKRSILGLGQARPLEFLRTCYGGSFLVHESFLYKREKAVGDKVYWTCRDHALHGCRSRAITQGQRVTVMRGHCHQPDMEGLEARRQQEKAVETLQAGQDGPGSQVDTLLRGVDSLLYRRGPGPLTLTRPRPRKRAKVEDQELPTQPEAPDEHQDMDADPGGPEFLKTPLGGSFLVYESFLYRREKAAGEKVYWTCRDQARMGCRSRAITQGRRVTVMRGHCHPPDLGGLEALRQREKRPNTSCGGCPSCGGPVRPFPVLQ

SEQ ID NO: 859682 - protein, 110 aa, Homo sapiens
RARGHGARSRGAGRGWELVPGSGWRRRPGPRGRRSLLQRQRLKDPPRRCRRRGRAPLPSVKPAQRSYGICPRGSCPASQRRDPGVGDDGDASHSHVKVILWLHQLPTEPP

SEQ ID NO: 859683 - protein, 734 aa, Homo sapiens
MPLPEPSEQEGESVKAGQEPSPKPGTDVIPAAPRKPREFSKLVLLTASDQDEDGVGSKPQEVHCVLSLEMAGPATLASTLQILPVEEQGGVVQPALEMPEQKCSKLDAAAPQSLEFLRTPFGGRLLVLESFLYKQEKAVGDKVYWKCRQHAELGCRGRAITRGLRATVMRGHCHAPDEQGLEARRQREKLPSLALPEGLGEPQGPEGPGGRVEEPLEGVGPWQCPEEPEPTPGLVLSKPALEEEEAPRALSLLSLPPKKRSILGLGQARPLEFLRTCYGGSFLVHESFLYKREKAVGDKVYWTCRDHALHGCRSRAITQGQRVTVMRGHCHQPDMEGLEARRQQEKAVETLQAGQDGPGSQVDTLLRGVDSLLYRRGPGPLTLTRPRPRKRAKVEDQELPTQPEAPDEHQDMDADPGGPEFLKTPLGGSFLVYESFLYRREKAAGEKVYWTCRDQARMGCRSRAITQGRRVTVMRGHCHPPDLGGLEALRQREKRPNTAQRGSPGAGLSFQWLFRILQLLGSGGPEFLKTPLGGSFLVYESFLYRREKAAGEKVYWTCRDQARMGCRSRAITQGRRVMVMRRHCHPPDLGGLEALRQREHFPNLAQWDSPDPLRPLEFLRTSLGGRFLVHESFLYRKEKAAGEKVYWMCRDQARLGCRSRAITQGHRIMVMRSHCHQPDLAGLEALRQRERLPTTAQQEDPEKIQVQLCFKTCSPESQQIYGDIKDVRLDGESQ

SEQ ID NO: 859684 - protein, 716 aa, Homo sapiens; identical to SEQ ID NO: 859675

SEQ ID NO: 859685 - protein, 84 aa, Homo sapiens
PGAVGQPRCVWRVLGWVCLVSQDLCPTRWLEAARGVLCVVHGGLTAGAINSPGAGGSICGLRAPAAGPLGSGDWLSEVETHSAL

SEQ ID NO: 859686 - protein, 68 aa, Homo sapiens
RQACEGVRWWVPGLVSSNDNPAPPRDLGAESPTRWGDPGTEKEGPDQTGEESKQMFAPLWYLIQTNQL

SEQ ID NO: 859687 - protein, 278 aa, Homo sapiens
MHKAGLLGLCARAWNSVRMASSGMTRRDPLANKVALVTASTDGIGFAIARRLAQDGAHVVVSSRKQQNVDQAVATLQGEGLSVTGTVCHVGKAEDRERLVATAVKLHGGIDILVSNAAVNPFFGSIMDVTEEVWDKTLDINVKAPALMTKAVVPEMEKRGGGSVVIVSSIAAFSPSPGFSPYNVSKTALLGLTKTLAIELAPRNIRVNCLAPGLIKTSFSRMLWMDKEKEESMKETLRIRRLGEPEDCAGIVSFLCSEDASYITGETVVVGGGTPSRL

SEQ ID NO: 859688 - protein, 155 aa, Homo sapiens
MHKAGLLGLCARAWNSVRMASSGMTRRDPLANKVALVTASTDGIGFAIARRLAQDGAHVVVSSRKQQNVDQAVATLQGEGLSVTGTVCHVGKAEDRERLVATAVKLHGGIDILVSNAAVNPFFGSIMDVTEEVWDKLWMDKEKEESMKETLRIRR

SEQ ID NO: 859689 - protein, 66 aa, Homo sapiens
LFFLVHPELVPHLLSDIHYASKETLRIKRLGEPEDCAGIVSFLCSEDASYITGETVVVGGGTPSRL

SEQ ID NO: 859690 - protein, 152 aa, Homo sapiens [sequence omitted]

SEQ ID NO: 859691 - protein, 192 aa, Homo sapiens
MHKAGLLGLCARAWNSVRMASSGMTRRDPLANKVALVTASTDGIGFAIARRLAQDGAHVVVSSRKQQNVDQAVATLQGEGLSVTGTVCHVGKAEDRERLVATAVKLHGGIDILVSNAAVNPFFGSIMDVTEEVWDKLWMDKEKEESMKETLRIRRLGEPEDCAGIVSFLCSEDASYITGETVVVGGGTPSRL

SEQ ID NO: 859692 - protein, 261 aa, Homo sapiens
MHKAGLLGLCARAWNSVRMASSGMTRRDPLANKVALVTASTDGIGFAIARRLAQDGAHVVVSSRKQQNVDQAVATLQGEGLSVTGTVCHVGKAEDRERLVATAVKLHGGIDILVSNAAVNPFFGSIMDVTEEVWDKTLDINVKAPALMTKAVVPEMEKRGGGSVVIVSSIAAFSPSPGFSPYNVSKTALLGLTKTLAIELAPRNIRVNCLAPGLIKTSFSRMLWMDKEKEESMKRSSLPCRQGGVLLGIPAVVVALGKGLP

SEQ ID NO: 859693 - protein, 248 aa, Homo sapiens
MHKAGLLGLCARAWNSVRMASSGMTRRDPLANKVALVTASTDGIGFAIARRLAQDGAHVVVSSRKQQNVDQAVATLQGEGLSVTGTVCHVGKAEDRERLVATAVKLHGGIDILVSNAAVNPFFGSIMDVTEEVWDKTLDINVKAPALMTKAVVPEMEKRGGGSVVIVSSIAAFSPSPGFSPYNVSKTALLGLTKTLAIELAPRNIRVNCLAPGLIKTSFSRMLWMDKEKEESMKETLRIRSPLSQSHR

SEQ ID NO: 859694 - protein, 144 aa, Homo sapiens
MHKAGLLGLCARAWNSVRMASSGMTRRDPLANKVALVTASTDGIGFAIARRLAQDGAHVVVSSRKQQNVDQAVATLQGEGLSVTGTVCHVGKAEDRERLVATAVKLHGGIDILVSNAAVNPFFGSIMDITGETVVVGGGTPSRL

SEQ ID NO: 859695 - protein, 142 aa, Homo sapiens
MHKAGLLGLCARAWNSVRMASSGMTRRDPLANKVALVTASTDGIGFAIARRLAQDGAHVVVSSRKQQNVDQAVATLQGEGLSVTGTVCHVGKAEDRERLVATAVKLHGGIDILVSNAAVNPFFGSIMDVTEEVWDKVIYLFL

SEQ ID NO: 859696 - protein, 105 aa, Homo sapiens
FVVIVVVVFNIKIRSRCMAQASLKLLSSSEPPTLASQSAMITGMSHSSLPRRKFLSTWVNAPPLLTAALVQNLPLSLGCEASWRYRYPSLQCCCQPFLWKHNGCH

SEQ ID NO: 859697 - protein, 192 aa, Homo sapiens; identical to SEQ ID NO: 859691

SEQ ID NO: 859698 - protein, 278 aa, Homo sapiens; identical to SEQ ID NO: 859687

SEQ ID NO: 859699 - protein, 278 aa, Homo sapiens; identical to SEQ ID NO: 859687

SEQ ID NO: 859700 - protein, 291 aa, Homo sapiens
MHKAGLLGLCARAWNSVRMASSGMTRRDPLANKVALVTASTDGIGFAIARRLAQDGAHVVVSSRKQQNVDQAVATLQGEGLSVTGTVCHVGKAEDRERLVATAVKLHGGIDILVSNAAVNPFFGSIMDVTEEVWDKTLDINVKAPALMTKAVVPEMEKRGGGSVVIVSSIAAFSPSPGFSPYNVSKTALLGLTKTLAIELAPRNIRVNCLAPGLIKTSFSRMLWMDKEKEESMKETLRIRRLGEPEDCAGIVSFLCSEDASYITGETVVVGGGTPAPALGSHWSTRDSQLR

SEQ ID NO: 859701 - protein, 158 aa, Homo sapiens
MHKAGLLGLCARAWNSVRMASSGMTRRDPLANKVALVTASTDGIGFAIARRLAQDGAHVVVSSRKQQNVDQAVATLQGEGLSVTGTVCHVGKAEDRERLVATLWMDKEKEESMKETLRIRRLGEPEDCAGIVSFLCSEDASYITGETVVVGGGTPSRL

SEQ ID NO: 859702 - protein, 127 aa, Homo sapiens [sequence omitted]

SEQ ID NO: 859703 - protein, 86 aa, Homo sapiens
MGASAVVSRIVIRLWWLRVVCSVTVSDFLFAVRLSFRCLQYKIGVELRFSTLVVLLRVLFSLFKVSPRAYAVRFCAVCLIGESRGQ

SEQ ID NO: 859704 - protein, 129 aa, Homo sapiens
MSISRAVLGEKEGGLGSVAPCQPALREDRVSHARMAGHVSVLVSHFPPSVTYLGIPQGLLECDCPLPSCLGYKSWPYVPAVRGSGNPTQPPVLGWSVSIHPLVVIEAALPVLGEDIWATRAPLAPSRRK

SEQ ID NO: 859705 - protein, 129 aa, Homo sapiens; identical to SEQ ID NO: 859704

SEQ ID NO: 859706 - protein, 371 aa, Homo sapiens
PCVQPCCRPLCYEQSERRLHKSLQMKMEEMSLSGLDNSKLEAIAQEIYADLVEDSCLGFCFEVHRAVKCGYFFLDDTDPDSMKDFEIVDQPGLDIFGQVFNQWKSKECVCPNCSRSIAASRFAPHLEKCLGMGRNSSRIANRRIANSNNMNKSESDQEDNDDINDNDWSYGSEKKAKKRKSDKNPNSPRRSKSLKHKNGELSNSDPFKYNNSTGISYETLGPEELRSLLTTQCGVISEHTKKMCTRSLRCPQHTDEQRRTVRIYFLGPSAVLPEVESSLDNDSFDMTDSQALISRLQWDGSSDLSPSDSGSSKTSENQGWGLGTNSSESRKTKKKKSHLSLVGTASGLGSNKKKKPKPPAPPTPSIYDDIN

SEQ ID NO: 859707 - protein, 371 aa, Homo sapiens; identical to SEQ ID NO: 859706

SEQ ID NO: 859708 - protein, 129 aa, Homo sapiens
MCTRSLRCPQHTDEQRRTVRIYFLGPSAVLPEVESSLDNDSFDMTDSQALISRLQWDGSSDLSPSDSGSSKTSENQGWGLGTNSSESRKTKKKKSHLSLVGTASGLGSNKKKKPKPPAPPTPSIYDDIN

SEQ ID NO: 859709 - protein, 371 aa, Homo sapiens; identical to SEQ ID NO: 859706

SEQ ID NO: 859710 - protein, 371 aa, Homo sapiens; identical to SEQ ID NO: 859706

SEQ ID NO: 859711 - protein, 345 aa, Homo sapiens
PCVQPCCRPLCYEQSERRLHKSLQMKMEEMSLSGLDNSKLEAIAQEIYADLVEDSCLGFCFEVHRAVKCGYFFLDDTDPDSMKDFEIVDQPGLDIFGQVFNQWKSKECVCPNCSRSIAASRFAPHLEKCLGMGRNSSRIANRRIANSNNMNKSESDQEDNDDINDNDWSYGSEKKAKKRKSDKNPNSPRRSKSLKHKNGELSNSDPFKYNNSTGISYETLGPEELRSLLTTQCGVISEHTKKMCTRSLRCPQHTDEQRRTVRIYFLGPSAVLPEVESSLDNDSFDMTDSQALISRLQWDGSSDLSPSDSGSSKTSENQGWGLGTNSSESRKTKKKKSKRSHPTFG

SEQ ID NO: 859712 - protein, 232 aa, Homo sapiens
TGLLLGRKSRNLRMLLCQIFFPSLGSRLPLFVTLSPKLWYLPFQNPNSPRRSKSLKHKNGELSNSDPFKYNNSTGISYETLGPEELRSLLTTQCGVISEHTKKMCTRSLRCPQHTDEQRRTVRIYFLGPSAVLPEVESSLDNDSFDMTDSQALISRLQWDGSSDLSPSDSGSSKTSENQGWGLGTNSSESRKTKKKKSHLSLVGTASGLGSNKKKKPKPPAPPTPSIYDDIN

SEQ ID NO: 859713 - protein, 396 aa, Homo sapiens
PCVQPCCRPLCYEQSERRLHKSLQMKMEEMSLSGLDNSKLEAIAQEIYADLVEDSCLGFCFEVHRAVKCGYFFLDDTDPDSMKDFEIVDQPGLDIFGQVFNQWKSKECVCPNCSRSIAASRFAPHLEKCLGMGRNSSRIANRRIANSNNMNKSESDQEDNDDINDNDWSYGSEKKAKKRKSDKNPNSPRRSKSLKHKNGFSVCTSASNTLPLLFSSSGELSNSDPFKYNNSTGISYETLGPEELRSLLTTLIFLFQQCGVISEHTKKMCTRSLRCPQHTDEQRRTVRIYFLGPSAVLPEVESSLDNDSFDMTDSQALISRLQWDGSSDLSPSDSGSSKTSENQGWGLGTNSSESRKTKKKKSHLSLVGTASGLGSNKKKKPKPPAPPTPSIYDDIN

SEQ ID NO: 859714 - protein, 371 aa, Homo sapiens; identical to SEQ ID NO: 859706

SEQ ID NO: 859715 - protein, 371 aa, Homo sapiens; identical to SEQ ID NO: 859706

SEQ ID NO: 859716 - protein, 198 aa, Homo sapiens
TSVSTNAGGSCSAGLASARSYGRKMAAAAELSLLEKSLGLSKGNKYSAQGERQIPVLQTNNGPSLTGLTTIAAHLVKQANKEYLLGSTAEEKAIVQQWLEYRVTQVDGHSSKNDIHTLLKDLNSYLEDKVYLTGYNFTLADILLYYGLHRFIVDLTVQEKEKYLNVSRWFCHIQHYPGIRQHLSSVVFIKNRLYTNSH

SEQ ID NO: 859717 - protein, 187 aa, Homo sapiens
MSGGGTETPVGCEAAPGGGSKKRDSLGTAGSAHLIIKDLGEIHSRLLDHRPVIQGETRYFVKEFEEKRGLREMRVLENLKNMIHETNEHTLPKCRDTMRDSLSQVLQRLQAANDSVCRLQQREQERKKIHSDHLVASEKQHMLQWDNFMKEQPNKRAEVDEEHRKAMERLKEQYAEMEKDLAKFSTF

SEQ ID NO: 859718 - protein, 174 aa, Homo sapiens
TSVSTNAGGSCSAGLASARSYGRKMAAAAELSLLEKSLGLSKGNKYSAQGERQIPVLQTNNGPSLTGLTTIAAHLVKQANKEYLLGSTAEEKAIVQQWLEYRVTQVDGHSSKNDIHTLLKDLNSYLEDKVYLTGYNFTLADILLYYGLHRFIVSICIVTGFFSVVLRMIFKTLS

SEQ ID NO: 859719 - protein, 198 aa, Homo sapiens; identical to SEQ ID NO: 859716

SEQ ID NO: 859720 - protein, 168 aa, Homo sapiens
  misc_feature (17)..(17): Xaa can be any naturally occurring amino acid
  misc_feature (20)..(20): Xaa can be any naturally occurring amino acid
  misc_feature (22)..(22): Xaa can be any naturally occurring amino acid
MCICHRVLFCESDGELXSHXFXPIPVLQTNNGPSLTGLTTIAAHLVKQANKEYLLGSTAEEKAIVQQWLEYRVTQVDGHSSKNDIHTLLKDLNSYLEDKVYLTGYNFTLADILLYYGLHRFIVDLTVQEKEKYLNVSRWFCHIQHYPGIRQHLSSVVFIKNRLYTNSH

SEQ ID NO: 859721 - protein, 187 aa, Homo sapiens; identical to SEQ ID NO: 859717

SEQ ID NO: 859722 - protein, 175 aa, Homo sapiens
TSVSTNAGGSCSAGLASARSYGRKMAAAAELSLLEKSLGLSKGNKYSAQGERQIPVLQTNNGPSLTGLTTIAAHLVKQANKEYLLGSTAEEKAIVQQWLEYRVTQVDGHSSKNDIHTLLKDLNSYLEDKVYLTGYNFTLADILLYYGLHRFIILEKFIQGFWITDQLFKVKLVIL

SEQ ID NO: 859723 - protein, 187 aa, Homo sapiens; identical to SEQ ID NO: 859717

SEQ ID NO: 859724 - protein, 163 aa, Homo sapiens
TSVSTNAGGSCSAGLASARSYGRKMAAAAELSLLEKSLGLSKGNKYSAQGERQIPVLQTNNGPSLTGLTTIAAHLVKQANKEYLLGSTAEEKAIVQQWLEYRVTQVDGHSSKNDIHTLLKDLNSYLEDKVYLTGYNFTLADILLYYGLHRFIIRKLRHTEVGN

SEQ ID NO: 859725 - protein, 198 aa, Homo sapiens; identical to SEQ ID NO: 859716

SEQ ID NO: 859726 - protein, 198 aa, Homo sapiens; identical to SEQ ID NO: 859716

SEQ ID NO: 859727 - protein, 198 aa, Homo sapiens; identical to SEQ ID NO: 859716

SEQ ID NO: 859728 - protein, 186 aa, Homo sapiens
MAERTPKESWPNLGDSGKAFLKPWIISLSVTTHSECGKHHKIPVLQTNNGPSLTGLTTIAAHLVKQANKEYLLGSTAEEKAIVQQWLEYRVTQVDGHSSKNDIHTLLKDLNSYLEDKVYLTGYNFTLADILLYYGLHRFIVDLTVQEKEKYLNVSRWFCHIQHYPGIRQHLSSVVFIKNRLYTNSH

SEQ ID NO: 859729 - protein, 187 aa, Homo sapiens; identical to SEQ ID NO: 859717

SEQ ID NO: 859730 - protein, 175 aa, Homo sapiens; identical to SEQ ID NO: 859722

SEQ ID NO: 859731 - protein, 161 aa, Homo sapiens
TSVSTNAGGSCSAGLASARSYGRKMAAAAELSLLEKSLGLSKGNKYSAQGERQIPVLQTNNGPSLTGLTTIAAHLVKQANKEYLLGSTAEEKAIVQQWLEYRVTQVDGHSSKNDIHTLLKVLTLSPRLECNGVILAHCNLRLLGSSDSRASASRVNGITGS

SEQ ID NO: 859732 - protein, 73 aa, Homo sapiens
NEVPCSLRHDLYAIWRRESVQENGFPDKLVCQNIPRHVLEATYGINIITPREDEDPHRPPTSEELLTAYGCKL

SEQ ID NO: 859733 - protein, 114 aa, Homo sapiens
EQEFVAEKLNIKFVPAEARTGLLSFEESQRIKKLHEENKQFLCIPRRPNWNQNTTPEELKLLTSDNLPASTSQNAGITGVSHHAWPFKFLCKLIVRHESFIAGSLRLGAVEDRA

SEQ ID NO: 859734 - protein, 214 aa, Homo sapiens
NEVPCSLRHDLYAIWRRESVQENGFPDKLVCQNIPRHVLEATYGINIITPREDEDPHRPPTSEELLTAYGYMRGFMTAHGQPDQPRSARYILKDYVSGKLLYCHPPPGRDPVTFQHQHQRLLENKMNSDEIKMQLGRNKKAKQIENIVDKTFFHQENVRALTKGVQAVMGYKPGSGVVTASTASSENGAGKPWKKHGNRNKKEKSRRLYKHLDM

SEQ ID NO: 859735 - protein, 521 aa, Homo sapiens
KLHAPSREASSSGRVAMGRRRAPAGGSLGRALMRHQTQRSRSHRHTDSWLHTSELNDGYDWGRLNLQSVTEQSSLDDFLATAELAGTEFVAEKLNIKFVPAEARTGLLSFEESQRIKKLHEENKQFLCIPRRPNWNQNTTPEELKQAEKDNFLEWRRQLVRLEEEQKLILTPFERNLDFWRQLWRVIERSDIVVQIVDARNPLLFRCEDLECYVKEMDANKENVILINKADLLTAEQRSAWAMYFEKEDVKVIFWSALAGAIPLNGDSEEEANRDDRQSNTTEFGHSSFDQAEISHSESEHLPARDSPSLSENPTTDEDDSEYEDCPEEEEDDWQTCSEEDGPKEEDCSQDWKESSTADSEARSRKTPQKRQIHNFSHLVSKQELLELFKELHTGRKVKDGQLTVGLVGYPNVGKSSTINTIMGNKKVSVSATPGHTKHFQTLYVEPGLCLCDCPGLVMPSFVSTKAEMTCSGILPIDQMRDHVPPVSLISFLLWKHSSYYVHIRASGLFWAFEGFRFDEE

SEQ ID NO: 859736 - protein, 106 aa, Homo sapiens
IPSSNLLLVFQTLYVEPGLCLCDCPGLVMPSFVSTKAEMTCSGILPIDQMRDHVPPVSLISFLLWKHSSYYVHIRASGLFWAFEGFRFDEELKILVICTSLYCEIA

SEQ ID NO: 859737 - protein, 674 aa, Homo sapiens
KLHAPSREASSSGRVAMGRRRAPAGGSLGRALMRHQTQRSRSHRHTDSWLHTSELNDGYDWGRLNLQSVTEQSSLDDFLATAELAGTEFVAEKLNIKFVPAEARTGLLSFEESQRIKKLHEENKQFLCIPRRPNWNQNTTPEELKQAEKDNFLEWRRQLVRLEEEQKLILTPFERNLDFWRQLWRVIERSDIVVQIVDARNPLLFRCEDLECYVKEMDANKENVILINKADLLTAEQRSAWAMYFEKEDVKVIFWSALAGAIPLNGDSEEEANRDDRQSNTTEFGHSSFDQAEISHSESEHLPARDSPSLSENPTTDEDDSEYEDCPEEEEDDWQTCSEEDGPKEEDCSQDWKESSTADSEARSRKTPQKRQIHNFSHLVSKQELLELFKELHTGRKVKDGQLTVGLVGYPNVGKSSTINTIMGNKKVSVSATPGHTKHFQTLYVEPGLCLCDCPGLVMPSFVSTKAEMTCSGILPIDQMRDHVPPVSLVCQNIPRHVLEATYGINIITPREDEDPHRPPTSEELLTAYGYMRGFMTAHGQPDQPRSARYILKDYVSGKLLYCHPPPGRDPVTFQHQHQRLLENKMNSDEIKMQLGRNKKAKQIENIVDKTFFHQENVRALTKGVQAVMGYKPGSGVVTASTASSENGAGKPWKKHGNRNKKEKSRRLYKHLDM

SEQ ID NO: 859738 - protein, 674 aa, Homo sapiens; identical to SEQ ID NO: 859737

SEQ ID NO: 859739 - protein, 533 aa, Homo sapiens
KLHAPSREASSSGRVAMGRRRAPAGGSLGRALMRHQTQRSRSHRHTDSWLHTSELNDGYDWGRLNLQSVTEQSSLDDFLATAELAGTEFVAEKLNIKFVPAEARTGLLSFEESQRIKKLHEENKQFLCIPRRPNWNQNTTPEELKQAEKDNFLEWRRQLVRLEEEQKLILTPFERNLDFWRQLWRVIERSDIVVQIVDARNPLLFRCEDLECYVKEMDANKENVILINKADLLTAEQRSAWAMYFEKEDVKVIFWSALAGAIPLNGDSEEEANRDDRQSNTTEFGHSSFDQAEISHSESEHLPARDSPSLSENPTTDEDDSEYEDCPEEEEDDWQTCSEEDGPKEEDCSQDWKESSTADSEARSRKTPQKRQIHNFSHLVSKQELLELFKELHTGRKVKDGQLTVGLVGYPNVGKSSTINTIMGNKKVSVSATPGHTKHFQTLYVEPGLCLCDCPGLVMPSFVSTKAEMTCSGILPIDQMRDHVPPVSLVCQNIPRHVLEATYGINIITPREDEDPHRPPTSEELLTAYGCKL

SEQ ID NO: 859740 - protein, 176 aa, Homo sapiens
PAHHRSFNCAGAPEAPRERRVRSGSRSGDPGVAREPQAELVGAMLSPEAERVLRYLVEVEELAEEVLADKRQIVDLDTKRNQNREGLRALQKDLSLSEDVMVCFGNMFIKMPHPETKEMIEKDQDHLDKEIEKLRKQLKVKVNRLFEAQGKPELKGFNLNPLNQDELKALKVILKG

SEQ ID NO: 859741 - protein, 176 aa, Homo sapiens; identical to SEQ ID NO: 859740

SEQ ID NO: 859742 - protein, 163 aa, Homo sapiens
PAHHRSFNCAGAPEAPRERRVRSGSRSGDPGVAREPQAELVGAMLSPEAERVLRYLVEVEELAEEVLADKRQIVDLDTKRNQNREGLRALQKDLSLSEDVMVCFGNMFIKMPHPETKEMIEKGRREGGAEWSVIPAFLSEGREVFRLVPCDWNKAGGSWVVAE

SEQ ID NO: 859743 - protein, 84 aa, Homo sapiens
SRQLQFCTFSLLDSKSRCCLAALRGHSLLRRALQSPAPGLGEWMRLLPYDTCQDALPPPLKVGPGQHCSLLSAFSGLRSQYELP

SEQ ID NO: 859744 - protein, 176 aa, Homo sapiens; identical to SEQ ID NO: 859740

SEQ ID NO: 859745 - protein, 176 aa, Homo sapiens; identical to SEQ ID NO: 859740

SEQ ID NO: 859746 - protein, 85 aa, Homo sapiens
GDTGAVVMPHLVHCRIGGPSLPDLQAEFGSISAASPLSWAWLQSQQEARRADGSSSLLGKPELKGFNLNPLNQDELKALKVILKG

SEQ ID NO: 859747 - protein, 120 aa, Homo sapiens
MDSLFRVCIYPADTPIPPSLPPRASDFLFHPAAYYWQGMAGVNLGSVYHQGKLPSLLQSLWKGTFFRVQHVPMHSQVPKVTYTYIVNIVPTALQTFIWPLAVHTSQPIHVFMMMFILLFS

SEQ ID NO: 859748 - protein, 67 aa, Homo sapiens
LGTRDTPHYSSLRGLQQIERECEMAEEEHRIKMEVLNKKKMYWERKLQTFTKEWPVSSFNRPFPNSP

SEQ ID NO: 859749 - protein, 150 aa, Homo sapiens
MQNNEIIKPAKYFSELEKSILLALVEKYKYVLECKKSDARTIALKQRTWQALAHEYNSQPSVSLRDFKQLKKCWENIKARTKKIMAHERREKVKRSVSPLLSTHVLGKEKIASMLPEQLYFLQSPPEEEPEYQNTRNASAKAERNSWEKQ

SEQ ID NO: 859750 - protein, 275 aa, Homo sapiens
MQNNEIIKPAKYFSELEKSILLALVEKYKYVLECKKSDARTIALKQRTWQALAHEYNSQPSVSLRDFKQLKKCWENIKARTKKIMAHERREKVKRSVSPLLSTHVLGKEKIASMLPEQLYFLQSPPEEEPEYHPDASAQESFAVSNRELCDDEKEFIHFPVCEGTSQPEPSCSAVRITANKNYRSKTSQEGALKKMHEEEHHQQMSILQLQLIQMNEVHVAKIQQIERECEMAEEEHRIKMEVLNKKKMYWERKLQTFTKEWPVSSFNRPFPNSP

SEQ ID NO: 859751 - protein, 275 aa, Homo sapiens; identical to SEQ ID NO: 859750

SEQ ID NO: 859752 - protein, 257 aa, Homo sapiens
MQNNEIIKPAKYFSELEKSILLALVEKYKYVLECKKSDARTIALKQRTWQALAHEYNSQPSVSLRDFKQLKKCWENIKARTKLSTHVLGKEKIASMLPEQLYFLQSPPEEEPEYHPDASAQESFAVSNRELCDDEKEFIHFPVCEGTSQPEPSCSAVRITANKNYRSKTSQEGALKKMHEEEHHQQMSILQLQLIQMNEVHVAKIQQIERECEMAEEEHRIKMEVLNKKKMYWERKLQTFTKEWPVSSFNRPFPNSP

SEQ ID NO: 859753 - protein, 275 aa, Homo sapiens; identical to SEQ ID NO: 859750

SEQ ID NO: 859754 - protein, 167 aa, Homo sapiens
GRGWGARAGRRGGRGPAWRVFGPSRCDPGLAGWAPGGRLCAPRWDSVSRAGLLPTKPRGAGLWGTQWRAHGWERGGLWTPGLGELLGGNPGDLQYRGLPIPASPLCADHCARRFSILVSFKTSSAPPVQSVTGGIPHLQDEGRASHPCLTDLGKAPLLRAGATVSVN

SEQ ID NO: 859755 - protein, 275 aa, Homo sapiens; identical to SEQ ID NO: 859750

SEQ ID NO: 859756 - protein, 159 aa, Homo sapiens
MQNNEIIKPAKYFSELEKSILLALVEKYKYVLECKKSDARTIALKQRTWQALAHEYNSQPSVSLRDFKQLKKCWENIKARTKKIMAHERREKVKRSVSPLLSTHVLGKEKIASMLPEQLYFLQSPPEEEPEYHPDASAQVFFQERKRSLELSIILSGTW

SEQ ID NO: 859757 - protein, 150 aa, Homo sapiens
SLGRRLPTKSLRSPSPRGGHEGLLLLFLLPSLPLGLRLLLLLLLHCPDLPPQVPRALMPAPLTQRSPGPDVHNPRGMGRPLLPGHSSSQTGQCQSASSGRSGVAPEIHVSHLSQQVMMKLLLWSGLPVNSAQRAGPPTSLLSLNIPPTPP

SEQ ID NO: 859758 - protein, 86 aa, Homo sapiens
SLGRRLPTKSLRSPSPRGGHEGLLLLFLLPSLPLGLRLLLLLLLHCPDLPPQVPRALMPAPLTQRSPGPDVHNPRGYGEASAPWTQ

SEQ ID NO: 859759 - protein, 173 aa, Homo sapiens
MQWRALVLGLVLLRLGLHGVLWLVFGLGPSMGFYQRFPLSFGFQRLRSPDGPASPTSGPVGRPGGVSGPSWLQPPGTGAAQSPRKAPRRPGPGMCGPANWGYVLGGRGRGPDEYEKRYSGAFPPQLRAQMRDLARGMFVFGYDNYMAHAFPQDELNPIHCRGRGPDRGDPLRA

SEQ ID NO: 859760 - protein, 657 aa, Homo sapiens
MQWRALVLGLVLLRLGLHGVLWLVFGLGPSMGFYQRFPLSFGFQRLRSPDGPASPTSGPVGRPGGVSGPSWLQPPGTGAAQSPRKAPRRPGPGMCGPANWGYVLGGRGRGPDEYEKRYSGAFPPQLRAQMRDLARGMFVFGYDNYMAHAFPQDELNPIHCRGRGPDRGDPSNLNINDVLGNYSLTLVDALDTLAIMGNSSEFQKAVKLVINTVSFDKDSTVQVFEATIRVLGSLLSAHRIITDSKQPFGDMTIKDYDNELLYMAHDLAVRLLPAFENTKTGIPYPRVNLKTGVPPDTNNETCTAGAGSLLVEFGILSRLLGDSTFEWVARRAVKALWNLRSNDTGLLGNVVNIQTGHWVGKQSGLGAGLDSFYEYLLKSYILFGEKEDLEMFNAAYQSIQNYLRRGREACNEGEGDPPLYVNVNMFSGQLMNTWIDSLQAFFPGLQVLIGDVEDAICLHAFYYAIWKRYGALPERYNWQLQAPDVLFYPLRPELVESTYLLYQATKNPFYLHVGMDILQSLEKYTKVKCGYATLHHVIDKSTEDRMESFFLSETCKYLYLLFDEDNPVHKSGTRYMFTTEGHIVSVDEHLRELPWKEFFSEEGGQDQGGKSVHRPKPHELKVINSSSNCNRVPDERRYSLPLKSIYMRQIDQMVGLI

SEQ ID NO: 859761 - protein, 657 aa, Homo sapiens; identical to SEQ ID NO: 859760

SEQ ID NO: 859762 - protein, 224 aa, Homo sapiens
  misc_feature (103)..(103): Xaa can be any naturally occurring amino acid
  misc_feature (122)..(122): Xaa can be any naturally occurring amino acid
  misc_feature (132)..(132): Xaa can be any naturally occurring amino acid
  misc_feature (134)..(134): Xaa can be any naturally occurring amino acid
  misc_feature (140)..(140): Xaa can be any naturally occurring amino acid
  misc_feature (170)..(171): Xaa can be any naturally occurring amino acid
  misc_feature (178)..(179): Xaa can be any naturally occurring amino acid
  misc_feature (181)..(181): Xaa can be any naturally occurring amino acid
  misc_feature (186)..(186): Xaa can be any naturally occurring amino acid
  misc_feature (192)..(192): Xaa can be any naturally occurring amino acid
  misc_feature (196)..(196): Xaa can be any naturally occurring amino acid
  misc_feature (217)..(217): Xaa can be any naturally occurring amino acid
MQWRALVLGLVLLRLGLHGVLWLVFGLGPSMGFYQRFPLSFGFQRLRSPDGPASPTSGPVGRPGGVSGPSWLQPPGTGAAQSPRKAPRRPGPGMCGARARTFXTFRFRSRFRSFARLRIYVXNRRTIVRRVXVXRSFVSXIIRRTVFDVFRFFVRFFVRTNVRFRRRRVXXDLRIVEXXIXRSVVXVFSRYXRFYXFENRLTIEFILRILTYVDFTXFFYSIFY

SEQ ID NO: 859763 - protein, 462 aa, Homo sapiens
MGNSSEFQKAVKLVINTVSFDKDSTVQVFEATIRVLGSLLSAHRIITDSKQPFGDMTIKDYDNELLYMAHDLAVRLLPAFENTKTGIPYPRVNLKTGVPPDTNNETCTAGAGSLLVEFGILSRLLGDSTFEWVARRAVKALWNLRSNDTGLLGNVVNIQTGHWVGKQSGLGAGLDSFYEYLLKSYILFGEKEDLEMFNAAYQSIQNYLRRGREACNEGEGDPPLYVNVNMFSGQLMNTWIDSLQAFFPGLQVLIGDVEDAICLHAFYYAIWKRYGALPERYNWQLQAPDVLFYPLRPELVESTYLLYQATKNPFYLHVGMDILQSLEKYTKVKCGYATLHHVIDKSTEDRMESFFLSETCKYLYLLFDEDNPVHKSGTRYMFTTEGHIVSVDEHLRELPWKEFFSEEGGQDQGGKSVHRPKPHELKVINSSSNCNRVPDERRYSLPLKSIYMRQIDQMVGLI

SEQ ID NO: 859764 - protein, 571 aa, Homo sapiens [sequence omitted]

SEQ ID NO: 859765 - protein, 211 aa, Homo sapiens
MTPWLGLIVLLGSWSLGDWGAEACTCSPSHPQDAFCNSDIVIRAKVVGKKLVKEGPFGTLVYTIKQMKMYRGFTKMPHVQYIHTEASESLCGLKLEVNKYQYLLTGRVYDGKMYTGLCNFVERWDQLTLSQRKGLNYRYHLGCNCKIKSCYYLPCFVTSKNECLWTDMLSNFGYPGYQSKHYACIRQKGGYCSWYRGWAPPDKSIINATDP

SEQ ID NO: 859766 - protein, 211 aa, Homo sapiens; identical to SEQ ID NO: 859765

SEQ ID NO: 859767 - protein, 259 aa, Homo sapiens
MKDLQTSGSTMRALSPSVPLENTSNSFASVVPWGIYLDGQVGACFCWVWWQIGTPLPLPEPPTEEPPPPPPEEPPPQTEPPPLMMQPLPIPEEPPPQPELPPPPPLEKQPLPPLPPPPDDPPPVTRLGRARGLSDLLRGDVAGAAAARGASAAARAAARAAARVAADRAAAPAAGEAAGAAPGGAAARDASVALALDRLAREAAAAGGGNPESGQTVAPRRHYPSMPQTSVLHVTIDNLDYPKMAPKCLASGYLRLTCH

SEQ ID NO: 859768 - protein, 232 aa, Homo sapiens
MTPWLGLIVLLGSWSLGDWGAEACTCSPSHPQDAFCNSDIVIRAKVVGKKLVKEGPFGTLVYTIKQMKMYRGFTKMPHVQYIHTEASESLCGLKLEVNKYQYLLTGRVYDGKMYTGLCNFVERWDQLTLSQRKGLNYRYHLGCNCKIKSCYYLPCFVTSKNECLWTDMSSIRYLVQSKHKLIRRRGSRYEKGPGKLGRTEGKRTSPPGRETREKRCHAERGGGPPPRSGGGI

SEQ ID NO: 859769 - protein, 143 aa, Homo sapiens
SRYLANVLSHVQYIHTEASESLCGLKLEVNKYQYLLTGRVYDGKMYTGLCNFVERWDQLTLSQRKGLNYRYHLGCNCKIKSCYYLPCFVTSKNECLWTDMLSNFGYPGYQSKHYACIRQKGGYCSWYRGWAPPDNTFARTDSM

SEQ ID NO: 859770 - protein, 155 aa, Homo sapiens
MTPWLGLIVLLGSWSLGDWGAAGGRCTIASAQGNPPVDALLCKLPEHSVIPGAQGCVGADKKTRFNKAHGALFRDNGWVLTTHSKPGVNRICTREGFHPKIAPQWFAGTFQLREGFPEEVLVVGLLSVGCQPKYQVPCWTGSGSMMGKIAPGVGA

SEQ ID NO: 859771 - protein, 211 aa, Homo sapiens; identical to SEQ ID NO: 859765

SEQ ID NO: 859772 - protein, 211 aa, Homo sapiens; identical to SEQ ID NO: 859765

SEQ ID NO: 859773 - protein, 211 aa, Homo sapiens; identical to SEQ ID NO: 859765

SEQ ID NO: 859774 - protein, 211 aa, Homo sapiens; identical to SEQ ID NO: 859765

SEQ ID NO: 859775 - protein, 211 aa, Homo sapiens; identical to SEQ ID NO: 859765

SEQ ID NO: 859776 - protein, 211 aa, Homo sapiens; identical to SEQ ID NO: 859765

SEQ ID NO: 859777 - protein, 211 aa, Homo sapiens; identical to SEQ ID NO: 859765

SEQ ID NO: 859778 - protein, 211 aa, Homo sapiens; identical to SEQ ID NO: 859765

SEQ ID NO: 859779 - protein, 125 aa, Homo sapiens
RPTTTTARIQASNDVRGHDCSLSLFSAYGYLSSISICIFSSFHFRKQSCQLKQKKKKKKSSRQHTVESCTHTSAQARCLAEPQSGKRVPASGFLGINFITVYLSHCGHAIWQGENGRLGLLCEAV

SEQ ID NO: 859780 - protein, 211 aa, Homo sapiens; identical to SEQ ID NO: 859765

SEQ ID NO: 859781 - protein, 211 aa, Homo sapiens; identical to SEQ ID NO: 859765

SEQ ID NO: 859782 - protein, 211 aa, Homo sapiens; identical to SEQ ID NO: 859765

SEQ ID NO: 859783 - protein, 211 aa, Homo sapiens; identical to SEQ ID NO: 859765

SEQ ID NO: 859784 - protein, 211 aa, Homo sapiens; identical to SEQ ID NO: 859765

SEQ ID NO: 859785 - protein, 221 aa, Homo sapiens
MTPWLGLIVLLGSWSLGDWGAEACTCSPSHPQDAFCNSDIVIRAKVVGKKLVKEGPFGTLVYTIKQMKMYRGFTKMPHVQYIHTEASESLCGLKLEVNKYQYLLTGRVYDGKMYTGLCNFVERWDQLTLSQRKGLNYRYHLGCNCKIKSCYYLPCFVTSKNECLWTDMLSNFGYPGYQSKHYACIRQKGGYCSWYRGWAPPDKSIINATDPFSRAGGYSGI

SEQ ID NO: 859786 - protein, 219 aa, Homo sapiens
MTPWLGLIVLLGSWSLGDWGAEACTCSPSHPQDAFCNSDIVIRAKVVGKKLVKEGPFGTLVYTIKQMKMYRGFTKMPHVQYIHTEASESLCGLKLEVNKYQYLLTGRVYDGKMYTGLCNFVERWDQLTLSQRKGLNYRYHLGCNCKIKSCYYLPCFVTSKNECLWTDMLSNFGYPGYQSKHYACIRQKGGYCSWYRGWAPPDKSIINATDPFSRALRIL

SEQ ID NO: 859787 - protein, 94 aa, Homo sapiens
PGSESRLGSLRPGHTMAESINCCLLSNVQIKSCYYLPCFVTSKNECLWTDMLSNFGYPGYQSKHYACIRQKGGYCSWYRGWAPPDKSIINATDP

SEQ ID NO: 859788 - protein, 211 aa, Homo sapiens; identical to SEQ ID NO: 859765

SEQ ID NO: 859789 - protein, 211 aa, Homo sapiens; identical to SEQ ID NO: 859765

SEQ ID NO: 859790 - protein, 211 aa, Homo sapiens; identical to SEQ ID NO: 859765

SEQ ID NO: 859791 - protein, 237 aa, Homo sapiens
MHSAAQAAAQSGQQAGGGRSDGFSSSSCSSSSCSFAGRPPAESCASAEACTCSPSHPQDAFCNSDIVIRAKVVGKKLVKEGPFGTLVYTIKQMKMYRGFTKMPHVQYIHTEASESLCGLKLEVNKYQYLLTGRVYDGKMYTGLCNFVERWDQLTLSQRKGLNYRYHLGCNCKIKSCYYLPCFVTSKNECLWTDMLSNFGYPGYQSKHYACIRQKGGYCSWYRGWAPPDKSIINATDP

SEQ ID NO: 859792 - protein, 211 aa, Homo sapiens; identical to SEQ ID NO: 859765

SEQ ID NO: 859793 - protein, 211 aa, Homo sapiens; identical to SEQ ID NO: 859765

SEQ ID NO: 859794 - protein, 211 aa, Homo sapiens; identical to SEQ ID NO: 859765

SEQ ID NO: 859795 - protein, 211 aa, Homo sapiens; identical to SEQ ID NO: 859765

SEQ ID NO: 859796 - protein, 211 aa, Homo sapiens; identical to SEQ ID NO: 859765

SEQ ID NO: 859797 - protein, 211 aa, Homo sapiens; identical to SEQ ID NO: 859765

SEQ ID NO: 859798 - protein, 211 aa, Homo sapiens; identical to SEQ ID NO: 859765

SEQ ID NO: 859799 - protein, 637 aa, Homo sapiens
MGLLSQGSPLSWEETKRHADHVRRHGILQFLHIYHAVKDRHKDVLKWGDEVEYMLVSFDHENKKVRLVLSGEKVLETLQEKGERTNPNHPTLWRPEYGSYMIEGTPGQPYGGTMSEFNTVEANMRKRRKEATSILEENQALCTITSFPRLGCPGFTLPEVKPNPVEGGASKSLFFPDEAINKHPRFSTLTRNIRHRRGEKVVINVPIFKDKNTPSPFIETFTEDDEASRASKPDHIYMDAMGFGMGNCCLQVTFQACSISEARYLYDQLATICPIVMALSAASPFYRGYVSDIDCRWGVISASVDDRTREERGLEPLKNNNYRISKSRYDSIDSYLSKCGEKYNDIDLTIDKEIYEQLLQEGIDHLLAQHVAHLFIRDPLTLFEEKIHLDDANESDHFENIQSTNWQTMRFKPPPPNSDIGWRVEFRPMEVQLTDFENSAYVVFVVLLTRVILSYKLDFLIPLSKVDENMKVAQKRDAVLQGMFYFRKDICKGGNAVVDGCGKAQNSTELAAEEYTLMSIDTIINGKEGVFPGLIPILNSYLENMEVDVDTRCSILNYLKLIKKRASGELMTVARWMREFIANHPDYKQDSVITDEMNYSLILKCNQIANELCECPELLGSAFRKVKYSGSKTDSSN

SEQ ID NO: 859800 - protein, 452 aa, Homo sapiens
MGLLSQGSPLSWEETKRHADHVRRHGILQFLHIYHAVKDRHKDVLKWGDEVEYMLVSFDHENKKVRLVLSGEKVLETLQEKGERTNPNHPTLWRPEYGSYMIEGTPGQPYGGTMSEFNTVEANMRKRRKEATSILEENQALCTITSFPRLGCPGFTLPEVKPNPVEGGASKSLFFPDEAINKHPRFSTLTRNIRHRRGEKVVINVPIFKDKNTPSPFIETFTEDDEASRASKPDHIYMDAMGFGMGNCCLQVTFQACSISEARYLYDQLATICPIVMALSAASPFYRGYVSDIDCRWGVISASVDDRTREERGLEPLKNNNYRISKSRYDSIDSYLSKCGEKYNDIDLTIDKEIYEQLLQEGIDHLLAQHVAHLFIRDPLTLFEEKIHLDDANESDHFENIQSTNWQTMRFKPPPPNSDIGWRVEFRPMEVRHMHQQELTQKYSFASCSSPF

SEQ ID NO: 859801 - protein, 619 aa, Homo sapiens
MGLLSQGSPLSWEETKRHADHVRRHGILQFLHIYHAVKDRHKDVLKWGDEVEYMLVSFDHENKKVRLVLSGEKVLETLQEKGERTNPNHPTLWRPEYGSYMIEGTPGQPYGGTMSEFNTVEANMRKRRKEATSILEENQALCTITSFPRLGCPGFTLPEVKPNPVEGGASKSLFFPDEAINKHPRFSTLTRNIRHRRGVIETFTEDDEASRASKPDHIYMDAMGFGMGNCCLQVTFQACSISEARYLYDQLATICPIVMALSAASPFYRGYVSDIDCRWGVISASVDDRTREERGLEPLKNNNYRISKSRYDSIDSYLSKCGEKYNDIDLTIDKEIYEQLLQEGIDHLLAQHVAHLFIRDPLTLFEEKIHLDDANESDHFENIQSTNWQTMRFKPPPPNSDIGWRVEFRPMEVQLTDFENSAYVVFVVLLTRVILSYKLDFLIPLSKVDENMKVAQKRDAVLQGMFYFRKDICKGGNAVVDGCGKAQNSTELAAEEYTLMSIDTIINGKEGVFPGLIPILNSYLENMEVDVDTRCSILNYLKLIKKRASGELMTVARWMREFIANHPDYKQDSVITDEMNYSLILKCNQIANELCECPELLGSAFRKVKYSGSKTDSSN

SEQ ID NO: 859802 - protein, 512 aa, Homo sapiens
MGLLSQGSPLSWEETKRHADHVRRHGILQFLHIYHAVKDRHKDVLKWGDEVTNLLRLVVCFSTLTRNIRHRRGEKVVINVPIFKDKNTPSPFIETFTEDDEASRASKPDHIYMDAMGFGMGNCCLQVTFQACSISEARYLYDQLATICPIVMALSAASPFYRGYVSDIDCRWGVISASVDDRTREERGLEPLKNNNYRISKSRYDSIDSYLSKCGEKYNDIDLTIDKEIYEQLLQEGIDHLLAQHVAHLFIRDPLTLFEEKIHLDDANESDHFENIQSTNWQTMRFKPPPPNSDIGWRVEFRPMEVQLTDFENSAYVVFVVLLTRVILSYKLDFLIPLSKVDENMKVAQKRDAVLQGMFYFRKDICKGGNAVVDGCGKAQNSTELAAEEYTLMSIDTIINGKEGVFPGLIPILNSYLENMEVDVDTRCSILNYLKLIKKRASGELMTVARWMREFIANHPDYKQDSVITDEMNYSLILKCNQIANELCECPELLGSAFRKVKYSGSKTDSSN

SEQ ID NO: 859803 - protein, 361 aa, Homo sapiens
MALSAASPFYRGYVSDIDCRWGVISASVDDRTREERGLEPLKNNNYRISKSRYDSIDSYLSKCGEKYNDIDLTIDKEIYEQLLQEGIDHLLAQHVAHLFIRDPLTLFEEKIHLDDANESDHFENIQSTNWQTMRFKPPPPNSDIGWRVEFRPMEVQLTDFENSAYVVFVVLLTRVILSYKLDFLIPLSKVDENMKVAQKRDAVLQGMFYFRKDICKGGNAVVDGCGKAQNSTELAAEEYTLMSIDTIINGKEGVFPGLIPILNSYLENMEVDVDTRCSILNYLKLIKKRASGELMTVARWMREFIANHPDYKQDSVITDEMNYSLILKCNQIANELCECPELLGSAFRKVKYSGSKTDSSN

SEQ ID NO: 859804 - protein, 637 aa, Homo sapiens; identical to SEQ ID NO: 859799

SEQ ID NO: 859805 - protein, 637 aa, Homo sapiens; identical to SEQ ID NO: 859799

SEQ ID NO: 859806 - protein, 637 aa, Homo sapiens; identical to SEQ ID NO: 859799

SEQ ID NO: 859807 - protein, 604 aa, Homo sapiens
MGLLSQGSPLSWEETKRHADHVRRHGILQFLHIYHAVKDRHKDVLKWGDEVEYMLVSFDHENKKVRLVLSGEKVLETLQEKGERTNPNHPTLWRPEYGSYMIEGTPGQPYGGTMSEFNTVEANMRKRRKEATSILEENQALCTITSFPRLGCPGFTLPEVKPNPVEGGASKSLFFPDEAINKHPRFSTLTRNIRHRRGEKVVINVPIFKDKNTPSPFIETFTEDDEASRASKPDHIYMDAMGFGMGNCCLQVTFQACSISEARYLYDQLATICPIVMALSAASPFYRGYVSDIDCRWGVISASVDDRTREERGLEPLKNNNYRISKSRYDSIDSYLSKCGEKYNDIDLTIDKEIYEQLLQEGIDHLLAQHVAHLFIRDPLTLFEEKIHLDDANESDHFENIQSTNWQTMRFKPPPPNSDIGWRVEFRPMEVQLTDFENSAYVVFVVLLTRVILSYKLDFLIPLSKVDENMKVAQKRDAVLQGMFYFRKDICKGGNAVVDGCGKAQNSTELAAEEYTLMSIDTIINGKEGVFPGLIPILNSYLENMEVDVDTRCSILNYLKLIKKRASGELMTVARWMREFIANHPDYKQDSVITDLIRSGAPLL

SEQ ID NO: 859808 - protein, 549 aa, Homo sapiens
MGLLSQGSPLSWEETKRHADHVRRHGILQFLHIYHAVKDRHKDVLKWGDEVEYMLVSFDHENKKVRLVLSGEKVLETLQEKGERTNPNHPTLWRPEYGSYMIEGTPGQPYGGTMSEFNTVEANMRKRRKEATSILEENQALCTITSFPRLGCPGFTLPEVKPNPVEGGASKSLFFPDEAINKHPRFSTLTRNIRHRRGEKVVINVPIFKDKNTPSPFIETFTEDDEASRASKPDHIYMDAMGFGMGNCCLQVTFQACSISEARYLYDQLATICPIVMALSAASPFYRGYVSDIDCRWGVISASVDDRTREERGLEPLKNNNYRISKSRYDSIDSYLSKCGEKYNDIDLTIDKEIYEQLLQEGIDHLLAQHVAHLFIRDPLTLFEEKIHLDDANESDHFENIQSTNWQTMRFKPPPPNSDIGWRVEFRPMEVQLTDFENSAYVVFVVLLTRVILSYKLDFLIPLSKVDENMKVAQKRDAVLQGMFYFRKDICKGGNAVVDGCGKAQNSTELAAEEYTLMSIDTIINGKEGVFPGMIPILNSNPVQDPSRV

SEQ ID NO: 859809 - protein, 452 aa, Homo sapiens; identical to SEQ ID NO: 859800

SEQ ID NO: 859810 - protein, 137 aa, Homo sapiens
MGLLSQGSPLSWEETKRHADHVRRHGILQFLHIYHAVKDRHKDVLKWGDEVEYMLVSFDHENKKVRLVLSGEKVLETLQEKGERTNPNHPTLWRPEYGSYMIEGTPGQPYGGTMSEFNTVEANMRKRRKEATSILED

SEQ ID NO: 859811 - protein, 113 aa, Homo sapiens [sequence omitted]

SEQ ID NO: 859812 - protein, 637 aa, Homo sapiens; identical to SEQ ID NO: 859799

SEQ ID NO: 859813 - protein, 596 aa, Homo sapiens
PEYHSLVQMKETKRHADHVRRHGILQFLHIYHAVKDRHKDVLKWGDEVEYMLVSFDHENKKVRLVLSGEKVLETLQEKGERTNPNHPTLWRPEYGSYMIEGTPGQPYGGTMSEFNTVEANMRKRRKEATSILEENQALCTITSFPSTLTRNIRHRRGEKVVINVPIFKDKNTPSPFIETFTEDDEASRASKPDHIYMDAMGFGMGNCCLQVTFQACSISEARYLYDQLATICPIVMALSAASPFYRGYVSDIDCRWGVISASVDDRTREERGLEPLKNNNYRISKSRYDSIDSYLSKCGEKYNDIDLTIDKEIYEQLLQEGIDHLLAQHVAHLFIRDPLTLFEEKIHLDDANESDHFENIQSTNWQTMRFKPPPPNSDIGWRVEFRPMEVQLTDFENSAYVVFVVLLTRVILSYKLDFLIPLSKVDENMKVAQKRDAVLQGMFYFRKDICKGGNAVVDGCGKAQNSTELAAEEYTLMSIDTIINGKEGVFPGLIPILNSYLENMEVDVDTRCSILNYLKLIKKRASGELMTVARWMREFIANHPDYKQDSVITDEMNYSLILKCNQIANELCECPELLGSAFRKVKYSGSKTDSSN

SEQ ID NO: 859814 - protein, 550 aa, Homo sapiens
MGLLSQGSPLSWEETKRHADHVRRHGILQFLHIYHAVKDRHKDVLKWGDEVEYMLVSFDHENKKVRLVLSGEKVLETLQEKGERTNPNHPTLWRPEYGSYMIEGTPGQPYGGTMSEFNTVEANMRKRRKEATSILEENQALCTITSFPRLGCPGFTLPEVKPNPVEGGASKSLFFPDEAINKHPRFSTLTRNIRHRRGEKVVINVPIFKDKNTPSPFIETFTEDDEASRASKPDHIYMDAMGFGMGNCCLQVTFQACSISEARYLYDQLATICPIVMALSAASPFYRGYVSDIDCRWGVISASVDDRTREERGLEPLKNNNYRISKSRYDSIDSYLSKCGEKYNDIDLTIDKEIYEQLLQEGIDHLLAQHVAHLFIRDPLTLFEEKIHLDDANESDHFENIQSTNWQTMRFKPPPPNSDIGWRVEFRPMEVQLTDFENSAYVVFVVLLTRVILSYKLDFLIPLSKVDENMKVAQKRDAVLQGMFYFRKDICKGGNAVVDGCGKAQNSTELAAEEYTLMSIDTIINGKEGVFPGLIPILNSYLENMEVDEN

SEQ ID NO: 859815 - protein, 637 aa, Homo sapiens; identical to SEQ ID NO: 859799

SEQ ID NO: 859816 - protein, 492 aa, Homo sapiens
MGLLSQGSPLSWEETKRHADHVRRHGILQFLHIYHAVKDRHKDVLKWGDEVEYMLVSFDHENKKVRLVLSGEKVLETLQEKGERTNPNHPTLWRPEYGSYMIEGTPGQPYGGTMSEFNTVEANMRKRRKEATSILEENQALCTITSFPRLGCPGFTLPEVKPNPVEGGASKSLFFPDEAINKHPRFSTLTRNIRHRRGEKVVINVPIFKDKNTPSPFIETFTEDDEASRASKPDHIYMDAMGFGMGNCCLQVTFQACSISEARYLYDQLATICPIVMALSAASPFYRGYVSDIDCRWGVISASVDDRTREERGLEPLKNNNYRISKSRYDSIDSYLSKCGEKYNDIDLTIDKEIYEQLLQEGIDHLLAQHVAHLFIRDPLTLFEEKIHLDDANESDHFENIQSTNWQTMRFKPPPPNSDIGWRVEFRPMEVQLTDFENSAYVVFVVLLTRVILSYKLDFLIPLSKVRICFFMVMGIDLSVDIFIYICYLFPT

SEQ ID NO: 859817 - protein, 36 aa, Homo sapiens
CGKAQNSTELAAEEYTLMSIDTIINGKVGGWPCTVP

SEQ ID NO: 859818 - protein, 297 aa, Homo sapiens
MDPGKDKEGVPQPSGPPARKKFVIPLDEDEVPPGVAKPLFRSTQSLPTVDTSAQAAPQTYAEYAISQPLEGAGATCPTGSEPLAGETPNQALKPGAKSNSIIVSPRQRGNPVLKFVRNVPWEFGDVIPDYVLGQSTCALFLSLRYHNLHPDYIHGRLQSLGKNFALRVLLVQVDVKDPQQALKELAKMCILADCTLILAWSPEEAGRYLETYKAYEQKPADLLMEKLEQDFVSRVTECLTTVKSVNKTDSQTLLTTFGSLEQLIAASREDLALCPGLGPQKARRLFDVLHEPFLKVP

SEQ ID NO: 859819 - protein, 259 aa, Homo sapiens [sequence omitted]

SEQ ID NO: 859820 - protein, 280 aa, Homo sapiens
MSSAHPNQSPANSLSPQQAKPLFRSTQSLPTVDTSAQAAPQTYAEYAISQPLEGAGATCPTGSEPLAGETPNQALKPGAKSNSIIVSPRQRGNPVLKFVRNVPWEFGDVIPDYVLGQSTCALFLSLRYHNLHPDYIHGRLQSLGKNFALRVLLVQVDVKDPQQALKELAKMCILADCTLILAWSPEEAGRYLETYKAYEQKPADLLMEKLEQDFVSRVTECLTTVKSVNKTDSQTLLTTFGSLEQLIAASREDLALCPGLGPQKARRLFDVLHEPFLKVP

SEQ ID NO: 859821 - protein, 225 aa, Homo sapiens
MDPGKDKEGVPQPSGPPARKKFVIPLDEDEVPPGVRGNPVLKFVRNVPWEFGDVIPDYVLGQSTCALFLSLRYHNLHPDYIHGRLQSLGKNFALRVLLVQVDVKDPQQALKELAKMCILADCTLILAWSPEEAGRYLETYKAYEQKPADLLMEKLEQDFVSRVTECLTTVKSVNKTDSQTLLTTFGSLEQLIAASREDLALCPGLGPQKARRLFDVLHEPFLKVP

SEQ ID NO: 859822 - protein, 323 aa, Homo sapiens
MDPGKDKEGVPQPSGPPARKKFVIPLDEDEVPPGVAKPLFRSTQSLPTVDTSAQAAPQTYAEYAISQPLEGAGATCPTGSEPLAGETPNQALKPGAKSNSIIVSPRQRGNPVLKFVRNVPWEFGDVIPDYVLGQSTCALFLSLRYHNLHPDYIHGRLQSLGKNFALRVLLVQVDVKDPQQALKELAKMCILADCTLILAWSPEEAGRYLETYKAYEQKPADLLMEKLEQDFVSRVTECLTTVKSVNKTDSQTLLTTFGSLEQLIAASREDLALCPGLGPQKVRALGKNPRSWGKERAPNKHNLRPQSFKVKKEPKTRHSGFRL

SEQ ID NO: 859823 - protein, 316 aa, Homo sapiens
MDPGKDKEGVPQPSGPPARKKFVIPLDEDEVPPGVAKPLFRSTQSLPTVDTSAQAAPQTYAEYAISQPLEGAGATCPTGSEPLAGETPNQALKPGAKSNSIIVSPRQRGNPVLKFVRNVPWEFGDVIPDYVLGQSTCALFLSLRYHNLHPDYIHGRLQSLGKNFALRVLLVQVDVKDPQQALKELAKMCILADCTLILAWSPEEAGRYLETYKAYEQKPADLLMEKLEQDFVSRVTECLTTVKSVNKTDSQTLLTTFGSLEQLIAASREDLALCPGLGPQKVRALGKNPRSWGKERAPNKHNLRPQSFKVKKEPKT

SEQ ID NO: 859824 - protein, 262 aa, Homo sapiens
MDPGKDKEGVPQPSGPPARKKFVIPLDEDEVPPGVAKPLFRSTQSLPTVDTSAQAAPQTYAEYAISQPLEGAGATCPTGSEPLAGETPNQALKPGAKSNSIIVSPRQRGNPVLKFVRNVPWEFGDVIPDYVLGQSTCALFLSLRYHNLHPDYIHGRLQSLGKNFALRVLLVQVDVKDPQQALKELAKMCILADCTLILAWSPEEAGRYLETYKAYEQKPADLLMEKLEQDFVSRVTECLTTVKSVNKTDSQTLLTTFGSLGT

SEQ ID NO: 859825 - protein, 299 aa, Homo sapiens
MDPGKDKEGVPQPSGPPARKKFVIPLDEDEVPPGVAKPLFRSTQSLPTVDTSAQAAPQTYAEYAISQPLEGAGATCPTGSEPLAGETPNQALKPGAKSNSIIVSPRQRGNPVLKFVRNVPWEFGDVIPDYVLGQSTCALFLSLRYHNLHPDYIHGRLQSLGKNFALRVLLVQVDVKDPQQALKELAKMCILADCTLILAWSPEEAGRYLETYKAYEQKPADLLMEKLEQDFVSRSLEQLIAASREDLALCPGLGPQKVRALGKNPRSWGKERAPNKHNLRPQSFKVKKEPKTRHSGFRL

SEQ ID NO: 859826 - protein, 275 aa, Homo sapiens
MDPGKDKEGVPQPSGPPARKKFVIPLDEDEVPPGVAKPLFRSTQSLPTVDTSAQAAPQTYAEYAISQPLEGAGATCPTGSEPLAGETPNQALKPGAKSNSIIVSPRQRGNPVLKFVRNVPWEFGDVIPDYVLGQSTCALFLSLRYHNLHPDYIHGRLQSLGKNFALRVLLVQVDVKDPQQALKELAKMCILADCTLILAWSPEEAGRYLETYKAYEQKPADLLMEKLEQDFVSRSLEQLIAASREDLALCPGLGPQKPGEEKKMRNQSLKELFPG

SEQ ID NO: 859827 - protein, 201 aa, Homo sapiens
MDPGKDKEGVPQPSGPPARKKFVIPLDEDEVPPGVAKPLFRSTQSLPTVDTSAQAAPQTYAEYAISQPLEGAGATCPTGSEPLAGETPNQALKPGAKSNSIIVSPRQRGNPVLKFVRNVPWEFGDVIPDYVLGQSTCALFLSLRYHNLHPDYIHGRLQSLGKNFALRVLLVQVDVKDPQQALKELAKMCILADCTLILAWR

SEQ ID NO: 859828 - protein, 273 aa, Homo sapiens
MDPGKDKEGVPQPSGPPARKKFVIPLDEDEVPPGVAKPLFRSTQSLPTVDTSAQAAPQTYAEYAISQPLEGAGATCPTGSEPLAGETPNQALKPGAKSNSIIVSPRQRGNPVLKFVRNVPWEFGDVIPDYVLGQSTCALFLSLRYHNLHPDYIHGRLQSLGKNFALRVLLVQVDVKDPQQALKELAKMCILADCTLILAWSPEEAGRYLETYKAYEQKPADLLMEKLEQDFVSRSLEQLIAASREDLALCPGLGPQKARRLFDVLHEPFLKVP

SEQ ID NO: 859829 - protein, 236 aa, Homo sapiens [sequence omitted]

SEQ ID NO: 859830 - protein, 297 aa, Homo sapiens; identical to SEQ ID NO: 859818

SEQ ID NO: 859831 - protein, 297 aa, Homo sapiens; identical to SEQ ID NO: 859818

SEQ ID NO: 859832 - protein, 297 aa, Homo sapiens; identical to SEQ ID NO: 859818

SEQ ID NO: 859833 - protein, 297 aa, Homo sapiens; identical to SEQ ID NO: 859818

SEQ ID NO: 859834 - protein, 279 aa, Homo sapiens
MDPGKDKEGVPQPSGPPARKKFVIPLDEDEVPPGVAKPLFRSTQSLPTVDTSAQAAPQTYAEYAISQPLEGAGATCPTGSEPLAGETPNQALKPGAFVRNVPWEFGDVIPDYVLGQSTCALFLSLRYHNLHPDYIHGRLQSLGKNFALRVLLVQVDVKDPQQALKELAKMCILADCTLILAWSPEEAGRYLETYKAYEQKPADLLMEKLEQDFVSRVTECLTTVKSVNKTDSQTLLTTFGSLEQLIAASREDLALCPGLGPQKARRLFDVLHEPFLKVP

SEQ ID NO: 859835 - protein, 323 aa, Homo sapiens
MDPGKDKEGVPQPSGPPARKKFVIPLDEDEVPPGVAKPLFRSTQSLPTVDTSAQAAPQTYAEYAISQPLEGAGATCPTGSEPLAGETPNQALKPGAKSNSIIVSPRQRGNPVLKFVRNVPWEFGDVIPDYVLGQSTCALFLRAPGTCSPLKPKSLPLFMKKPGVWSSSLRYHNLHPDYIHGRLQSLGKNFALRVLLVQVDVKDPQQALKELAKMCILADCTLILAWSPEEAGRYLETYKAYEQKPADLLMEKLEQDFVSRVTECLTTVKSVNKTDSQTLLTTFGSLEQLIAASREDLALCPGLGPQKARRLFDVLHEPFLKVP

SEQ ID NO: 859836 - protein, 297 aa, Homo sapiens; identical to SEQ ID NO: 859818

SEQ ID NO: 859837 - protein, 323 aa, Homo sapiens; identical to SEQ ID NO: 859822

SEQ ID NO: 859838 - protein, 273 aa, Homo sapiens; identical to SEQ ID NO: 859828

SEQ ID NO: 859839 - protein, 273 aa, Homo sapiens; identical to SEQ ID NO: 859828

SEQ ID NO: 859840 - protein, 273 aa, Homo sapiens; identical to SEQ ID NO: 859828

SEQ ID NO: 859841 - protein, 259 aa, Homo sapiens [sequence omitted]

SEQ ID NO: 859842 - protein, 213 aa, Homo sapiens
MDPGKDKEGVPQPSGPPARKKFVIPLDEDEVPPGVAKPLFRSTQSLPTVDTSAQAAPQTYAEYAISQPLEGAGATCPTGSEPLAGETPNQALKPGAKSNSIIVSPRQRGNPVLKFVRNVPWEFGDVIPDYVLGQSTCALFLSLRYHNLHPDYIHGRLQSLGKNFALRVLLVQVDVKDPQQALKELAKMCILADCTLILAWRPGGCLMSCTSPS

SEQ ID NO: 859843 - protein, 81 aa, Homo sapiens
CNGAILAHCNVCLPGSSSSPTSASLVAGITGTCHHAWLIFVIPGFLVSNSDFLLQKDPQQALKELAKMCILADCTLILAWR

SEQ ID NO: 859844 - protein, 73 aa, Homo sapiens
MELSQMSELMGLSVLLGLLALMATVYRVPEKTRAAKQWFHLTNLRIRATIASRTKIHALGLNQDFCCFDGSGP

SEQ ID NO: 859845 - protein, 442 aa, Homo sapiens [sequence omitted]

SEQ ID NO: 859846 - protein, 480 aa, Homo sapiens
MSELMGLSVLLGLLALMATAAVARGWLRAGEERSGRPACQKANGFPPDKSSGSKKQKQYQRIRKEKPQQHNFTHRLLAAALKSHSGNISCMDFSSNGKYLATCADDRTIRIWSTKDFLQREHRSMRANVELDHATLVRFSPDCRAFIVWLANGDTLRVFKMTKREDGGYTFTATPEDFPKKHKAPVIDIGIANTGKFIMTASSDTTVLIWSLKGQVLSTINTNQMNNTHAAVSPCGRFVASCGFTPDVKVWEVCFGKKGEFQEVVRAFELKGHSAAVHSFAFSNDSRRMASVSKDGTWKLWDTDVEYKKKQDPYLLKTGRFEEAAGAAPCRLALSPNAQVLALASGSSIHLYNTRRGEKEECFERVHGECIANLSFDITGRFLASCGDRAVRLFHNTPGHRAMVEEMQGHLKRASNESTRQRLQQQLTQAQESDSGRARRRGLRRRDLASSWHCCHLSSQVEAFQKESPGFLTGGPASSH

SEQ ID NO: 859847 - protein, 282 aa, Homo sapiens
MTKREDGGYTFTATPEDFPKKHKAPVIDIGIANTGKFIMTASSDTTVLIWSLKGQVLSTINTNQMNNTHAAVSPCGRFVASCGFTPDVKVWEVCFGKKGEFQEVVRAFELKGHSAAVHSFAFSNDSRRMASVSKDGTWKLWDTDVEYKKKQDPYLLKTGRFEEAAGAAPCRLALSPNAQVLALASGSSIHLYNTRRGEKEECFERVHGECIANLSFDITGRFLASCGDRAVRLFHNTPGHRAMVEEMQGHLKRASNESTRQRLQQQLTQAQETLKSLGALKK

SEQ ID NO: 859848 - protein, 352 aa, Homo sapiens
MDFSSNGKYLATCADDRTIRIWSTKDFLQREHRSMRANVELDHATLVRFSPDCRAFIVWLANGDTLRVFKMTKREDGGYTFTATPEDFPKKHKAPVIDIGIANTGKFIMTASSDTTVLIWSLKGQVLSTINTNQMNNTHAAVSPCGRFVASCGFTPDVKVWEVCFGKKGEFQEVVRAFELKGHSAAVHSFAFSNDSRRMASVSKDGTWKLWDTDVEYKKKQDPYLLKTGRFEEAAGAAPCRLALSPNAQVLALASGSSIHLYNTRRGEKEECFERVHGECIANLSFDITGRFLASCGDRAVRLFHNTPGHRAMVEEMQGHLKRASNESTRQRLQQQLTQAQETLKSLGALKK

SEQ ID NO: 859849 - protein, 443 aa, Homo sapiens
MSELMGLSVLLGLLALMATAAVARGWLRAGEERSGRPACQKANGFPPDKSSGSKKQKQYQRIRKEKPQQHNFTHRLLAAALKSHSGNISCMDFSSNGKYLATCADDRTIRIWSTKDFLQREHRSMRANVELDHATLVRFSPDCRAFIVWLANGDTLRVFKMTKREDGGYTFTATPEDFPKKHKAPVIDIGIANTGKFIMTASSDTTVLIWSLKGQVLSTINTNQMNNTHAAVSPCGRFVASCGFTPDVKVWEVCFGKKGEFQEVVRAFELKGHSAAVHSFAFSNDSRRMASVSKDGTWKLWDTDVEYKKKQDPYLLKTGRFEEAAGAAPCRLALSPNAQVLALASGSSIHLYNTRRGEKEECFERVHGECIANLSFDITGRFLASCGDRAVRLFHNTPGHRAMVEEMQGHLKRASNESTRQRLQQQLTQAQDCFFPLKLLLST

SEQ ID NO: 859850 - protein, 352 aa, Homo sapiens; identical to SEQ ID NO: 859848

SEQ ID NO: 859851 - protein, 414 aa, Homo sapiens
MLTSHPRVLSGQKANGFPPDKSSGSKKQKQYQRIRKEKPQQHNFTHRLLAAALKSHSGNISCMDFSSNGKYLATCADDRTIRIWSTKDFLQREHRSMRANVELDHATLVRFSPDCRAFIVWLANGDTLRVFKMTKREDGGYTFTATPEDFPKKHKAPVIDIGIANTGKFIMTASSDTTVLIWSLKGQVLSTINTNQMNNTHAAVSPCGRFVASCGFTPDVKVWEVCFGKKGEFQEVVRAFELKGHSAAVHSFAFSNDSRRMASVSKDGTWKLWDTDVEYKKKQDPYLLKTGRFEEAAGAAPCRLALSPNAQVLALASGSSIHLYNTRRGEKEECFERVHGECIANLSFDITGRFLASCGDRAVRLFHNTPGHRAMVEEMQGHLKRASNESTRQRLQQQLTQAQETLKSLGALKK

SEQ ID NO: 859852 - protein, 209 aa, Homo sapiens
RLGPPVTVIDIGIANTGKFIMTASSDTTVLIWSLKGQVLSTINTNQMNNTHAAVSPCGRFVASCGFTPDVKVWEVCFGKKGEFQEVVRAFELKGHSAAVHSFAFSNDSRRMASVSKDGTWKLWDTDVEYKKKQDPYLLKTGRFEEAAGAAVSQHSWPPSHGGGDAGPPEAGLQREHPPEAAAAADPGPRDPEEPGCPEEVTLGGPGAED

SEQ ID NO: 859853 - protein, 442 aa, Homo sapiens [sequence omitted]

SEQ ID NO: 859854 - protein, 154 aa, Homo sapiens [sequence omitted]

SEQ ID NO: 859855 - protein, 175 aa, Homo sapiens
RAARDGCAHYSLHRDVWPRIHTPLAVLCTRPAASPNPESAPFPLYMKVLCGLTVNSLLSSQSVVETESKPRSDSKASVLFLFSVCFFLRQGLALSLRMECSSVVIIAYCSLELLGSNDPKHWDYRHEPPYPASQSLCFCPYHTHSPPEDKGHIWLISCCSTQCLAHHRWAVNAYQ

SEQ ID NO: 859856 - protein, 387 aa, Homo sapiens
MSELMGLSVLLGLLALMATAAVARGWLRAGEERSGRPACQKANGFPPDKSSGSKKQKQYQRIRKEKPQQHNFTHRLLAAALKSHSGNISCMDFSSNGKYLATCADDRTIRIWSTKDFLQREHRSMRANVELDHATLVRFSPDCRAFIVWLANGDTLRVFKMTKREDGGYTFTATPEDFPKKHKAPVIDIGIANTGKFIMTASSDTTVLIWSLKGQVLSTINTNQMNNTHAAVSPCGRFVASCGFTPDVKVWEVCFGKKGEFQEVVRAFELKGHSAAVHSFAFSNDSRRMASVSKDGTWKLWDTDVEYKKKQDPYLLKTGRFEEAAGAAVSQHSWPPSHGGGDAGPPEAGLQREHPPEAAAAADPGPRDPEEPGCPEEVTLGGPGAED

SEQ ID NO: 859857 - protein, 414 aa, Homo sapiens; identical to SEQ ID NO: 859851

SEQ ID NO: 859858 - protein, 442 aa, Homo sapiens [sequence omitted]

SEQ ID NO: 859859 - protein, 442 aa, Homo sapiens [sequence omitted]

SEQ ID NO: 859860 - protein, 414 aa, Homo sapiens; identical to SEQ ID NO: 859851

SEQ ID NO: 859861 - protein, 208 aa, Homo sapiens
MELSQMSELMGLSVLLGLLALMATAAVARGWLRAGEERSGRPACQKANGFPPDKSSGSKKQKQYQRIRKEKPQQHNFTHRLLAAALKSHSGNISCMDFSSNGKYLATCADDRTIRIWSTKDFLQREHRSMRANVELDHATLVRFSPDCRAFIVWLANGDTLRVFKMTKREDGGYTFTATPEDFPKKHKAPVIDIGIANTVTPLSSSGA

SEQ ID NO: 859862 - protein, 104 aa, Homo sapiens
MELSQMSELMGLSVLLGLLALMATAAVARGWLRAGEERSGRPAYDGDPPCRVRRTSWGGTGSNLGPLLRLSLWPRPGRPRGGQESTVNSSACSVAAISEKAPIL

SEQ ID NO: 859863 - protein, 225 aa, Homo sapiens
FTGTTCSENEVLKASGLYGRFVASCGFTPDVKVWEVCFGKKGEFQEVVRAFELKGHSAAVHSFAFSNDSRRMASVSKDGTWKLWDTDVEYKKKQDPYLLKTGRFEEAAGAAPCRLALSPNAQVLALASGSSIHLYNTRRGEKEECFERVHGECIANLSFDITGRFLASCGDRAVRLFHNTPGHRAMVEEMQGHLKRASNESTRQRLQQQLTQAQETLKSLGALKK

SEQ ID NO: 859864 - protein, 469 aa, Homo sapiens
QVCCDRRGTPVVAAAAAAGAPGRGATMAVRQALGRGLQLGRALLLRFTGKPGRAYGLGRPGPAAGCVRGERPGWAAGPGAEPRRVGLGLPNRLRFFRQSVAGLAARLQRQFVVRAWGCAGPCGRAVFLAFGLGLGLIEEKQAESRRAVSACQEIQAIFTQKSKPGPDPLDTRRLQGFRLEEYLIGQSIGKGCSAAVYEATMPTLPQNLEVTKSTGLLPGRGPGTSAPGEGQERAPGAPAFPLAIKMMWNISAGSSSEAILNTMSQELVPASRVALAGEYGAVTYRKSKRGPKQLAPHPNIIRVLRAFTSSVPLLPGALVDYPDVLPSRLHPEGLGHGRTLFLVMKNYPCTLRQYLCVNTPSPRLAAMMLLQLLEGVDHLVQQGIAHRDLKSDNILVELDPDGCPWLVIADFGCCLADESIGLQLPFSSWYVDRGGNGCLMAPEVSPECVMRHRQPFPHMSTECRRLDAL

SEQ ID NO: 859865 - protein, 600 aa, Homo sapiens
QVCCDRRGTPVVAAAAAAGAPGRGATMAVRQALGRGLQLGRALLLRFTGKPGRAYGLGRPGPAAGCVRGERPGWAAGPGAEPRRVGLGLPNRLRFFRQSVAGLAARLQRQFVVRAWGCAGPCGRAVFLAFGLGLGLIEEKQAESRRAVSACQEIQAIFTQKSKPGPDPLDTRRLQGFRLEEYLIGQSIGKGCSAAVYEATMPTLPQNLEVTKSTGLLPGRGPGTSAPGEGQERAPGAPAFPLAIKMMWNISAGSSSEAILNTMSQELVPASRVALAGEYGAVTYRKSKRGPKQLAPHPNIIRVLRAFTSSVPLLPGALVDYPDVLPSRLHPEGLGHGRTLFLVMKNYPCTLRQYLCVNTPSPRLAAMMLLQLLEGVDHLVQQGIAHRDLKSDNILVELDPDGCPWLVIADFGCCLADESIGLQLPFSSWYVDRGGNGCLMAPEPRAVIDYSKADAWAVGAIAYEIFGLVNPFYGQGKAHLESRSYQEAQLPALPESVPPDVRQLVRALLQREASKRPSARVAANVLHLSLWGEHILALKNLKLDKMVGWLLQQSAATLLANRLTEKCCVETKMKMLFLANLECETLCQAALLLCSWRAAL

SEQ ID NO: 859866 - protein, 355 aa, Homo sapiens [sequence omitted]

SEQ ID NO: 859867 - protein, 404 aa, Homo sapiens
QVCCDRRGTPVVAAAAAAGAPGRGATMAVRQALGRGLQLGRALLLRFTGKPGRAYGLGRPGPAAGCVRGERPGWAAGPGAEPRRVGLGLPNRLRFFRQSVAGLAARLQRQFVVRAWGCAGPCGRAVFLAFGGHGRTLFLVMKNYPCTLRQYLCVNTPSPRLAAMMLLQLLEGVDHLVQQGIAHRDLKSDNILVELDPDGCPWLVIADFGCCLADESIGLQLPFSSWYVDRGGNGCLMAPEVSTARPGPRAVIDYSKADAWAVGAIAYEIFGLVNPFYGQGKAHLESRSYQEAQLPALPESVPPDVRQLVRALLQREASKRPSARVAANVLHLSLWGEHILALKNLKLDKMVGWLLQQSAATLLANRLTEKCCVETKMKMLFLANLECETLCQAALLLCSWRAAL

SEQ ID NO: 859868 - protein, 607 aa, Homo sapiens
QVCCDRRGTPVVAAAAAAGAPGRGATMAVRQALGRGLQLGRALLLRFTGKPGRAYGLGRPGPAAGCVRGERPGWAAGPGAEPRRVGLGLPNRLRFFRQSVAGLAARLQRQFVVRAWGCAGPCGRAVFLAFGLGLGLIEEKQAESRRAVSACQEIQAIFTQKSKPGPDPLDTRRLQGFRLEEYLIGQSIGKGCSAAVYEATMPTLPQNLEVTKSTGLLPGRGPGTSAPGEGQERAPGAPAFPLAIKMMWNISAGSSSEAILNTMSQELVPASRVALAGEYGAVTYRKSKRGPKQLAPHPNIIRVLRAFTSSVPLLPGALVDYPDVLPSRLHPEGLGHGRTLFLVMKNYPCTLRQYLCVNTPSPRLAAMMLLQLLEGVDHLVQQGIAHRDLKSDNILVELDPDGCPWLVIADFGCCLADESIGLQLPFSSWYVDRGGNGCLMAPEVSTARPGPRAVIDYSKADAWAVGAIAYEIFGLVNPFYGQGKAHLESRSYQEAQLPALPESVPPDVRQLVRALLQREASKRPSARVAANVLHLSLWGEHILALKNLKLDKMVGWLLQQSAATLLANRLTEKCCVETKMKMLFLANLECETLCQAALLLCSWRAAL

SEQ ID NO: 859869 - protein, 607 aa, Homo sapiens; identical to SEQ ID NO: 859868

SEQ ID NO: 859870 - protein, 534 aa, Homo sapiens
QVCCDRRGTPVVAAAAAAGAPGRGATMAVRQALGRGLQLGRALLLRFTGKPGRAYGLGRPGPAAGCVRGERPGWAAGPGAEPRRVGLGLPNRLRFFRQSVAGLAARLQRQFVVRAWGCAGPCGRAVFLAFGLGLGLIEEKQAESRRAVSACQEIQAIFTQKSKPGPDPLDTRRLQGFRLEEYLIGQSIGKGCSAAVYEATMPTLPQNLEVTKSTGLLPGRGPGTSAPGEGQERAPGAPAFPLAIKMMWNISAGSSSEAILNTMSQELVPASRVALAGEYGAVTYRKSKRGPKQLAPHPNIIRVLRAFTSSVPLLPGALVDYPDVLPSRLHPEGLGHGRTLFLVMKNYPCTLRQYLCVNTPSPRLAAMMLLQLLEGVDHLVQQGIAHRDLKSDNILVELDPDGCPWLVIADFGCCLADESIGLQLPFSSWYVDRGGNGCLMAPEVSTARPGPRAVIDYSKADAWAVGAIAYEIFGLVNPFYGQGKAHLESRSYQEAQLPALPESVPPDVRQLVRALLQREASKVRLSPASRGRCG

SEQ ID NO: 859871 - protein, 517 aa, Homo sapiens
QVCCDRRGTPVVAAAAAAGAPGRGATMAVRQALGRGLQLGRALLLRFTGKPGRAYGLGRPGPAAGCVRGERPGWAAGPGAEPRRVGLGLPNRLRFFRQSVAGLAARLQRQFVVRAWGCAGPCGRAVFLAFGLGLGLIEEKQAESRRAVSACQEIQAIFTQKSKPGPDPLDTRRLQGFRLEEYLIGQSIGKGCSAAVYEATMPTLPQNLEVTKSTGLLPGRGPGTSAPGEGQERAPGAPAFPLAIKMMWNISAGSSSEAILNTMSQELVPASRVALAGEYGAVTYRKSKRGPKQLAPHPNIIRVLRAFTSSVPLLPGALVDYPDVLPSRLHPEGLGHGRTLFLVMKNYPCTLRQYLCVNTPSPRLAAMMLLQLLEGVDHLVQQGIAHRDLKSDNILVELDPDGCPWLVIADFGCCLADESIGLQLPFSSWYVDRGGNGCLMAPEVSTARPGPRAVIDYSKADAWAVGAIAYEIYSSPEESEVRQDGWLAPPTIGRHFVGQQAHREVLCGNKNEDALSG

SEQ ID NO: 859872 - protein, 607 aa, Homo sapiens; identical to SEQ ID NO: 859868

SEQ ID NO: 859873 - protein, 607 aa, Homo sapiens; identical to SEQ ID NO: 859868

SEQ ID NO: 859874 - protein, 591 aa, Homo sapiens
QVCCDRRGTPVVAAAAAAGAPGRGATMAVRQALGRGLQLGRALLLRFTGKPGRAYGLGRPGPAAGCVRGERPGWAAGPGAEPRRVGLGLPNRLRFFRQSVAGLAARLQRQFVVRALGLGLIEEKQAESRRAVSACQEIQAIFTQKSKPGPDPLDTRRLQGFRLEEYLIGQSIGKGCSAAVYEATMPTLPQNLEVTKSTGLLPGRGPGTSAPGEGQERAPGAPAFPLAIKMMWNISAGSSSEAILNTMSQELVPASRVALAGEYGAVTYRKSKRGPKQLAPHPNIIRVLRAFTSSVPLLPGALVDYPDVLPSRLHPEGLGHGRTLFLVMKNYPCTLRQYLCVNTPSPRLAAMMLLQLLEGVDHLVQQGIAHRDLKSDNILVELDPDGCPWLVIADFGCCLADESIGLQLPFSSWYVDRGGNGCLMAPEVSTARPGPRAVIDYSKADAWAVGAIAYEIFGLVNPFYGQGKAHLESRSYQEAQLPALPESVPPDVRQLVRALLQREASKRPSARVAANVLHLSLWGEHILALKNLKLDKMVGWLLQQSAATLLANRLTEKCCVETKMKMLFLANLECETLCQAALLLCSWRAAL

SEQ ID NO: 859875 - protein, 607 aa, Homo sapiens; identical to SEQ ID NO: 859868

SEQ ID NO: 859876 - protein, 317 aa, Homo sapiens
PKFVVTGGGRRWWRQRRLRGHRAAAPPWRCDRRWAAACSWVERWGHGRTLFLVMKNYPCTLRQYLCVNTPSPRLAAMMLLQLLEGVDHLVQQGIAHRDLKSDNILVELDPDGCPWLVIADFGCCLADESIGLQLPFSSWYVDRGGNGCLMAPEVSTARPGPRAVIDYSKADAWAVGAIAYEIFGLVNPFYGQGKAHLESRSYQEAQLPALPESVPPDVRQLVRALLQREASKRPSARVAANVLHLSLWGEHILALKNLKLDKMVGWLLQQSAATLLANRLTEKCCVETKMKMLFLANLECETLCQAALLLCSWRAAL

SEQ ID NO: 859877 - protein, 607 aa, Homo sapiens; identical to SEQ ID NO: 859868

SEQ ID NO: 859878 - protein, 534 aa, Homo sapiens; identical to SEQ ID NO: 859870

SEQ ID NO: 859879 - protein, 439 aa, Homo sapiens
QVCCDRRGTPVVAAAAAAGAPGRGATMAVRQALGRGLQLGRALLLRFTGKPGRAYGLGRPGPAAGCVRGERPGWAAGPGAEPRRVGLGLPNRLRFFRQSVAGLAARLQRQFVVRAWGCAGPCGRAVFLAFGLGLGLIEEKQAESRRAVSACQEIQAIFTQKSKPGPDPLDTRRLQGFRLEEYLIGQSIGKGCSAAVYEATMPTLPQNLEVTKSTGLLPGRGPGTSAPGEGQERAPGAPAFPLAIKMMWNISAGSSSEAILNTMSQELVPASRVALAGEYGAVTYRKSKRGPKQLAPHPNIIRVLRAFTSSVPLLPGALVDYPDVLPSRLHPEGLGHGRTLFLVMKNYPCTLRQYLCVNTPSPRLAAMMLLQLLEGVDHLVQQGIAHRDLKSDNILVELDPGRNLLHHQSSPGALEGGSGAFRTDSSGPLWFCVLSHVFI

SEQ ID NO: 859880 - protein, 74 aa, Homo sapiens
MDSEVQRDGRILDLIDDAWREDKLPYEDVAIPLNELPEPEQDNGGTTESVKEQEMKWTDLALQYLHENVPPIGN

SEQ ID NO: 859881 - protein, 100 aa, Homo sapiens
CRHVMRGRAGRGRSKRLPRWPGAGKGFQRPRPRFWRRGNAFVAQCRTSPYSHRPRLSLYAHNRFSLLHSCREERDLRGTPRPPRLRFHVWYILPEAGSRS

SEQ ID NO: 859882 - protein, 74 aa, Homo sapiens; identical to SEQ ID NO: 859880

SEQ ID NO: 859883 - protein, 100 aa, Homo sapiens; identical to SEQ ID NO: 859881

SEQ ID NO: 859884 - protein, 100 aa, Homo sapiens; identical to SEQ ID NO: 859881

SEQ ID NO: 859885 - protein, 100 aa, Homo sapiens; identical to SEQ ID NO: 859881

SEQ ID NO: 859886 - protein, 100 aa, Homo sapiens; identical to SEQ ID NO: 859881

SEQ ID NO: 859887 - protein, 100 aa, Homo sapiens; identical to SEQ ID NO: 859881

SEQ ID NO: 859888 - protein, 74 aa, Homo sapiens; identical to SEQ ID NO: 859880

SEQ ID NO: 859889 - protein, 74 aa, Homo sapiens; identical to SEQ ID NO: 859880

SEQ ID NO: 859890 - protein, 302 aa, Homo sapiens
MTSSRLSTARSLAWWWIAVAALKVGDRGCLPHRPYPKSAWKLTTKYKNKTRKRRKKKNERGGNTQQRVHNQKERMRARTYKERSDSAAHNARKQGHPRNKRENPEEKTKREQTRTEQTPTKDSRTKAPRKHAQNEDATQQQHTQQQGRNKPNKNGRHSARKQKTEHKNNETTKNKRESATRTYKQENEEQMNTTTALTKRTESKAEGTDHRQREHTQNDNSRQEETQHQAKAEQETHDKQREQDGRHEQATTLEDTNTKTEGKKNNKGRRHNDKNEKAEEQDKKSKGTQQREDTEQKAARDE

SEQ ID NO: 859891 - protein, 407 aa, Homo sapiens
MVLAAPLLLGFLLLALELRPRGEAAEGPAAAAAAAAAAAAAGVGGERSSRPAPSVAPEPDGCPVCVWRQHSRELRLESIKSQILSKLRLKEAPNISREVVKQLLPKAPPLQQILDLHDFQGDALQPEDFLEEDEYHATTETVISMAQETDPAVQTDGSPLCCHFHFSPKVMFTKVLKAQLWVYLRPVPRPATVYLQILRLKPLTGEGTAGGGGGGRRHIRIRSLKIELHSRSGHWQSIDFKQVLHSWFRQPQSNWGIEINAFDPSGTDLAVTSLGPGAEGLHPFMELRVLENTKRSRRNLGLDCDEHSSESRCCRYPLTVDFEAFGWDWIIAPKRYKANYCSGQCEYMFMQKYPHTHLVQQANPRGSAGPCCTPTKMSPINMLYFNDKQQIIYGKIPGMVVDRCGCS

SEQ ID NO: 859892 - protein, 407 aa, Homo sapiens; identical to SEQ ID NO: 859891

SEQ ID NO: 859893 - protein, 407 aa, Homo sapiens; identical to SEQ ID NO: 859891

SEQ ID NO: 859894 - protein, 407 aa, Homo sapiens; identical to SEQ ID NO: 859891

SEQ ID NO: 859895 - protein, 219 aa, Homo sapiens
MLRAGAPTGDLPRAGEVHTGTTIMAVEFDGGVVMGSDSRVSAGEAVVNRVFDKLSPLHERIYCALSGSAADAQAVADMAAYQLELHGIELEEPPLVLAAANVVRNISYKYREDLSAHLMVAGWDQREGGQVYGTLGGMLTRQPFAIGGSGSTFIYGYVDAAYKPGMSPEECRRFTTDAIALAMSRDGSSGGVIYLVTITAAGVDHRVILGNELPKFYDE

SEQ ID NO: 859896 - protein, 219 aa, Homo sapiens; identical to SEQ ID NO: 859895

SEQ ID NO: 859897 - protein, 163 aa, Homo sapiens
RKGQLVPGPGPSHWGPASLLSRYGGRGNDGSRVFRRKRERNRRLQKPTWRWVTVRGSLHYHEELGKEVTHSRQISSNSSWRQLPTLQLWFSTTERRKGREMECAGLRRLSFWSICRSLHHGPVAPLFLHELLVGSPLPDSASFQKEDVVSLLHQAEVLGDEKH

SEQ ID NO: 859898 - protein, 219 aa, Homo sapiens; identical to SEQ ID NO: 859895

SEQ ID NO: 859899 - protein, 196 aa, Homo sapiens
MAVEFDGGVVMGSDSRVSAGEAVVNRVFDKLSPLHERIYCALSGSAADAQAVADMAAYQLELHGIELEEPPLVLAAANVVRNISYKYREDLSAHLMVAGWDQREGGQVYGTLGGMLTRQPFAIGGSGSTFIYGYVDAAYKPGMSPEECRRFTTDAIALAMSRDGSSGGVIYLVTITAAGVDHRVILGNELPKFYDE

SEQ ID NO: 859900 - protein, 155 aa, Homo sapiens
GPGPSHWGPASLLSRYGGRGNDGSRVFRRKRERNRRLQKPTWRWVTVRGTSRPGHPLETGVGRVVSSKGAASTRRLEVSQELGVVSRGVGVPMSITLQNQEGRKCEGAESWKQVLGQLQQNIPAACRGRRRQGEGAVSESFHGVHPRAPPGSTVS

SEQ ID NO: 859901 - protein, 219 aa, Homo sapiens; identical to SEQ ID NO: 859895

SEQ ID NO: 859902 - protein, 196 aa, Homo sapiens; identical to SEQ ID NO: 859899

SEQ ID NO: 859903 - protein, 178 aa, Homo sapiens
MLRAGAPTGDLPRAGEVHTGTTIMAVEFDGGVVMGSDSRVSAGIELEEPPLVLAAANVVRNISYKYREDLSAHLMVAGWDQREGGQVYGTLGGMLTRQPFAIGGSGSTFIYGYVDAAYKPGMSPEECRRFTTDATSTKRRVCGYFLRTQKRENQNQRVHEYMCTGERSLSSSPLLSCS

SEQ ID NO: 859904 - protein, 35 aa, Homo sapiens
MLRAGAPTGDLPRAGEVHTGVMGLGLRVGRGVEEM

SEQ ID NO: 859905 - protein, 114 aa, Homo sapiens
MTAQHPEICPLSEEEVKAKATDRRGGNKTLFHIPLPFPRKGQLVPGPGPSHWGPASLLSRYGGRGNDGSRVFRRKRERNRRLQKPTWRWVTVRGTSRPGHPLETGVGRVVSSKG

SEQ ID NO: 859906 - protein, 267 aa, Homo sapiens
SPSNSQPTSPASAPALPPPARRSRGAQTVSLTMGTADSDEMAPEAPQHTHIDVHIHQESALAKLLLTCCSALRPRATQARGSSRLLVASWVMQIVLGILSAVLGGFFYIRDYTLLVTSGAAIWTGAVAVLAGAAAFIYEKRGGTYWALLRTLLALAAFSTAIAALKLWNEDFRYGYSYYNSACRISSSSDWNTPAPTQSPEEVRRLHLCTSFMDMLKALFRTLQAMLLGVWILLLLASLAPLWLYCWRMFPTKGKRDQKEMLEVSGI

SEQ ID NO: 859907 - protein, 163 aa, Homo sapiens
PQELDPGSTLSAIILPWIIKLSMKPPAQAVCWGRACMEALSWERSCISCTKPAPGSISPQAVLAGAAAFIYEKRGGTYWALLRTLLALAAFSTAIAALKLWNEDFRYGYSYYNSACRISSSSDWNTPAPTQSPEEVRRLHLCTSFMDMLKKRDQKEMLEVSGI

SEQ ID NO: 859908 - protein, 313 aa, Homo sapiens
PLQLSTHFSSQRPSPPAARSQVPRSAGEAAPHSRRPPGLLPHAPRAASAQLEERRRDPHPGMTLQEGDCRGSQTVSLTMGTADSDEMAPEAPQHTHIDVHIHQESALAKLLLTCCSALRPRATQARGSSRLLVASWVMQIVLGILSAVLGGFFYIRDYTLLVTSGAAIWTGAVAVLAGAAAFIYEKRGGTYWALLRTLLALAAFSTAIAALKLWNEDFRYGYSYYNSACRISSSSDWNTPAPTQSPEEVRRLHLCTSFMDMLKALFRTLQAMLLGVWILLLLASLAPLWLYCWRMFPTKGKRDQKEMLEVSGI

SEQ ID NO: 859909 - protein, 176 aa, Homo sapiens
MQIVLGILSAVLGGFFYIRDYTLLVTSGAAIWTGAVAVLAGAAAFIYEKRGGTYWALLRTLLALAAFSTAIAALKLWNEDFRYGYSYYNSACRISSSSDWNTPAPTQSPEEVRRLHLCTSFMDMLKALFRTLQAMLLGVWILLLLASLAPLWLYCWRMFPTKGKRDQKEMLEVSGI

SEQ ID NO: 859910 - protein, 138 aa, Homo sapiens
ASVSAAYDILFAEHWASFTISYTTLYHPFSTAIAALKLWNEDFRYGYSYYNSACRISSSSDWNTPAPTQSPEEVRRLHLCTSFMDMLKALFRTLQAMLLGVWILLLLASLAPLWLYCWRMFPTKGKRDQKEMLEVSGI

SEQ ID NO: 859911 - protein, 267 aa, Homo sapiens; identical to SEQ ID NO: 859906

SEQ ID NO: 859912 - protein, 267 aa, Homo sapiens; identical to SEQ ID NO: 859906

SEQ ID NO: 859913 - protein, 267 aa, Homo sapiens; identical to SEQ ID NO: 859906

SEQ ID NO: 859914 - protein, 230 aa, Homo sapiens
SPSNSQPTSPASAPALPPPARRSRGAQTVSLTMGTADSDEMAPEAPQHTHIDVHIHQESALAKLLLTCCSALRPRATQARGSSRLLVASWVMQIVLGILSAVLGGFFYIRDYTLLVTSGAAIWTGAVAVLAGAAAFIYEKRGGTYWALLRTLLALAAFSTAIAALKLWNEDFRYGYSYYNSACRISSSSDWNTPAPTQSPEEVRRLHLCTSFMDMLKKRDQKEMLEVSGI

SEQ ID NO: 859915 - protein, 200 aa, Homo sapiens
PQELDPGSTLSAIILPWIIKLSMKPPAQAVCWGRACMEALSWERSCISCTKPAPGSISPQAVLAGAAAFIYEKRGGTYWALLRTLLALAAFSTAIAALKLWNEDFRYGYSYYNSACRISSSSDWNTPAPTQSPEEVRRLHLCTSFMDMLKALFRTLQAMLLGVWILLLLASLAPLWLYCWRMFPTKGKRDQKEMLEVSGI

SEQ ID NO: 859916 - protein, 164 aa, Homo sapiens
HQRVGSSPYCRPAGGANSLVISCEAVLAGAAAFIYEKRGGTYWALLRTLLALAAFSTAIAALKLWNEDFRYGYSYYNSACRISSSSDWNTPAPTQSPEEVRRLHLCTSFMDMLKALFRTLQAMLLGVWILLLLASLAPLWLYCWRMFPTKGKRDQKEMLEVSGI

SEQ ID NO: 859917 - protein, 267 aa, Homo sapiens; identical to SEQ ID NO: 859906

SEQ ID NO: 859918 - protein, 286 aa, Homo sapiens
SPSNSQPTSPASAPALPPPARRSRGAQTVSLTMGTADSDEMAPEAPQHTHIDVHIHQESALAKLLLTCCSALRPRATQARGSSRLLVASWVMQIVLGILSAVLGGFFYIRDYTLLVTSGAAIWTGAVAVLAGAAAFIYEKRGGTYWALLRTLLALAAFSTAIAALKLWNEDFRYGYSYYNSACRISSSSDWNTPAPTQSPEEVRRLHLCTSFMDMLKALFRTLQAMLLGVWILLLLASLAPLWLYCWRMFPTKGVPKVCACVFGAVELLKGDRNGQWTVWGGERGP

SEQ ID NO: 859919 - protein, 230 aa, Homo sapiens; identical to SEQ ID NO: 859914

SEQ ID NO: 859920 - protein, 157 aa, Homo sapiens
SPREGPGVRPCDQDSHSLGDFEPPLAPDLPNSNEICENLLTAVPLWCSLPHETVSLTMGTADSDEMAPEAPQHTHIDVHIHQESALAKLLLTCCSALRPRATQARGSSRLLVASWVSVTACLVGRREELPTSSRSSTLCQPPSEQDTEPVMSSYLAM

SEQ ID NO: 859921 - protein, 337 aa, Homo sapiens
MRPTLLWSLLLLLGVFAAAAAAPPDPLSQLPAPQHPKIRLYNAEQVLSWEPVALSNSTRPVVYQVQFKYTDSKWFTADIMSIGVNCTQITATECDFTAASPSAGFPMDFNVTLRLRAELGALHSAWVTMPWFQHYRNVTVGPPENIEVTPGEGSLIIRFSSPFDIADTSTAFFCYYVHYWEKGGIQQVKGPFRSNSISLDNLKPSRVYCLQVQAQLLWNKSNIFRVGHLSNISCYETMADASTELQQVILISVGTFSLLSVLAGACFFLVLKYRGLIKYWFHTPPSIPLQIEEYLKDPTQPILEALDKDSSPKDDVWDSVSIISFPEKEQEDVLQTL

SEQ ID NO: 859922 - protein, 356 aa, Homo sapiens
MRPTLLWSLLLLLGVFAAAAAAPPAQLTLETYQEWCNDSAATHDPLSQLPAPQHPKIRLYNAEQVLSWEPVALSNSTRPVVYQVQFKYTDSKWFTADIMSIGVNCTQITATECDFTAASPSAGFPMDFNVTLRLRAELGALHSAWVTMPWFQHYRNVTVGPPENIEVTPGEGSLIIRFSSPFDIADTSTAFFCYYVHYWEKGGIQQVKGPFRSNSISLDNLKPSRVYCLQVQAQLLWNKSNIFRVGHLSNISCYETMADASTELQQVILISVGTFSLLSVLAGACFFLVLKYRGLIKYWFHTPPSIPLQIEEYLKDPTQPILEALDKDSSPKDDVWDSVSIISFPEKEQEDVLQTL

SEQ ID NO: 859923 - protein, 339 aa, Homo sapiens
MSTPSSSESVNLGMCCLTYKRDSADVNPLSQLPAPQHPKIRLYNAEQVLSWEPVALSNSTRPVVYQVQFKYTDSKWFTADIMSIGVNCTQITATECDFTAASPSAGFPMDFNVTLRLRAELGALHSAWVTMPWFQHYRNVTVGPPENIEVTPGEGSLIIRFSSPFDIADTSTAFFCYYVHYWEKGGIQQVKGPFRSNSISLDNLKPSRVYCLQVQAQLLWNKSNIFRVGHLSNISCYETMADASTELQQVILISVGTFSLLSVLAGACFFLVLKYRGLIKYWFHTPPSIPLQIEEYLKDPTQPILEALDKDSSPKDDVWDSVSIISFPEKEQEDVLQTL

SEQ ID NO: 859924 - protein, 258 aa, Homo sapiens
MSIGVNCTQITATECDFTAASPSAGFPMDFNVTLRLRAELGALHSAWVTMPWFQHYRNVTVGPPENIEVTPGEGSLIIRFSSPFDIADTSTAFFCYYVHYWEKGGIQQVKGPFRSNSISLDNLKPSRVYCLQVQAQLLWNKSNIFRVGHLSNISCYETMADASTELQQVILISVGTFSLLSVLAGACFFLVLKYRGLIKYWFHTPPSIPLQIEEYLKDPTQPILEALDKDSSPKDDVWDSVSIISFPEKEQEDVLQTL

SEQ ID NO: 859925 - protein, 207 aa, Homo sapiens
MSLYAFELTVGPPENIEVTPGEGSLIIRFSSPFDIADTSTAFFCYYVHYWEKGGIQQVKGPFRSNSISLDNLKPSRVYCLQVQAQLLWNKSNIFRVGHLSNISCYETMADASTELQQVILISVGTFSLLSVLAGACFFLVLKYRGLIKYWFHTPPSIPLQIEEYLKDPTQPILEALDKDSSPKDDVWDSVSIISFPEKEQEDVLQTL

SEQ ID NO: 859926 - protein, 155 aa, Homo sapiens
MFLKQVKGPFRSNSISLDNLKPSRVYCLQVQAQLLWNKSNIFRVGHLSNISCYETMADASTELQQVILISVGTFSLLSVLAGACFFLVLKYRGLIKYWFHTPPSIPLQIEEYLKDPTQPILEALDKDSSPKDDVWDSVSIISFPEKEQEDVLQTL

SEQ ID NO: 859927 - protein, 337 aa, Homo sapiens; identical to SEQ ID NO: 859921

SEQ ID NO: 859928 - protein, 337 aa, Homo sapiens; identical to SEQ ID NO: 859921

SEQ ID NO: 859929 - protein, 337 aa, Homo sapiens; identical to SEQ ID NO: 859921

SEQ ID NO: 859930 - protein, 335 aa, Homo sapiens
MRPTLLWSLLLLLGVFAAAAAAPPDPLSQLPAPQHPKIRLYNAEQVLSWEPVALSNSTRPVVYQVQFKYTDSKWFTADIMSIGVNCTQITATECDFTAASPSAGFPMDFNVTLRLRAELGALHSAWVTMPWFQHYRNVTVGPPENIEVTPGEGSLIIRFSSPFDIADTSTAFFCYYVHYWEKGGIQQVKGPFRSNSISLDNLKPSRVYCLQVQAQLLWNKSNIFRVGHLSNISCYETMADASTELQQVILISVGTFSLLSVLAGACFFLVLKYRGLIKYWFHTPPSIPLQIEEYLKDPTQPILEALDKDSSQFSKSNSRMILRRYPRKIKASLKH

SEQ ID NO: 859931 - protein, 302 aa, Homo sapiens
MRPTLLWSLLLLLGVFAAAAAAPPDPLSQLPAPQHPKIRLYNAEQVLSWEPVALSNSTRPVVYQVQFKYTDSKWFTADIMSIGVNCTQITATECDFTAASPSAGFPMDFNVTLRLRAELGALHSAWVTMPWFQHYRNVTVGPPENIEVTPGEGSLIIRFSSPFDIADTSTAFFCYYVHYWEKGGIQQVKGPFRSNSISLDNLKPSRVYCLQVQAQLLWNKSNIFRVGHLSNISCYETMADASTELQQVILISVGTFSLLSVLAGACFFLVLKYRGLIKYWFHTPPSIPLQIEEPGRRLDFGK

SEQ ID NO: 859932 - protein, 141 aa, Homo sapiens
MRPTLLWSLLLLLGVFAAAAAAPPDPLSQLPAPQHPKIRLYNAEQVLSWEPVALSNSTRPVVYQVQFKYTDSKWFTADIMSIGVNCTQITATECDFTAASPSAGFPMDFNVTLRLRAELGALHSAWVTMPWFQHYRNGKRT

SEQ ID NO: 859933 - protein, 250 aa, Homo sapiens
MRPTLLWSLLLLLGVFAAAAAAPPDPLSQLPAPQHPKIRLYNAEQVLSWEPVALSNSTRPVVYQVQFKYTDSKWFTADIMSIGVNCTQITATECDFTAASPSAGFPMDFNVTLRLRAELGALHSAWVTMPWFQHYRNVTVGPPENIEVTPGEGSLIIRFSSPFDIADTSTAFFCYYVHYWEKGGIQQVKGPFRSNSISLDNLKPSMPWFQHYRTVTVGPPENIEVTQEKAPSSSCSPLPLTSLITPRPLR

SEQ ID NO: 859934 - protein, 258 aa, Homo sapiens; identical to SEQ ID NO: 859924

SEQ ID NO: 859935 - protein, 369 aa, Homo sapiens
MRPTLLWSLLLLLGVFAAAAAAPPDPLSQLPAPQHPKIRLYNAEQVLSWEPVALSNSTRPVVYQVQFKYTDSKWFTADIMSIGVNCTQITATECDFTAASPSAGFPMDFNVTLRLRAELGALHSAWVTMPWFQHYRNVETAFLHVGQTGLELLTSSDLPTSASQSAGITVTVGPPENIEVTPGEGSLIIRFSSPFDIADTSTAFFCYYVHYWEKGGIQQVKGPFRSNSISLDNLKPSRVYCLQVQAQLLWNKSNIFRVGHLSNISCYETMADASTELQQVILISVGTFSLLSVLAGACFFLVLKYRGLIKYWFHTPPSIPLQIEEYLKDPTQPILEALDKDSSPKDDVWDSVSIISFPEKEQEDVLQTL

SEQ ID NO: 859936 - protein, 320 aa, Homo sapiens
MRPTLLWSLLLLLGVFAAAAAAPPDPLSQLPAPQHPKIRLYNAEQVLSWEPVALSNSTRPVVYQVQFKYTDSKWFTADIMSIGVNCTQITATECDFTAASPSAGFPMDFNVTLRLRAELGALHSAWVTMPWFQHYRNVIIRFSSPFDIADTSTAFFCYYVHYWEKGGIQQVKGPFRSNSISLDNLKPSRVYCLQVQAQLLWNKSNIFRVGHLSNISCYETMADASTELQQVILISVGTFSLLSVLAGACFFLVLKYRGLIKYWFHTPPSIPLQIEEYLKDPTQPILEALDKDSSPKDDVWDSVSIISFPEKEQEDVLQTL

SEQ ID NO: 859937 - protein, 316 aa, Homo sapiens
MRPTLLWSLLLLLGVFAAAAAAPPDPLSQLPAPQHPKIRLYNAEQVLSWEPVALSNSTRPVVYQVQFKYTDSKWFTADIMSIGVNCTQITATECDFTAASPSAGFPMDFNVTLRLRAELGALHSAWVTMPWFQHYRNVTVGPPENIEVTPGEGSLIIRFSSPFDIADTSTAFFCYYVHYWEKGGIQQVKGPFRSNSISLDNLKPSRVYCLQVQAQLLWNKSNIFRVGHLSNISCYETMADASTELQQVILISVGTFSLLSVLAGACFFLVQRMTSGTLCPLSRFRKRSKKMFSKRFEPKHGPSPLAPWKRSSHRSC

SEQ ID NO: 859938 - protein, 337 aa, Homo sapiens; identical to SEQ ID NO: 859921

SEQ ID NO: 859939 - protein, 316 aa, Homo sapiens
MRPTLLWSLLLLLGVFAAAAAAPPDPLSQLPAPQHPKIRLYNAEQVLSWEPVALSNSTRPVVYQVQFKYTDSKWFTADIMSIGVNCTQITATECDFTAASPSAGFPMDFNVTLRLRAELGALHSAWVTMPWFQHYRNVTVGPPENIEVTPGEGSLIIRFSSPFDIADTSTAFFCYYVHYWEKGGIQQVKGPFRSNSISLDNLKPSRVYCLQVQAQLLWNKSNIFRVGHLSNISCYETMADASTELQQVILISVGTFSLLSVLAGACFFLVLKYRGLIKYWFHTPPSIPLQIEEYLKDPTQPILEALDKDSSPWSSS

SEQ ID NO: 859940 - protein, 155 aa, Homo sapiens
MRPTLLWSLLLLLGVFAAAAAAPPDPLSQLPAPQHPKIRLYNAEQVLSWEPVALSNSTRPVVYQVQFKYTDSKWFTADIMSIGVNCTQITATECDFTAASPSAGFPMDFNVTLRLRALVVVLTLANEPEPLGQVTQPVPARDTEWPFMYIHGVLA

SEQ ID NO: 859941 - protein, 191 aa, Homo sapiens
MELKNLEYRPVKVRGCFDHSKELYMMPRTMVDPVREAREGGLISSSTQSGAYVVTPFHCTDLGVTILVNRGFVPRKKVNPETRQKGQIEGEVDLIGMVRLTETRQPFVPENNPERNHWHYRDLEAMARITGAEPIFIDANFQSTVPGGPIGGQTRVTLRNEHLQYIVTWYGLSAATSYLWFKKFLRGTPGV

SEQ ID NO: 859942 - protein, 132 aa, Homo sapiens
RTLRASVWSRRLGCSRRNARTSPGNSLMADAPAEQPGGSRSQNLEPGAGLWAGLSGAPDADASCVPEAPAGPGAMAAVAALQLGLRAAGLGRAPASAAWRSVLRVSPRPGEGCRPGCDPGAWAEPPAVCPAL

SEQ ID NO: 859943 - protein, 283 aa, Homo sapiens
SVNGYGEHIYLQTLNSWGGVAWRPSRCGSSAAEASATKAEDDSFLQWVLLLIPVTAFGLGTWQVQRRKWKLNLIAELESRVLAEPVPLPADPMELKNLEYRPVKVRGCFDHSKELYMMPRTMVDPVREAREGGLISSSTQSGAYVVTPFHCTDLGVTILVNRGFVPRKKVNPETRQKGQIEGEVDLIGMVRLTETRQPFVPENNPERNHWHYRDLEAMARITGAEPIFIDANFQSTVPGGPIGGQTRVTLRNEHLQYIVTWYGLSAATSYLWFKKFLRGTPGV

SEQ ID NO: 859944 - protein, 374 aa, Homo sapiens
RTLRASVWSRRLGCSRRNARTSPGNSLMADAPAEQPGGSRSQNLEPGAGLWAGLSGAPDADASCVPEAPAGPGAMAAVAALQLGLRAAGLGRAPASAAWRSVLRVSPRPGVAWRPSRCGSSAAEASATKAEDDSFLQWVLLLIPVTAFGLGTWQVQRRKWKLNLIAELESRVLAEPVPLPADPMELKNLEYRPVKVRGCFDHSKELYMMPRTMVDPVREAREGGLISSSTQSGAYVVTPFHCTDLGVTILVNRGFVPRKKVNPETRQKGQIEGEVDLIGMVRLTETRQPFVPENNPERNHWHYRDLEAMARITGAEPIFIDANFQSTVPGGPIGGQTRVTLRNEHLQYIVTWYGLSAATSYLWFKKFLRGTPGV

SEQ ID NO: 859945 - protein, 374 aa, Homo sapiens; identical to SEQ ID NO: 859944

SEQ ID NO: 859946 - protein, 357 aa, Homo sapiens
ANLAGVRLEPQARVLPQKRPHVARQLAHGRRARGAARRKPLAEPGAGGGALGGTQRRPGCRCLLRPGSARGAGCDGGGGCVAAGAAGGGAGTGVAWRPSRCGSSAAEASATKAEDDSFLQWVLLLIPVTAFGLGTWQVQRRKWKLNLIAELESRVLAEPVPLPADPMELKNLEYRPVKVRGCFDHSKELYMMPRTMVDPVREAREGGLISSSTQSGAYVVTPFHCTDLGVTILVNRGFVPRKKVNPETRQKGQIEGEVDLIGMVRLTETRQPFVPENNPERNHWHYRDLEAMARITGAEPIFIDANFQSTVPGGPIGGQTRVTLRNEHLQYIVTWYGLSAATSYLWFKKFLRGTPGV

SEQ ID NO: 859947 - protein, 374 aa, Homo sapiens; identical to SEQ ID NO: 859944

SEQ ID NO: 859948 - protein, 480 aa, Homo sapiens
MSAEVIHQVEEALDTDEKEMLLFLCRDVAIDVVPPNVRDLLDILRERGKLSVGDLAELLYRVRRFDLLKRILKMDRKAVETHLLRNPHLVSDYRVLMAEIGEDLDKSDVSSLIFLMKDYMGRGKISKEKSFLDLVVELEKLNLVAPDQLDLLEKCLKNIHRIDLKTKIQKYKQSVQGAGTSYRNVLQAAIQKSLKDPSNNFRLHNGRSKEQRLKEQLGAQQEPVKKSIQESEAFLPQSIPEERYKMKSKPLGICLIIDCIGNETELLRDTFTSLGYEVQKFLHLSMHGISQILGQFACMPEHRDYDSFVCVLVSRGGSQSVYGVDQTHSGLPLHHIRRMFMGDSCPYLAGKPKMFFIQNYVVSEGQLEDSSLLEVDGPAMKNVEFKAQKRGLCTVHREADFFWSLCTADMSLLEQSHSSPSLYLQCLSQKLRQERKRPLLDLHIELNGYMYDWNSRVSAKEKYYVWLQHTLRKKLILSYT

SEQ ID NO: 859949 - protein, 107 aa, Homo sapiens
MVRNSGKINGPVPICIHLIDHILQLLLRIQHERKMEARRLHQSSLSMFCLLLFWQCWQLIRWCPPRLRMVCLSQSTDSNVKSPLAAPSQMYPGTLCILLFNQVDTQY

SEQ ID NO: 859950 - protein, 121 aa, Homo sapiens
MVSLSHPPEEPVKKSIQESEAFLPQSIPEERYKMKSKPLGICLIIDCIGNETGRCGSCRLTGAPRLRSWHRQAVFIGVISTNCRDKPVQESVLHPGCGGSCLEFQHFVRLRWEDHLSPVKN

SEQ ID NO: 859951 - protein, 480 aa, Homo sapiens; identical to SEQ ID NO: 859948

SEQ ID NO: 859952 - protein, 480 aa, Homo sapiens; identical to SEQ ID NO: 859948

SEQ ID NO: 859953 - protein, 480 aa, Homo sapiens; identical to SEQ ID NO: 859948

SEQ ID NO: 859954 - protein, 480 aa, Homo sapiens; identical to SEQ ID NO: 859948

SEQ ID NO: 859955 - protein, 445 aa, Homo sapiens
MSAEVIHQVEEALDTDEKEMLLFLCRDVAIDVVPPNVRDLLDILRERGKLSVGDLAELLYRVRRFDLLKRILKMDRKAVETHLLRNPHLVSDYRVLMAEIGEDLDKSDVSSLIFLMKDYMGRGKISKEKSFLDLVVELEKLNLVAPDQLDLLEKCLKNIHRIDLKTKIQKYKQSVQGAGTSYRNVLQAAIQKSLKDPSNNFRSIPEERYKMKSKPLGICLIIDCIGNETELLRDTFTSLGYEVQKFLHLSMHGISQILGQFACMPEHRDYDSFVCVLVSRGGSQSVYGVDQTHSGLPLHHIRRMFMGDSCPYLAGKPKMFFIQNYVVSEGQLEDSSLLEVDGPAMKNVEFKAQKRGLCTVHREADFFWSLCTADMSLLEQSHSSPSLYLQCLSQKLRQERKRPLLDLHIELNGYMYDWNSRVSAKEKYYVWLQHTLRKKLILSYT

SEQ ID NO: 859956 - protein, 205 aa, Homo sapiens
MSAEVIHQVEEALDTDEKEMLLFLCRDVAIDVVPPNVRDLLDILRERGKLSVGDLAELLYRVRRFDLLKRILKMDRKAVETHLLRNPHLVSDYRVLMAEIGEDLDKSDVSSLIFLMKDYMGRGKISKEKSFLDLVVELEKLNLVAPDQLDLLEKCLKNIHRIDLKTKIQKYKQSVQGAGTSYRNVLQAAIQKSLKDPSNNFRKNQ

SEQ ID NO: 859957 - protein, 590 aa, Homo sapiens
MSAEVIHQVEEALDTDEKEMLLFLCRDVAIDVVPPNVRDLLDILRERGKLSVGDLAELLYRVRRFDLLKRILKMDRKAVETHLLRNPHLVSDYRVLMAEIGEDLDKSDVSSLIFLMKDYMGRGKISKEKSFLDLVVELEKLNLVAPDQLDLLEKCLKNIHRIDLKTKIQKYKQSVQGAGTSYRNVLQAAIQKSLKDPSNNFRLHNGRSKEQRLKEQLGAQQEPVKKSIQESEAFLPQSIPEERYKMKSKPLGICLIIDCIGNETELLRDTFTSLGYEVQKFLHLSMHGISQILGQFACMPEHRDYDSFVCVLVSRGGSQSVYGVDQTHSGLPLHHIRRMFMGDSCPYLAGKPKMFFIQNYVVSEGQLEDSSLLEVDGPAMKNVEFKAQKRGLCTVHREADFFWSLCTADMSLLEQSHSSPSLYLQCLSQKLRQERKRPLLDLHIELNGYMYDWNSRVSAKEKYYVWLQHTLRKKLILSYTYVQRLTSDAELCGHEDAQNQGPDVQALGGGGIGLGPGHVANHLPVPRLHGVGECYEAQAAGVHEEGVEQGPDDMVGTEVSLRMWITVDVGGAGLWGAPSTATRAPPLSIT

SEQ ID NO: 859958 - protein, 300 aa, Homo sapiens
MSAEVIHQVEEALDTDEKEMLLFLCRDVAIDVVPPNVRDLLDILRERGKLSVGDLAELLYRVRRFDLLKRILKMDRKAVETHLLRNPHLVSDYRVLMAEIGEDLDKSDVSSLIFLMKDYMGRGKISKEKSFLDLVVELEKLNLVAPDQLDLLEKCLKNIHRIDLKTKIQKYKQSVQGAGTSYRNVLQAAIQKSLKDPSNNFRLHNGRSKEQRLKEQLGAQQEPVKKSIQESEAFLPQSIPEERYKMKSKPLGICLIIDCIGNETENAHSWIFTLNSMATCMIGTAEFLPRRNIMSGCSTL

SEQ ID NO: 859959 - protein, 213 aa, Homo sapiens [sequence omitted]

SEQ ID NO: 859960 - protein, 221 aa, Homo sapiens
MSAEVIHQVEEALDTDEKEMLLFLCRDVAIDVVPPNVRDLLDILRERGKLSVGDLAELLYRVRRFDLLKRILKMDRKAVETHLLRNPHLVSDYRVLMAEIGEDLDKSDVSSLIFLMKDYMGRGKISKEKSFLDLVVELEKLNLVAPDQLDLLEKCLKNIHRIDLKTKIQKYKQSVQGAGTSYRNVLQAAIQKSLKDPSNNFRMITPYAHCPDLKILGNCSM

SEQ ID NO: 859961 - protein, 187 aa, Homo sapiens
MSAEVIHQVEEALDTDEKEMLLFLCRDVAIDVVPPNVRDLLDILRERGKLSVGDLAELLYRVRRFDLLKRILKMDRVLMAEIGEDLDKSDVSSLIFLMKDYMGRGKISKEKSFLDLVVELEKLNLVAPDQLDLLEKCLKNIHRIDLKTKIQKYKQSVQGAGTSYRNVLQAAIQKSLKDPSNNFRKNQ

SEQ ID NO: 859962 - protein, 250 aa, Homo sapiens
MSAEVIHQVEEALDTDEKEMLLFLCRDVAIDVVPPNVRDLLDILRERGKLSVGDLAELLYRVRRFDLLKRILKMDRKAVETHLLRNPHLVSDYRVLMAEIGEDLDKSDVSSLIFLMKDYMGRGKISKEKSFLDLVVELEKLNLVAPDQLDLLEKCLKNIHRIDLKTKIQKYKQSGGWNGTWMTKASFSLWLEIASLYILHIPDLPTPLPCIFMISAKCCQAVLNISVFKKESGICTGWQSYGHSGVLHVC

SEQ ID NO: 859963 - protein, 235 aa, Homo sapiens
MKSKPLGICLIIDCIGNETELLRDTFTSLGYEVQKFLHLSMHGISQILGQFACMPEHRDYDSFVCVLVSRGGSQSVYGVDQTHSGLPLHHIRRMFMGDSCPYLAGKPKMFFIQNYVVSEGQLEDSSLLEVDGPAMKNVEFKAQKRGLCTVHREADFFWSLCTADMSLLEQSHSSPSLYLQCLSQKLRQERKRPLLDLHIELNGYMYDWNSRVSAKEKYYVWLQHTLRKKLILSYT

SEQ ID NO: 859964 - protein, 384 aa, Homo sapiens
MAEIGEDLDKSDVSSLIFLMKDYMGRGKISKEKSFLDLVVELEKLNLVAPDQLDLLEKCLKNIHRIDLKTKIQKYKQSVQGAGTSYRNVLQAAIQKSLKDPSNNFRLHNGRSKEQRLKEQLGAQQEPVKKSIQESEAFLPQSIPEERYKMKSKPLGICLIIDCIGNETELLRDTFTSLGYEVQKFLHLSMHGISQILGQFACMPEHRDYDSFVCVLVSRGGSQSVYGVDQTHSGLPLHHIRRMFMGDSCPYLAGKPKMFFIQNYVVSEGQLEDSSLLEVDGPAMKNVEFKAQKRGLCTVHREADFFWSLCTADMSLLEQSHSSPSLYLQCLSQKLRQERKRPLLDLHIELNGYMYDWNSRVSAKEKYYVWLQHTLRKKLILSYT

SEQ ID NO: 859965 - protein, 217 aa, Homo sapiens
MKSKPLGICLIIDCIGNETELLRDTFTSLGYEVQKFLHLSMHGISQILGQFACMPEHRDYDSFVCVLVSRGGSQSVYGVDQTHSGLPLHHIRRMFMGDSCPYLAGKPKMFFIQNYVVSEGQLEDSSLLEVDGPAMKNVEFKAQKRGLCTVHREADFFWSLCTADMSLLEQSHSSPSLYLQCLSQKLRQERGTIPGSGITESKDMHFSSLGCILLDVL

SEQ ID NO: 859966 - protein, 433 aa, Homo sapiens
DDAHQLAAHGTRLSDGDAREAMTHLGLQHITHSVQGAQHHGVCDKARFKLLDLLHLTGLELWGAVVVNETSTSHQSHHDGQVGLCHSVHGGGDQRRLQSDHWVRAEVRSTSSAMKSMNPGRIKKSVVVQGAGTSYRNVLQAAIQKSLKDPSNNFRLHNGRSKEQRLKEQLGAQQEPVKKSIQESEAFLPQSIPEERYKMKSKPLGICLIIDCIGNETELLRDTFTSLGYEVQKFLHLSMHGISQILGQFACMPEHRDYDSFVCVLVSRGGSQSVYGVDQTHSGLPLHHIRRMFMGDSCPYLAGKPKMFFIQNYVVSEGQLEDSSLLEVDGPAMKNVEFKAQKRGLCTVHREADFFWSLCTADMSLLEQSHSSPSLYLQCLSQKLRQERKRPLLDLHIELNGYMYDWNSRVSAKEKYYVWLQHTLRKKLILSYT

SEQ ID NO: 859967 - protein, 317 aa, Homo sapiens
MQYLYQKYKQSVQGAGTSYRNVLQAAIQKSLKDPSNNFRLHNGRSKEQRLKEQLGAQQEPVKKSIQESEAFLPQSIPEERYKMKSKPLGICLIIDCIGNETELLRDTFTSLGYEVQKFLHLSMHGISQILGQFACMPEHRDYDSFVCVLVSRGGSQSVYGVDQTHSGLPLHHIRRMFMGDSCPYLAGKPKMFFIQNYVVSEGQLEDSSLLEVDGPAMKNVEFKAQKRGLCTVHREADFFWSLCTADMSLLEQSHSSPSLYLQCLSQKLRQERKRPLLDLHIELNGYMYDWNSRVSAKEKYYVWLQHTLRKKLILSYT

SEQ ID NO: 859968 - protein, 235 aa, Homo sapiens; identical to SEQ ID NO: 859963

SEQ ID NO: 859969 - protein, 221 aa, Homo sapiens; identical to SEQ ID NO: 859960

SEQ ID NO: 859970 - protein, 250 aa, Homo sapiens; identical to SEQ ID NO: 859962

SEQ ID NO: 859971 - protein, 480 aa, Homo sapiens; identical to SEQ ID NO: 859948

SEQ ID NO: 859972 - protein, 221 aa, Homo sapiens; identical to SEQ ID NO: 859960

SEQ ID NO: 859973 - protein, 126 aa, Homo sapiens
DDAHQLAAHGTRLSDGDAREAMTHLGLQHITHSVQGAQHHGVCDKARFKLLDLLHLTGLELWGAVVVNETSTSHQSHHDGQVGLCHSVHGGGDQRRLQSDHWVRAEVRSTSSAMKSMNPGRIKKSL

SEQ ID NO: 859974 - protein, 480 aa, Homo sapiens; identical to SEQ ID NO: 859948

SEQ ID NO: 859975 - protein, 480 aa, Homo sapiens; identical to SEQ ID NO: 859948

SEQ ID NO: 859976 - protein, 480 aa, Homo sapiens; identical to SEQ ID NO: 859948

SEQ ID NO: 859977 - protein, 480 aa, Homo sapiens; identical to SEQ ID NO: 859948

SEQ ID NO: 859978 - protein, 480 aa, Homo sapiens; identical to SEQ ID NO: 859948

SEQ ID NO: 859979 - protein, 480 aa, Homo sapiens; identical to SEQ ID NO: 859948

SEQ ID NO: 859980 - protein, 480 aa, Homo sapiens; identical to SEQ ID NO: 859948

SEQ ID NO: 859981 - protein, 480 aa, Homo sapiens; identical to SEQ ID NO: 859948

SEQ ID NO: 859982 - protein, 480 aa, Homo sapiens; identical to SEQ ID NO: 859948

SEQ ID NO: 859983 - protein, 462 aa, Homo sapiens
MSAEVIHQVEEALDTDEKEMLLFLCRDVAIDVVPPNVRDLLDILRERGKLSVGDLAELLYRVRRFDLLKRILKMDRKAVETHLLRNPHLVSDYRVLMAEIGEDLDKSDVSSLIFLMKDYMGRGKISKEKSFLDLVVELEKLNLVAPDQLDLLEKCLKNIHRIDLKTKIQKYKQSVQGAGTSYRNVLQAAIQKSLKDPSNNFRLHNGRSKEQRLKEQLGAQQEPVKKSIQESEAFLPQSIPEERYKMKSKPLGICLIIDCIGNETELLRDTFTSLGYEVQKFLHLSMHGISQILGQFACMPEHRDYDSFVCVLVSRGGSQSVYGVDQTHSGLPLHHIRRMFMGDSCPYLAGKPKMFFIQNYVVSEGQLEDSSLLEVDGPAMKNVEFKAQKRGLCTVHREADFFWSLCTADMSLLEQSHSSPSLYLQCLSQKLRQERGTIPGSGITESKDMHFSSLGCILLDVL

SEQ ID NO: 859984 - protein, 270 aa, Homo sapiens
MSAEVIHQVEEALDTDEKEMLLFLCRDVAIDVVPPNVRDLLDILRERGKLSVGDLAELLYRVRRFDLLKRILKMDRKAVETHLLRNPHLVSDYRVLMAEIGEDLDKSDVSSLIFLMKDYMGRGKISKEKSFLDLVVELEKLNLVAPDQLDLLEKCLKNIHRIDLKTKIQKYKQSVQGAGTSYRNVLQAAIQKSLKDPSNNFRSIPEERYKMKSKPLGICLIIDCIGNETELCGVRGPAGGQQPLGGGWASDEECGIQGSEARAVHSSPRS

SEQ ID NO: 859985 - protein, 292 aa, Homo sapiens
MSAEVIHQVEEALDTDEKEMLLFLCRDVAIDVVPPNVRDLLDILRERGKLSVGDLAELLYRVRRFDLLKRILKMDRKAVETHLLRNPHLVSDYRVLMAEIGEDLDKSDVSSLIFLMKDYMGRGKISKEKSFLDLVVELEKLNLVAPDQLDLLEKCLKNIHRIDLKTKIQKYKQSVQGAGTSYRNVLQAAIQKSLKDPSNNFRLHNGRSKEQRLKEQLGAQQEPVKKSIQESEAFLPQSIPEERYKMKSKPLGICLIIDCIGNETGWSAMAQSQLTAISTSQVQAILLPQPPE

SEQ ID NO: 859986 - protein, 451 aa, Homo sapiens
MSAEVIHQVEEALDTDEKEMLLFLCRDVAIDVVPPNVRDLLDILRERGKLSVGDLAELLYRVRRFDLLKRILKMDRKAVETHLLRNPHLVSDYRVLMAEIGEDLDKSDVSSLIFLMKDYMGRGKISKEKSFLDLVVELEKLNLVAPDQLDLLEKCLKNIHRIDLKTKIQKYKQSVQGAGTSYRNVLQAAIQKSLKDPSNNFRLHNGRSKEQRLKEQLGAQQEPVKKSIQESEAFLPQSIPEERYKMKSKPLGICLIIDCIGNETELLRDTFTSLGYEVQKFLHLSMHGISQILGQFACMPEHRDYDSFVCVLVSRGGSQSVYGVDQTHSGLPLHHIRRMFMGDSCPYLAGKPKMFFIQNYVVSEGQLEDSSLLEVDGPAMKNVEFKAQKRGLCTVHREADFFWSLCTADMSLLEQSHSSPSLYLQCLSQKLRQERKRPLLDLHIVQRLTVP

SEQ ID NO: 859987 - protein, 462 aa, Homo sapiens
MSAEVIHQVEEALDTDEKEMLLFLCRDVAIDVVPPNVRDLLDILRERGKLSVGDLAELLYRVRRFDLLKRILKMDRVLMAEIGEDLDKSDVSSLIFLMKDYMGRGKISKEKSFLDLVVELEKLNLVAPDQLDLLEKCLKNIHRIDLKTKIQKYKQSVQGAGTSYRNVLQAAIQKSLKDPSNNFRLHNGRSKEQRLKEQLGAQQEPVKKSIQESEAFLPQSIPEERYKMKSKPLGICLIIDCIGNETELLRDTFTSLGYEVQKFLHLSMHGISQILGQFACMPEHRDYDSFVCVLVSRGGSQSVYGVDQTHSGLPLHHIRRMFMGDSCPYLAGKPKMFFIQNYVVSEGQLEDSSLLEVDGPAMKNVEFKAQKRGLCTVHREADFFWSLCTADMSLLEQSHSSPSLYLQCLSQKLRQERKRPLLDLHIELNGYMYDWNSRVSAKEKYYVWLQHTLRKKLILSYT

SEQ ID NO: 859988 - protein, 183 aa, Homo sapiens [sequence omitted]

SEQ ID NO: 859989 - protein, 217 aa, Homo sapiens; identical to SEQ ID NO: 859965

SEQ ID NO: 859990 - protein, 217 aa, Homo sapiens; identical to SEQ ID NO: 859965

SEQ ID NO: 859991 - protein, 370 aa, Homo sapiens
EESRKCTVLHGPREISKEKSFLDLVVELEKLNLVAPDQLDLLEKCLKNIHRIDLKTKIQKYKQSVQGAGTSYRNVLQAAIQKSLKDPSNNFRLHNGRSKEQRLKEQLGAQQEPVKKSIQESEAFLPQSIPEERYKMKSKPLGICLIIDCIGNETELLRDTFTSLGYEVQKFLHLSMHGISQILGQFACMPEHRDYDSFVCVLVSRGGSQSVYGVDQTHSGLPLHHIRRMFMGDSCPYLAGKPKMFFIQNYVVSEGQLEDSSLLEVDGPAMKNVEFKAQKRGLCTVHREADFFWSLCTADMSLLEQSHSSPSLYLQCLSQKLRQERKRPLLDLHIELNGYMYDWNSRVSAKEKYYVWLQHTLRKKLILSYT

SEQ ID NO: 859992 - protein, 235 aa, Homo sapiens; identical to SEQ ID NO: 859963

SEQ ID NO: 859993 - protein, 133 aa, Homo sapiens
MSAEVIHQVEEALDTDEKEMLLFLCRDVAIDVVPPNVRDLLDILRERGKLSVGDLAELLYRVRRFDLLKRILKMDRKAVETHLLRNPHLVSDYRVLMAEIGEDLDNTFREISTVTQEVEKKESEEAGYGGSRL

SEQ ID NO: 859994 - protein, 70 aa, Homo sapiens
QLEDSSLLEVDGPAMKNVEFKAQKRGLCTVHREADFFWSLCTADMSLLEQSHSSPSLYLQCLSQKLRQER

SEQ ID NO: 859995 - protein, 939 aa, Homo sapiens
RERGRGGARRPGRAEAARAPRPLRPLAAGWTHFAARPRESRDFGKSRGNPRAYNPHTTETGQSRLRSLQSSWRAKRAWSPRGRSGESGRQERSHPQPTLPASEPDPRRPWSVASARSLPRPPPAARSCLDQDLGLCERIAGPGEVLESTMAEQVLPQALYLSNMRKAVKIRERTPEDIFKPTNGIIHHFKTMHRYTLEMFRTCQFCPQFREIIHKALIDRNIQATLESQKKLNWCREVRKLVALKTNGDGNCLMHATSQYMWGVQDTDLVLRKALFSTLKETDTRNFKFRWQLESLKSQEFVETGLCYDTRNWNDEWDNLIKMASTDTPMARSGLQYNSLEEIHIFVLCNILRRPIIVISDKMLRSLESGSNFAPLKVGGIYLPLHWPAQECYRYPIVLGYDSHHFVPLVTLKDSGPEIRAVPLVNRDRGRFEDLKVHFLTDPENEMKEKLLKEYLMVIEIPVQGWDHGTTHLINAAKLDEANLPKEINLVDDYFELVQHEYKKWQENSEQGRREGHAQNPMEPSVPQLSLMDVKCETPNCPFFMSVNTQPLCHECSERRQKNQNKLPKLNSKPGPEGLPGMALGASRGEAYEPLAWNPEESTGGPHSAPPTAPSPFLFSETTAMKCRSPGCPFTLNVQHNGFCERCHNARQLHASHAPDHTRHLDPGKCQACLQDVTRTFNGICSTCFKRTTAEASSSLSTSLPPSCHQRSKSDPSRLVRSPSPHSCHRAGNDAPAGCLSQAARTPGDRTGTSKCRKAGCVYFGTPENKGFCTLCFIEYRENKHFAAASGKVSPTASRFQNTIPCLGRECGTLGSTMFEGYCQKCFIEAQNQRFHEAKRTEEQLRSSQRRDVPRTTQSTSRPKCARASCKNILACRSEELCMECQHPNQRMGPGAHRGEPAPEDPPKQRCRAPACDHFGNAKCNGYCNECFQFKQMYG

SEQ ID NO: 859996 - protein, 267 aa, Homo sapiens
RERGRGGARRPGRAEAARAPRPLRPLAAGWTHFAARPRESRDFGKSRGNPRAYNPHTTETGQSRLRSLQSSWRAKRAWSPRGRSGESGRQERSHPQPTLPASEPDPRRPWSVASARSLPRPPPAARSCLDQDLGLCERIAGPGEVTAAPPGEVLESTMAEQVLPQALYLSNMRKAVKIRERTPEDIFKPTNGIIHHFKTMHRYTLEMFRTCQFCPQFREIIHKALIDRNIQATLESQKKLNWCREVRKLVALKTNGKTCSVVFLLPG

SEQ ID NO: 859997 - protein, 1020 aa, Homo sapiens
RERGRGGARRPGRAEAARAPRPLRPLAAGWTHFAARPRESRDFGKSRGNPRAYNPHTTETGQSRLRSLQSSWRAKRAWSPRGRSGESGRQERSHPQPTLPASEPDPRRPWSVASARSLPRPPPAARSCLDQDLGLCERIAGPGEVTAAPPGEVTAAPPGEVTAAPPRAVCLGLHRSQGLRVHVGQRPPGWHRLPGVGFAALLDWEFVGRFCLGFEVLGVEVTAAEVLESTMAEQVLPQALYLSNMRKAVKIRERTPEDIFKPTNGIIHHFKTMHRYTLEMFRTCQFCPQFREIIHKALIDRNIQATLESQKKLNWCREVRKLVALKTNGDGNCLMHATSQYMWGVQDTDLVLRKALFSTLKETDTRNFKFRWQLESLKSQEFVETGLCYDTRNWNDEWDNLIKMASTDTPMARSGLQYNSLEEIHIFVLCNILRRPIIVISDKMLRSLESGSNFAPLKVGGIYLPLHWPAQECYRYPIVLGYDSHHFVPLVTLKDSGPEIRAVPLVNRDRGRFEDLKVHFLTDPENEMKEKLLKEYLMVIEIPVQGWDHGTTHLINAAKLDEANLPKEINLVDDYFELVQHEYKKWQENSEQGRREGHAQNPMEPSVPQLSLMDVKCETPNCPFFMSVNTQPLCHECSERRQKNQNKLPKLNSKPGPEGLPGMALGASRGEAYEPLAWNPEESTGGPHSAPPTAPSPFLFSETTAMKCRSPGCPFTLNVQHNGFCERCHNARQLHASHAPDHTRHLDPGKCQACLQDVTRTFNGICSTCFKRTTAEASSSLSTSLPPSCHQRSKSDPSRLVRSPSPHSCHRAGNDAPAGCLSQAARTPGDRTGTSKCRKAGCVYFGTPENKGFCTLCFIEYRENKHFAAASGKVSPTASRFQNTIPCLGRECGTLGSTMFEGYCQKCFIEAQNQRFHEAKRTEEQLRSSQRRDVPRTTQSTSRPKCARASCKNILACRSEELCMECQHPNQRMGPGAHRGEPAPEDPPKQRCRAPACDHFGNAKCNGYCNECFQFKQMYG

SEQ ID NO: 859998 - protein, 1073 aa, Homo sapiens
RERGRGGARRPGRAEAARAPRPLRPLAAGWTHFAARPRESRDFGKSRGNPRAYNPHTTETGQSRLRSLQSSWRAKRAWSPRGRSGESGRQERSHPQPTLPASEPDPRRPWSVASARSLPRPPPAARSCLDQDLGLCERIAGPGEVTAAPPGEVTAAPPGEVTAAPPRAVCLGLHRSQGLRVHVGQRPPGWHRLPGVGFAALLDWEFVGRFCLGFEVLGVEVTAAEVLESTMAEQVLPQALYLSNMRKAVKIRERTPEDIFKPTNGIIHHFKTMHRYTLEMFRTCQFCPQFREIIHKALIDRNIQATLESQKKLNWCREVRKLVALKTNGDGNCLMHATSQYMWGVQDTDLVLRKALFSTLKETDTRNFKFRWQLESLKSQEFVETGLCYDTRNWNDEWDNLIKMASTDTPMARSGLQYNSLEEIHIFVLCNILRRPIIVISGEMPADHGSVLKCFQPYALAPGENHTAKVQVTEFKEFDESHLRASFSFLFLCTDKMLRSLESGSNFAPLKVGGIYLPLHWPAQECYRYPIVLGYDSHHFVPLVTLKDSGPEIRAVPLVNRDRGRFEDLKVHFLTDPENEMKEKLLKEYLMVIEIPVQGWDHGTTHLINAAKLDEANLPKEINLVDDYFELVQHEYKKWQENSEQGRREGHAQNPMEPSVPQLSLMDVKCETPNCPFFMSVNTQPLCHECSERRQKNQNKLPKLNSKPGPEGLPGMALGASRGEAYEPLAWNPEESTGGPHSAPPTAPSPFLFSETTAMKCRSPGCPFTLNVQHNGFCERCHNARQLHASHAPDHTRHLDPGKCQACLQDVTRTFNGICSTCFKRTTAEASSSLSTSLPPSCHQRSKSDPSRLVRSPSPHSCHRAGNDAPAGCLSQAARTPGDRTGTSKCRKAGCVYFGTPENKGFCTLCFIEYRENKHFAAASGKVSPTASRFQNTIPCLGRECGTLGSTMFEGYCQKCFIEAQNQRFHEAKRTEEQLRSSQRRDVPRTTQSTSRPKCARASCKNILACRSEELCMECQHPNQRMGPGAHRGEPAPEDPPKQRCRAPACDHFGNAKCNGYCNECFQFKQMYG

SEQ ID NO: 859999 - protein, 1020 aa, Homo sapiens; identical to SEQ ID NO: 859997

SEQ ID NO: 860000 - protein, 227 aa, Homo sapiens
RERGRGGARRPGRAEAARAPRPLRPLAAGWTHFAARPRESRDFGKSRGNPRAYNPHTTETGQSRLRSLQSSWRAKRAWSPRGRSGESGRQERSHPQPTLPASEPDPRRPWSVASARSLPRPPPAARSCLDQDLGLCERIAGPGEVTAAPPGEVTAAPPGEVTAAPPRAVCLGLTAVKGCGCMLGSDPRAGTVYLALVLQRSWTGSLLDVSVWVLKCWELRSLLQRLE

SEQ ID NO: 860001 - protein, 1020 aa, Homo sapiens; identical to SEQ ID NO: 859997

SEQ ID NO: 860002 - protein, 1020 aa, Homo sapiens; identical to SEQ ID NO: 859997

SEQ ID NO: 860003 - protein, 1020 aa, Homo sapiens; identical to SEQ ID NO: 859997

SEQ ID NO: 860004 - protein, 102 aa, Homo sapiens [sequence omitted]

SEQ ID NO: 860005 - protein, 1522 aa, Homo sapiens
MMMARKQDVRIPTYNISVVGLSGTEKEKGQCGIGKSCLCNRFVRPSADEFHLDHTSVLSTSDFGGRVVNNDHFLYWGEVSRSLEDCVECKMHIVEQTEFIDDQTFQPHRSTALQPYIKRAAATKLASAEKLMYFCTDQLGLEQDFEQKQMPDGKLLVDGFLLGIDVSRGMNRNFDDQLKFVSNLYNQLAKTKKPIVVVLTKCDEGVERYIRDAHTFALSKKNLQVVETSARSNVNVDLAFSTLVQLIDKSRGKTKIIPYFEALKQQSQQIATAKDKYEWLVSRIVKNHNENWLSVSRKMQASPEYQDYVYLEGTQKAKKLFLQHIHRLKHEHIERRRKLYLAALPLAFEALIPNLDEIDHLSCIKAKKLLETKPEFLKWFVVLEETPWDATSHIDNMENERIPFDLMDTVPAEQLYEAHLEKLRNERKRVEMRRAFKENLETSPFITPGKPWEEARSFIMNEDFYQWLEESVYMDIYGKHQKQIIDKAKEEFQELLLEYSELFYELELDAKPSKEKMGVIQDVLGEEQRFKAIYKSSKQSVDALILKHIHFVYHPTKETCPSCPACVDAKIEHLISSRFIRPSDRNQKNSLSDPNIDRINLVILGKDALPESWPMEIRALCTNDDKYVIDGKMYELSLRPIEGNVRLPVNSFQTPTFQPHGCLCLYNSKESLSYVVESIEKSRESTLGRRDNHLVHLPLTLILVNKRGDTSGETLHSLIQQGQQIASKLQCVFLDPASAGIGYGRNINEKQISQVLKGLLDSKRNLNLVSSTASIKDLADVDLRIVMCLMCGDPFSADDILFPVLQSQTCKSSHCGSNNSVLLELPIGLHKKRIELSVLSYHSSFSIRKSRLVHGYIVFYSAKRKASLAMLRAFLCEVQDIIPIQLVALTDGAVDVLDNDLSREQLTEGEEIAQEIDGRFTSIPCSQPQHKLEIFHPFFKDVVEKKNIIEATHMYDNAAEACSTTEEVFNSPRAGSPLCNSNLQDSEEDIEPSYSLFREDTSLPSLSKDHSKLSMELEGNDGLSFIMSNFESKLNNKVPPPVKPKPPVHFEITKGDLSYLDQGHRDGQRKSVSSSPWLPQDGFDPSDYAEPMDAVVKPRNEEENIYSVPHDSTQGKIITIRNINKAQSNGSGNGSDSEMDTSSLERGRKVSIVSKPVLYRTRCTRLGRFASYRTSFSVGSDDELGPIRKKEEDQASQGYKGDNAVIPYETDEDPRRRNILRSLRRNTKKPKPKPRPSITKATWESNYFGVPLTTVVTPEKPIPIFIERCIEYIEATGLSTEGIYRVSGNKSEMESLQRQFDQDHNLDLAEKDFTVNTVAGAMKSFFSELPDPLVPYNMQIDLVEAHKINDREQKLHALKEVLKKFPKENHEVFKYVISHLNKVSHNNKVNLMTSENLSICFWPTLMRPDFSTMDALTATRTYQTIIELFIQQCPFFFYNRPITEPPGARPSSPSAVASTVPFLTSTPVTSQPSPPQSPPPTPQSPMQPLLPASSPPSHSTAFPKHSLANKGTLGEKMEKPFQ

SEQ ID NO: 860006 - protein, 1522 aa, Homo sapiens; identical to SEQ ID NO: 860005

SEQ ID NO: 860007 - protein, 1500 aa, Homo sapiens
MMMARKQDVRIPTYNISVVGLSGTEKEKGQCGIGKSCLCNRFVRPSADEFHLDHTSVLSTSDFGGRVVNNDHFLYWGEVSRSLEDCVECKMHIVEQTEFIDDQTFQPHRSTALQPYIKRAAATKLASAEKLMYFCTDQLGLEQDFEQKQMPDGKLLVDGFLLGIDVSRGMNRNFDDQLKFVSNLYNQLAKTKKPIVVVLTKCDEGVERYIRDAHTFALSKKNLQVVETSARSNVNVDLAFSTLVQLIDKSRGKTKIIPYFEALKQQSQQIATAKDKYEWLVSRIVKNHNENWLSVSRKMQASPEYQDYVYLEGTQKAKKLFLQHIHRLKHEHIERRRKLYLAALPLAFEALIPNLDEIDHLSCIKAKKLLETKPEFLKWFVVLEETPWDATSHIDNMENERIPFDLMDTVPAEQLYEAHLEKLRNERKRVEMRRAFKENLETSPFITPGKPWEEARSFIMNEDFYQWLEESVYMDIYGKHQKQIIDKAKEEFQELLLEYSELFYELELDAKPSKEKMGVIQDVLGEEQRFKAIYKSSKQSVDALILKHIHFVYHPTKETCPSCPACVDAKIEHLISSRFIRPSDRNQKNSLSDPNIDRINLVILGKDALPESWPMEIRALCTNDDKYVIDGKMYELSLRPIEGNVRLPVNSFQTPTFQPHGCLCLYNSKESLSYVVESIEKSRESTLGRRDNHLVHLPLTLILVNKRGDTSGETLHSLIQQGQQIASKLQCVFLDPASAGIGYGRNINEKQISQVLKGLLDSKRNLNLVSSTASIKDLADVDLRIVMCLMCGDPFSADDILFPVLQSQTCKSSHCGSNNSVLLELPIGLHKKRIELSVLSYHSSFSIRKSRLVHGYIVFYSAKRKASLAMLRAFLCEVQDIIPIQLVALTDGAVDVLDNDLSREQLTEGEEIAQEIDGRFTSIPCSQPQHKLEIFHPFFKDVVEKKNIIEATHMYDNAAEACSTTEEVFNSPRAGSPLCNSNLQDSEEDIEPSYSLFREDTSLPSLSKDHSKLSMELEGNDGLSFIMSNFESKLNNKVPPPVKPKPPVHFEITKGDLSYLDQGHRDGQRKSVSSSPWLPQDGFDPSDYAEPMDAVVKPRNEEENIYSVPHDSTQGKIITIRNINKAQSNGSGNGSDSEMDTSSLERGRKVSIVSKPVLYRTRCTRLGRFASYRTSFSVGSDDELGPIRKKEEDQASQGYKGDNAVIPYETDEDPRRRNILRSLRRNTKKPKPKPRPSITKATWESNYFGVPLTTVVTPEKPIPIFIERCIEYIEATGLSTEGIYRVSGNKSEMESLQRQFDQDHNLDLAEKDFTVNTVAGAMKSFFSELPDPLVPYNMQIDLVEAHKINDREQKLHALKEVLKKFPKENHEVFKYVISHLNKVSHNNKVNLMTSENLSICFWPTLMRPDFSTMDALTATRTYQTIIELFIQQCPFFFYNRPITEPPGARPSSPSAVASTVPFLTSTPVTSQPSPPQSPPPTPQSPMQPLLPSQLQAEHTL

SEQ ID NO: 860008 - protein, 1500 aa, Homo sapiens; identical to SEQ ID NO: 860007

SEQ ID NO: 860009 - protein, 1516 aa, Homo sapiens
MMMARKQDVRIPTYNISVVGLSGTEKEKGQCGIGKSCLCNRFVRPSADEFHLDHTSVLSTSDFGGRVVNNDHFLYWGEVSRSLEDCVECKMHIVEQTEFIDDQTFQPHRSTALQPYIKRAAATKLASAEKLMYFCTDQLGLEQDFEQKQMPDGKLLVDGFLLGIDVSRGMNRNFDDQLKFVSNLYNQLAKTKKPIVVVLTKCDEGVERYIRDAHTFALSKKNLQVVETSARSNVNVDLAFSTLVQLIDKSRGKTKIIPYFEALKQQSQQIATAKDKYEWLVSRIVKNHNENWLSVSRKMQASPEYQDYVYLEGTQKAKKLFLQHIHRLKHEHIERRRKLYLAALPLAFEALIPNLDEIDHLSCIKAKKLLETKPEFLKWFVVLEETPWDATSHIDNMENERIPFDLMDTVPAEQLYEAHLEKLRNERKRVEMRRAFKENLETSPFITPGKPWEEARSFIMNEDFYQWLEESVYMDIYGKHQKQIIDKAKEEFQELLLEYSELFYELELDAKPSKEKMGVIQDVLGEEQRFKAIYKSSKQSVDALILKHIHFVYHPTKETCPSCPACVDAKIEHLISSRFIRPSDRNQKNSLSDPNIDRINLVILGKDALPESWPMEIRALCTNDDKYVIDGKMYELSLRPIEGNVRLPVNSFQTPTFQPHGCLCLYNSKESLSYVVESIEKSRESTLGRRDNHLVHLPLTLILVNKRGDTSGETLHSLIQQGQQIASKLQCVFLDPASAGIGYGRNINEKQISQVLKGLLDSKRNLNLVSSTASIKDLADVDLRIVMCLMCGDPFSADDILFPVLQSQTCKSSHCGSNNSVLLELPIGLHKKRIELSVLSYHSSFSIRKSRLVHGYIVFYSAKRKASLAMLRAFLCEVQDIIPIQLVALTDGAVDVLDNDLSREQLTEGEEIAQEIDGRFTSIPCSQPQHKLEIFHPFFKDVVEKKNIIEATHMYDNAAEACSTTEEVFNSPRAGSPLCNSNLQDSEEDIEPSYSLFREDTSLPSLSKDHSKLSMELEGNDGLSFIMSNFESKLNNKVPPPVKPKPPVHFEITKGDLSYLDQGHRDGQRKSVSSSPWLPQDGFDPSDYAEPMDAVVKPRNEEENIYSVPHDSTQGKIITIRNINKAQSNGSGNGSDSEMDTSSLERGRKVSIVSKPVLYRTRCTRLGRFASYRTSFSVGSDDELGPIRKKEEDQASQGYKGDNAVIPYETDEDPRRRNILRSLRRNTKKPKPKPRPSITKATWESNYFGVPLTTVVTPEKPIPIFIERCIEYIEATGLSTEGIYRVSGNKSEMESLQRQFDQDHNLDLAEKDFTVNTVAGAMKSFFSELPDPLVPYNMQIDLVEAHKINDREQKLHALKEVLKKFPKENHEVFKYVISHLNKVSHNNKVNLMTSENLSICFWPTLMRPDFSTMDALTATRTYQTIIELFIQQCPFFFYNRPITEPPGARPSSPSAVASTVPFLTSTPVTSQPSPPQSPPPTPQSPMQPLPADLGWPPPALPWRSRQRCYRPKLLFA

SEQ ID NO: 860010 - protein, 240 aa, Homo sapiens
AVGARKPQAHSAALQRGPGTQRWARPLGQCHCQVCQPWAQALGERVGLVSSKSPGLSSEKAHHRARPGVATSLGHERQGFGFLSPPEINDREQKLHALKEVLKKFPKENHEVFKYVISHLNKVSHNNKVNLMTSENLSICFWPTLMRPDFSTMDALTATRTYQTIIELFIQQCPFFFYNRPITEPPGARPSSPSAVASTVPFLTSTPVTSQPSPPQSPPPTPQSPMQPLLPSQLQAEHTL

SEQ ID NO: 860011 - protein, 175 aa, Homo sapiens
RWGPGSPRHTVPPFSGGLGHREINDREQKLHALKEVLKKFPKENHEVFKYVISHLNKVSHNNKVNLMTSENLSICFWPTLMRPDFSTMDALTATRTYQTIIELFIQQCPFFFYNRPITEPPGARPSSPSAVASTVPFLTSTPVTSQPSPPQSPPPTPQSPMQPLLPSQLQAEHTL

SEQ ID NO: 860012 - protein, 1374 aa, Homo sapiens
MMMARKQDVRIPTYNISVVGLSGTEKEKGQCGIGKSCLCNRFVRPSADEFHLDHTSVLSTSDFGGRVVNNDHFLYWGEVSRSLEDCVECKMHIVEQTEFIDDQTFQPHRSTALQPYIKRAAATKLASAEKLMYFCTDQLGLEQDFEQKQMPDGKLLVDGFLLGIDVSRGMNRNFDDQLKFVSNLYNQLAKTKKPIVVVLTKCDEGVERYIRDAHTFALSKKNLQVVETSARSNVNVDLAFSTLVQLIDKSRGKTKIIPYFEALKQQSQQIATAKDKYEWLVSRIVKNHNENWLSVSRKMQASPEYQDYVYLEGTQKAKKLFLQHIHRLKHEHIERRRKLYLAALPLAFEALIPNLDEIDHLSCIKAKKLLETKPEFLKWFVVLEETPWDATSHIDNMENERIPFDLMDTVPAEQLYEAHLEKLRNERKRVEMRRAFKENLETSPFITPGKPWEEARSFIMNEDFYQWLEESVYMDIYGKHQKQIIDKAKEEFQELLLEYSELFYELELDAKPSKEKMGVIQDVLGEEQRFKAIYKSSKQSVDALILKHIHFVYHPTKETCPSCPACVDAKIEHLISSRFIRPSDRNQKNSLSDPNIDRINLVILGKDALPESWPMEIRALCTNDDKYVIDGKMYELSLRPIEGNVRLPVNSFQTPTFQPHGCLCLYNSKESLSYVVESIEKSRESTLGRRDNHLVHLPLTLILVNKRGDTSGETLHSLIQQGQQIASKLQCVFLDPASAGIGYGRNINEKQISQVLKGLLDSKRNLNLVSSTASIKDLADVDLRIVMCLMCGDPFSADDILFPVLQSQTCKSSHCGSNNSVLLELPIGLHKKRIELSVLSYHSSFSIRKSRLVHGYIVFYSAKRKASLAMLRAFLCEVQDIIPIQLVALTDGAVDVLDNDLSREQLTEGEEIAQEIDGRFTSIPCSQPQHKLEIFHPFFKDVVEKKNIIEATHMYDNAAEACSTTEEVFNSPRAGSPLCNSNLQDSEEDIEPSYSLFREDTSLPSLSKDHSKLSMELEGNDGLSFIMSNFESKLNNKVPPPVKPKPPVHFEITKGDLSYLDQGHRDGQRKSVSSSPWLPQDGFDPSDYAEPMDAVVKPRNEEENIYSVPHDSTQGKIITIRNINKAQSNGSGNGSDSEMDTSSLERGRKVSIVSKPVLYRTRCTRLGRFASYRTSFSVGSDDELGPIRKKEEDQASQGYKGDNAVIPYETDEDPRRRNILRSLRRNTKKPKPKPRPSITKATWESNYFGVPLTTVVTPEKPIPIFIERCIEYIEATGLSTEGIYRVSGNKSEMESLQRQFDQDHNLDLAEKDFTVNTVAGAMKSFFSELPDPLVPYNMQIDLVEAHKINDREQKLHARHVWIASWQSTHGWLEE

SEQ ID NO: 860013 - protein, 1282 aa, Homo sapiens
MMMARKQDVRIPTYNISVVGLSGTEKEKGQCGIGKSCLCNRFVRPSADEFHLDHTSVLSTSDFGGRVVNNDHFLYWGEVSRSLEDCVECKMHIVEQTEFIDDQTFQPHRSTALQPYIKRAAATKLASAEKLMYFCTDQLGLEQDFEQKQMPDGKLLVDGFLLGIDVSRGMNRNFDDQLKFVSNLYNQLAKTKKPIVVVLTKCDEGVERYIRDAHTFALSKKNLQVVETSARSNVNVDLAFSTLVQLIDKSRGKTKIIPYFEALKQQSQQIATAKDKYEWLVSRIVKNHNENWLSVSRKMQASPEYQDYVYLEGTQKAKKLFLQHIHRLKHEHIERRRKLYLAALPLAFEALIPNLDEIDHLSCIKAKKLLETKPEFLKWFVVLEETPWDATSHIDNMENERIPFDLMDTVPAEQLYEAHLEKLRNERKRVEMRRAFKENLETSPFITPGKPWEEARSFIMNEDFYQWLEESVYMDIYGKHQKQIIDKAKEEFQELLLEYSELFYELELDAKPSKEKMGVIQDVLGEEQRFKAIYKSSKQSVDALILKHIHFVYHPTKETCPSCPACVDAKIEHLISSRFIRPSDRNQKNSLSDPNIDRINLVILGKDALPESWPMEIRALCTNDDKYVIDGKMYELSLRPIEGNVRLPVNSFQTPTFQPHGCLCLYNSKESLSYVVESIEKSRESTLGRRDNHLVHLPLTLILVNKRGDTSGETLHSLIQQGQQIASKLQCVFLDPASAGIGYGRNINEKQISQVLKGLLDSKRNLNLVSSTASIKDLADVDLRIVMCLMCGDPFSADDILFPVLQSQTCKSSHCGSNNSVLLELPIGLHKKRIELSVLSYHSSFSIRKSRLVHGYIVFYSAKRKASLAMLRAFLCEVQDIIPIQLVALTDGAVDVLDNDLSREQLTEGEEIAQEIDGRFTSIPCSQPQHKLEIFHPFFKDVVEKKNIIEATHMYDNAAEACSTTEEVFNSPRAGSPLCNSNLQDSEEDIEPSYSLFREDTSLPSLSKDHSKLSMELEGNDGLSFIMSNFESKLNNKVPPPVKPKPPVHFEITKGDLSYLDQGHRDGQRKSVSSSPWLPQDGFDPSDYAEPMDAVVKPRNEEENIYSVPHDSTQGKIITIRNINKAQSNGSGNGSDSEMDTSSLERGRKVSIVSKPVLYRTRCTRLGRFASYRTSFSVGSDDELGPIRKKEEDQASQGYKGDNAVIPYETDEDPRRRNILRSLRRNTKKPKPKPRPSITKATWESNYFGVPLTTVVTPEKPIPIFIERCIEYIEATGKSITS

SEQ ID NO: 860014 - protein, 191 aa, Homo sapiens
RWGPGSPRHTVPPFSGGLGHREINDREQKLHALKEVLKKFPKENHEVFKYVISHLNKVSHNNKVNLMTSENLSICFWPTLMRPDFSTMDALTATRTYQTIIELFIQQCPFFFYNRPITEPPGARPSSPSAVASTVPFLTSTPVTSQPSPPQSPPPTPQSPMQPLPADLGWPPPALPWRSRQRCYRPKLLFA

SEQ ID NO: 860015 - protein, 1500 aa, Homo sapiens; identical to SEQ ID NO: 860007

SEQ ID NO: 860016 - protein, 1500 aa, Homo sapiens; identical to SEQ ID NO: 860007

SEQ ID NO: 860017 - protein, 1522 aa, Homo sapiens; identical to SEQ ID NO: 860005

SEQ ID NO: 860018 - protein, 1492 aa, Homo sapiens
MMMARKQDVRIPTYNISVVGLSGTEKEKGQCGIGKSCLCNRFVRPSADEFHLDHTSVLSTSDFGGRVVNNDHFLYWGEVSRSLEDCVECKMHIVEQTEFIDDQTFQPHRSTALQPYIKRAAATKLASAEKLMYFCTDQLGLEQDFEQKQMPDGKLLVDGFLLGIDVSRGMNRNFDDQLKFVSNLYNQLAKTKKPIVVVLTKCDEGVERYIRDAHTFALSKKNLQVVETSARSNVNVDLAFSTLVQLIDKSRGKTKIIPYFEALKQQSQQIATAKDKYEWLVSRIVKNHNENWLSVSRKMQASPEYQDYVYLEGTQKAKKLFLQHIHRLKHEHIERRRKLYLAALPLAFEALIPNLDEIDHLSCIKAKKLLETKPEFLKWFVVLEETPWDATSHIDNMENERIPFDLMDTVPAEQLYEAHLEKLRNERKRVEMRRAFKENLETSPFITPGKPWEEARSFIMNEDFYQWLEESVYMDIYGKHQKQIIDKAKEEFQELLLEYSELFYELELDAKPSKEKMGVIQDVLGEEQRFKAIYKSSKQSVDALILKHIHFVYHPTKETCPSCPACVDAKIEHLISSRFIRPSDRNQKNSLSDPNIDRINLVILGKDALPESWPMEIRALCTNDDKYVIDGKMYELSLRPIEGNVRLPVNSFQTPTFQPHGCLCLYNSKESLSYVVESIEKSRESTLGRRDNHLVHLPLTLILVNKRGDTSGETLHSLIQQGQQIASKLQCVFLDPASAGIGYGRNINEKQISQVLKGLLDSKRNLNLVSSTASIKDLADVDLRIVMCLMCGDPFSADDILFPVLQSQTCKSSHCGSNNSVLLELPIGLHKKRIELSVLSYHSSFSIRKSRLVHGYIASLAMLRAFLCEVQDIIPIQLVALTDGAVDVLDNDLSREQLTEGEEIAQEIDGRFTSIPCSQPQHKLEIFHPFFKDVVEKKNIIEATHMYDNAAEACSTTEEVFNSPRAGSPLCNSNLQDSEEDIEPSYSLFREDTSLPSLSKDHSKLSMELEGNDGLSFIMSNFESKLNNKVPPPVKPKPPVHFEITKGDLSYLDQGHRDGQRKSVSSSPWLPQDGFDPSDYAEPMDAVVKPRNEEENIYSVPHDSTQGKIITIRNINKAQSNGSGNGSDSEMDTSSLERGRKVSIVSKPVLYRTRCTRLGRFASYRTSFSVGSDDELGPIRKKEEDQASQGYKGDNAVIPYETDEDPRRRNILRSLRRNTKKPKPKPRPSITKATWESNYFGVPLTTVVTPEKPIPIFIERCIEYIEATGLSTEGIYRVSGNKSEMESLQRQFDQDHNLDLAEKDFTVNTVAGAMKSFFSELPDPLVPYNMQIDLVEAHKINDREQKLHALKEVLKKFPKENHEVFKYVISHLNKVSHNNKVNLMTSENLSICFWPTLMRPDFSTMDALTATRTYQTIIELFIQQCPFFFYNRPITEPPGARPSSPSAVASTVPFLTSTPVTSQPSPPQSPPPTPQSPMQPLLPSQLQAEHTL

SEQ ID NO: 860019 - protein, 1500 aa, Homo sapiens; identical to SEQ ID NO: 860007

SEQ ID NO: 860020 - protein, 1483 aa, Homo sapiens
MMMARKQDVRIPTYNISVVGLSGTEKEKGQCGIGKSCLCNRFVRPSADEFHLDHTSVLSTSDFGGRVVNNDHFLYWGEVSRSLEDCVECKMHIVEQTEFIDDQTFQPHRSTALQPYIKRAAATKLASAEKLMYFCTDQLGLEQDFEQKQMPDGKLLVDGFLLGIDVSRGMNRNFDDQLKFVSNLYNQLAKTKKPIVVVLTKCDEGVERYIRDAHTFALSKKNLQVVETSARSNVNVDLAFSTLVQLIDKSRGKTKIIPYFEALKQQSQQIATAKDKYEWLVSRIVKNHNENWLSVSRKMQASPEYQDYVYLEGTQKAKKLFLQHIHRLKHEHIERRRKLYLAALPLAFEALIPNLDEIDHLSCIKAKKLLETKPEFLKWFVVLEETPWDATSHIDNMENERIPFDLMDTVPAEQLYEAHLEKLRNERKRVEMRRAFKENLETSPFITPGKPWEEARSFIMNEDFYQWLEESVYMDIYGKHQKQIIDKAKEEFQELLLEYSELFYELELDAKPSKEKMGVIQDVLGEEQRFKAIYKSSKQSVDALILKHIHFVYHPTKETCPSCPACVDAKIEHLISSRFIRPSDRNQKNSLSDPNIDRINLVILGKDALPESWPMEIRALCTNDDKYVIDGKMYELSLRPIEGNVRLPVNSFQTPTFQPHGCLCLYNSKESLSYVVESIEKSRESTLGRRDNHLVHLPLTLILVNKRGDTSGETLHSLIQQGQQIASKLQCVFLDPASAGIGYGRNINEKQISQVLKGLLDSKRNLNLVSSTASIKDLADVDLRIVMCLMCGDPFSADDILFPVLQSQTCKSSHCGSNNSVLLELPIGLHKKRIELSVLSYHSSFSIRKSRLVHGYIVFYSAKRKASLAMLRAFLCEVQDIIPIQLVALTDGAVDVLDNDLSREQLTEGEEIAQEIDGRFTSIPCSQPQHKLEIFHPFFKDVVEKKNIIEATHMYDNAAEACSTTEEVFNSPRAGSPLCNSNLQDSEEDIEPSYSLFREDTSLPSLSKDHSKLSMELEGNDGLSFIMSNFESKLNNKVPPPVKPKPPVHFEITKGDLSYLDQGHRDGQRKSVSSSPWLPQDGFDPSDYAEPMDAVVKPRNEEENIYSVPHDSTQGKIITIRNINKAQSNGSGNGSDSEMDTSSLERGRKVSIVSKPVLYRTRCTRLGRFASYRTSFSVGSDDELGPIRKKEEDQASQGYKGDNAVIPYETDEDPRRRNILRSLRRNTKKPKPKPRPSITKATWESNYFGVPLTTVVTPEKPIPIFIERCIEYIEATGLSTEGIYRVSGNKSEMESLQRQFDQDHNLDLAEKDFTVNTVAGAMKSFFSELPDPLVPYNMQIDLVEAHKINDREQKLHALKEVLKKFPKENHEVFKYVISHLNKVSHNNKVNLMTSENLSICFWPTLMRPDFSTMDALTATRTYQTIIELFIQQCPFFFYNRPITEPPGARPSSPSAVASTVPFLTSTPVTSQPSAPAARGAGSG

SEQ ID NO: 860021 - protein, 1455 aa, Homo sapiens
MMMARKQDVRIPTYNISVVGLSGTEKEKGQCGIGKSCLCNRFVRPSADEFHLDHTSVLSTSDFGGRVVNNDHFLYWGEVSRSLEDCVECKMHIVEQTEFIDDQTFQPHRSTALQPYIKRAAATKLASAEKLMYFCTDQLGLEQDFEQKQMPDGKLLVDGFLLGIDVSRGMNRNFDDQLKFVSNLYNQLAKTKKPIVVVLTKCDEGVERYIRDAHTFALSKKNLQVVETSARSNVNVDLAFSTLVQLIDKSRGKTKIIPYFEALKQQSQQIATAKDKYEWLVSRIVKNHNENWLSVSRKMQASPEYQDYVYLEGTQKAKKLFLQHIHRLKHEHIERRRKLYLAALPLAFEALIPNLDEIDHLSCIKAKKLLETKPEFLKWFVVLEETPWDATSHIDNMENERIPFDLMDTVPAEQLYEAHLEKLRNERKRVEMRRAFKENLETSPFITPGKPWEEARSFIMNEDFYQWLEESVYMDIYGKHQKQIIDKAKEEFQELLLEYSELFYELELDAKPSKEKMGVIQDVLGEEQRFKAIYKSSKQSVDALILKHIHFVYHPTKETCPSCPACVDAKIEHLISSRFIRPSDRNQKNSLSDPNIDRINLVILGKDALPESWPMEIRALCTNDDKYVIDGKMYELSLRPIEGNVRLPVNSFQTPTFQPHGCLCLYNSKESLSYVVESIEKSRESTLGRRDNHLVHLPLTLILVNKRGDTSGETLHSLIQQGQQIASKLQCVFLDPASAGIGYGRNINEKQISQVLKGLLDSKRNLNLVSSTASIKDLADVDLRIVMCLMCGDPFSADDILFPVLQSQTCKSSHCGSNNSVLLELPIGLHKKRIELSVLSYHSSFSIRKSRLVHGYIVFYSAKRKASLAMLRAFLCEVQDIIPIQLVALTDGAVDVLDNDLSREQLTEGEEIAQEIDGRFTSIPCSQPQHKLEIFHPFFKDVVEKKNIIEATHMYDNAAEACSTTEEVFNSPRAGSPLCNSNLQDSEEDIEPSYSLFREDTSLPSLSKDHSKLSMELEGNDGLSFIMSNFESKLNNKVPPPVKPKPPVHFEITKGDLSYLDQGHRDGQRKSVSSSPWLPQDGFDPSDYAEPMDAVVKPRNEEENIYSVPHDSTQGKIITIRNINKAQSNGSGNGSDSEMDTSSLERGRKVSIVSKPVLYRTRCTRLGRFASYRTSFSVGSDDELGPIRKKEEDQASQGYKGDNAVIPYETDEDPRRRNILRSLRRNTKKPKPKPRPSITKATWESNYFGVPLTTVVTPEKPIPIFIERCIEYIEATGLSTEGIYRVSGNKSEMESLQRQFDQDHNLDLAEKDFTVNTVAGAMKSFFSELPDPLVPYNMQIDLVEAHKINDREQKLHALKEVLKKFPKENHEVFKYVISHLNKVSHNNKVNLMTSENLSICFWPTLMRPDFSTMDALTATRTYQTIIELFIQQCSVANARRARGTEQEAVCHLGHC

SEQ ID NO: 860022 - protein, 1350 aa, Homo sapiens
MMMARKQDVRIPTYNISVVGLSGTEKEKGQCGIGKSCLCNRFVRPSADEFHLDHTSVLSTSDFGGRVVNNDHFLYWGEVSRSLEDCVECKMHIVEQTEFIDDQTFQPHRSTALQPYIKRAAATKLASAEKLMYFCTDQLGLEQDFEQKQMPDGKLLVDGFLLGIDVSRGMNRNFDDQLKFVSNLYNQLAKTKKPIVVVLTKCDEGVERYIRDAHTFALSKKNLQVVETSARSNVNVDLAFSTLVQLIDKSRGKTKIIPYFEALKQQSQQIATAKDKYEWLVSRIVKNHNENWLSVSRKMQASPEYQDYVYLEGTQKAKKLFLQHIHRLKHEHIERRRKLYLAALPLAFEALIPNLDEIDHLSCIKAKKLLETKPEFLKWFVVLEETPWDATSHIDNMENERIPFDLMDTVPAEQLYEAHLEKLRNERKRVEMRRAFKENLETSPFITPGKPWEEARSFIMNEDFYQWLEESVYMDIYGKHQKQIIDKAKEEFQELLLEYSELFYELELDAKPSKEKMGVIQDVLGEEQRFKAIYKSSKQSVDALILKHIHFVYHPTKETCPSCPACVDAKIEHLISSRFIRPSDRNQKNSLSDPNIDRINLVILGKDALPESWPMEIRALCTNDDKYVIDGKMYELSLRPIEGNVRLPVNSFQTPTFQPHGCLCLYNSKESLSYVVESIEKSRESTLGRRDNHLVHLPLTLILVNKRGDTSGETLHSLIQQGQQIASKLQCVFLDPASAGIGYGRNINEKQISQVLKGLLDSKRNLNLVSSTASIKDLADVDLRIVMCLMCGDPFSADDILFPVLQSQTCKSSHCGSNNSVLLELPIGLHKKRIELSVLSYHSSFSIRKSRLVHGYIVFYSAKRKASLAMLRAFLCEVQDIIPIQLVALTDGAVDVLDNDLSREQLTEGEEIAQEIDGRFTSIPCSQPQHKLEIFHPFFKDVVEKKNIIEATHMYDNAAEACSTTEEVFNSPRAGSPLCNSNLQDSEEDIEPSYSLFREDTSLPSLSKDHSKLSMELEGNDGLSFIMSNFESKLNNKVPPPVKPKPPVHFEITKGDLSYLDQGHRDGQRKSVSSSPWLPQDGFDPSDYAEPMDAVVKPRNEEENIYSVPHDSTQGKIITIRNINKAQSNGSGNGSDSEMDTSSLERGRKVSIVSKPVLYRTRCTRLGRFASYRTSFSVGSDDELGPIRKKEEDQASQGYKGDNAVIPYETDEDPRRRNILRSLRRNTKKPKPKPRPSITKATWESNYFGVPLTTVVTPEKPIPIFIERCIEYIEATGLSTEGIYRVSGNKSEMESLQRQFDQDHNLDLAEKDFTVNTVAGAMKSFFSELPDPLVPYNMQIDLVEAHSVTE

SEQ ID NO: 860023 - protein, 180 aa, Homo sapiens
MRGARSSERSAGGGAVPRAAGARAPWGPRNHNEDLGHLSADAPWPAVTMAPRKRSHHGLGFLCCFGGSDIPEINLRDNHPLQFMEFSSPIPNAEELNIRFAELVDELDLTDKNREAMFALPPEKKWQIYCSKKKVPSLTPLATSQGSWHGVALAALACSCIHLMFITCQPCSRCWRNNSE

SEQ ID NO: 860024 - protein, 101 aa, Homo sapiens
EVALAGRVRGGLGNPHLNFHLTCWLQKELGSTEDIYLASRKVKELSVIDGRRAQNCIILLSKLKLSNEEIRQAILKMDEQEDLAKDMLEQLLKFIQRVRGV

SEQ ID NO: 860025 - protein, 1180 aa, Homo sapiens
MAPRKRSHHGLGFLCCFGGSDIPEINLRDNHPLQFMEFSSPIPNAEELNIRFAELVDELDLTDKNREAMFALPPEKKWQIYCSKKKVPSLTPLATSQGSWHGVALAALACSCIHLMFITCQPVLGVGGTTVNKIEKGNSAVLELTLKEIGFSFSKRLKQDLLHPRTGACWETDKEAESGLSRACSQAWREQEDPNKLATSWPDYYIDRINSMAAMQSLYAFDEEETEMRNQVVEDLKTALRTQPMRFVTRFIELEGLTCLLNFLRSMDHATCESRIHTSLIGCIKALMNNSQGRAHVLAQPEAISTIAQSLRTENSKTKVAVLEILGAVCLVPGGHKKVLQAMLHYQVYAAERTRFQTLLNELDRSLGRYRDEVNLKTAIMSFINAVLNAGAGEDNLEFRLHLRYEFLMLGIQPVIDKLRQHENAILDKHLDFFEMVRNEDDLELARRFDMVHIDTKSASQMFELIHKKLKYTEAYPCLLSVLHHCLQMPYKRNGGYFQQWQLLDRILQQIVLQDERGVDPDLAPLENFNVKNIVNMLINENEVKQWRDQAEKFRKEHMELVSRLERKERECETKTLEKEEMMRTLNKMKDKLARESQELRQARGQVAELVAQLSELSTGPVSSPPPPGGPLTLSSSMTTNDLPPPPPPLPFACCPPPPPPPLPPGGPPTPPGAPPCLGMGLPLPQDPYPSSDVPLRKKRVPQPSHPLKSFNWVKLNEERVPGTVWNEIDDMQVFRILDLEDFEKMFSAYQRHQELITNPSQQKELGSTEDIYLASRKVKELSVIDGRRAQNCIILLSKLKLSNEEIRQAILKMDEQEDLAKDMLEQLLKFIPEKSDIDLLEEHKHEIERMARADRFLYEMSRIDHYQQRLQALFFKKKFQERLAEAKPKVEAILLASRELVRSKRLRQMLEVILAIGNFMNKGQRGGAYGFRVASLNKIADTKSSIDRNISLLHYLIMILEKHFPDILNMPSELQHLPEAAKVNLAELEKEVGNLRRGLRAVEVELEYQRRQVREPSDKFVPVMSDFITVSSFSFSELEDQLNEARDKFAKALMHFGEHDSKMQPDEFFGIFDTFLQAFSEARQDLEAMRRRKEEEERRARMEAMLKEQRERERWQRQRKVLAAGSSLEEGGEFDDLVSALRSGEVFDKDLCKLKRSRKRSGSQALEVTRERAINRLNY

SEQ ID NO: 860026 - protein, 1077 aa, Homo sapiens
MAPRKRSHHGLGFLCCFGGSDIPEINLRDNHPLQFMEFSSPIPNAEELNIRFAELVDELDLTDKNREAMFALPPEKKWQIYCSKKKEQEDPNKLATSWPDYYIDRINSMAAMQSLYAFDEEETEMRNQVVEDLKTALRTQPMRFVTRFIELEGLTCLLNFLRSMDHATCESRIHTSLIGCIKALMNNSQGRAHVLAQPEAISTIAQSLRTENSKTKVAVLEILGAVCLVPGGHKKVLQAMLHYQVYAAERTRFQTLLNELDRSLGRYRDEVNLKTAIMSFINAVLNAGAGEDNLEFRLHLRYEFLMLGIQPVIDKLRQHENAILDKHLDFFEMVRNEDDLELARRFDMVHIDTKSASQMFELIHKKLKYTEAYPCLLSVLHHCLQMPYKRNGGYFQQWQLLDRILQQIVLQDERGVDPDLAPLENFNVKNIVNMLINENEVKQWRDQAEKFRKEHMELVSRLERKERECETKTLEKEEMMRTLNKMKDKLARESQELRQARGQVAELVAQLSELSTGPVSSPPPPGGPLTLSSSMTTNDLPPPPPPLPFACCPPPPPPPLPPGGPPTPPGAPPCLGMGLPLPQDPYPSSDVPLRKKRVPQPSHPLKSFNWVKLNEERVPGTVWNEIDDMQVFRILDLEDFEKMFSAYQRHQELITNPSQQKELGSTEDIYLASRKVKELSVIDGRRAQNCIILLSKLKLSNEEIRQAILKMDEQEDLAKDMLEQLLKFIPEKSDIDLLEEHKHEIERMARADRFLYEMSRIDHYQQRLQALFFKKKFQERLAEAKPKVEAILLASRELVRSKRLRQMLEVILAIGNFMNKGQRGGAYGFRVASLNKIADTKSSIDRNISLLHYLIMILEKHFPDILNMPSELQHLPEAAKVNLAELEKEVGNLRRGLRAVEVELEYQRRQVREPSDKFVPVMSDFITVSSFSFSELEDQLNEARDKFAKALMHFGEHDSKMQPDEFFGIFDTFLQAFSEARQDLEAMRRRKEEEERRARMEAMLKEQRERERWQRQRKVLAAGSSLEEGGEFDDLVSALRSGEVFDKDLCKLKRSRKRSGSQALEVTRERAINRLNY

SEQ ID NO: 860027 - protein, 1180 aa, Homo sapiens; identical to SEQ ID NO: 860025

SEQ ID NO: 860028 - protein, 1171 aa, Homo sapiens
MAPRKRSHHGLGFLCCFGGSDIPEINLRDNHPLQFMEFSSPIPNAEELNIRFAELVDELDLTDKNREAMFALPPEKKWQIYCSKKKVPSLTPLATSQGSWHGVALAALACSCIHLMFITCQPVLGVGGTTVNKIEKGNSAVLELTLKEIGFSFSKRLKQDLLHPRTGACWETDKEAESGLSRACSQAWREQEDPNKLATSWPDYYIDRINSMAAMQSLYAFDEEETEMRNQVVEDLKTALRTQPMRFVTRFIELEGLTCLLNFLRSMDHATCESRIHTSLIGCIKALMNNSQGRAHVLAQPEAISTIAQSLRTENSKTKVAVLEILGAVCLVPGGHKKVLQAMLHYQVYAAERTRFQTLLNELDRSLGRYRDEVNLKTAIMSFINAVLNAGAGEDNLEFRLHLRYEFLMLGIQPVIDKLRQHENAILDKHLDFFEMVRNEDDLELARRFDMVHIDTKSASQMFELIHKKLKYTEAYPCLLSVLHHCLQMPYKRNGGYFQQWQLLDRILQQIVLQDERGVDPDLAPLENFNVKNIVNMLINENEVKQWRDQAEKFRKEHMELVSRLERKERECETKTLEKEEMMRTLNKMKDKLARESQELRQARGQVAELVAQLSELSTGPVSSPPPPGGPLTLSSSMTTNDLPPPPPPLPFACCPPPPPPPLPPGGPPTPPGAPPCLGMGLPLPQDPYPSSDVPLRKKRVPQPSHPLKSFNWVKLNEERVPGTVWNEIDDMQVFRILDLEDFEKMFSAYQRHQKELGSTEDIYLASRKVKELSVIDGRRAQNCIILLSKLKLSNEEIRQAILKMDEQEDLAKDMLEQLLKFIPEKSDIDLLEEHKHEIERMARADRFLYEMSRIDHYQQRLQALFFKKKFQERLAEAKPKVEAILLASRELVRSKRLRQMLEVILAIGNFMNKGQRGGAYGFRVASLNKIADTKSSIDRNISLLHYLIMILEKHFPDILNMPSELQHLPEAAKVNLAELEKEVGNLRRGLRAVEVELEYQRRQVREPSDKFVPVMSDFITVSSFSFSELEDQLNEARDKFAKALMHFGEHDSKMQPDEFFGIFDTFLQAFSEARQDLEAMRRRKEEEERRARMEAMLKEQRERERWQRQRKVLAAGSSLEEGGEFDDLVSALRSGEVFDKDLCKLKRSRKRSGSQALEVTRERAINRLNY

SEQ ID NO: 860029 - protein, 114 aa, Homo sapiens
IPEINLRDNHPLQFMEFSSPIPNAEELNIRFAELVVSERVGRDSDNGEEGGWRGRAGQRAGPLCWGLHLSKLLLGGDRPPGHLSYVGEPESLTGMDSIKCVPRRMVLPPLCIGL

SEQ ID NO: 860030 - protein, 1077 aa, Homo sapiens; identical to SEQ ID NO: 860026

SEQ ID NO: 860031 - protein, 1137 aa, Homo sapiens
MAWASCAASGAVTSPKSTSGTTTLCSSWSSPAPSRTQRSSTSALQSWWMNWISLTKTERLCLHCPLRRNGRSTAARRSPVLGVGGTTVNKIEKGNSAVLELTLKEIGFSFSKTLKAGPAASQDWGLLGDNKEAESGLSRACSQAWREQEDPNKLATSWPDYYIDRINSMAAMQSLYAFDEEETEMRNQVVEDLKTALRTQPMRFVTRFIELEGLTCLLNFLRSMDHATCESRIHTSLIGCIKALMNNSQGRAHVLAQPEAISTIAQSLRTENSKTKVAVLEILGAVCLVPGGHKKVLQAMLHYQVYAAERTRFQTLLNELDRSLGRYRDEVNLKTAIMSFINAVLNAGAGEDNLEFRLHLRYEFLMLGIQPVIDKLRQHENAILDKHLDFFEMVRNEDDLELARRFDMVHIDTKSASQMFELIHKKLKYTEAYPCLLSVLHHCLQMPYKRNGGYFQQWQLLDRILQQIVLQDERGVDPDLAPLENFNVKNIVNMLINENEVKQWRDQAEKFRKEHMELVSRLERKERECETKTLEKEEMMRTLNKMKDKLARESQELRQARGQVAELVAQLSELSTGPVSSPPPPGGPLTLSSSMTTNDLPPPPPPLPFACCPPPPPPPLPPGGPPTPPGAPPCLGMGLPLPQDPYPSSDVPLRKKRVPQPSHPLKSFNWVKLNEERVPGTVWNEIDDMQVFRILDLEDFEKMFSAYQRHQELITNPSQQKELGSTEDIYLASRKVKELSVIDGRRAQNCIILLSKLKLSNEEIRQAILKMDEQEDLAKDMLEQLLKFIPEKSDIDLLEEHKHEIERMARADRFLYEMSRIDHYQQRLQALFFKKKFQERLAEAKPKVEAILLASRELVRSKRLRQMLEVILAIGNFMNKGQRGGAYGFRVASLNKIADTKSSIDRNISLLHYLIMILEKHFPDILNMPSELQHLPEAAKVNLAELEKEVGNLRRGLRAVEVELEYQRRQVREPSDKFVPVMSDFITVSSFSFSELEDQLNEARDKFAKALMHFGEHDSKMQPDEFFGIFDTFLQAFSEARQDLEAMRRRKEEEERRARMEAMLKEQRERERWQRQRKVLAAGSSLEEGGEFDDLVSALRSGEVFDKDLCKLKRSRKRSGSQALEVTRERAINRLNY

SEQ ID NO: 860032 - protein, 894 aa, Homo sapiens
RASPAHFSSHVLAQPEAISTIAQSLRTENSKTKVAVLEILGAVCLVPGGHKKVLQAMLHYQVYAAERTRFQTLLNELDRSLGRYRDEVNLKTAIMSFINAVLNAGAGEDNLEFRLHLRYEFLMLGIQPVIDKLRQHENAILDKHLDFFEMVRNEDDLELARRFDMVHIDTKSASQMFELIHKKLKYTEAYPCLLSVLHHCLQMPYKRNGGYFQQWQLLDRILQQIVLQDERGVDPDLAPLENFNVKNIVNMLINENEVKQWRDQAEKFRKEHMELVSRLERKERECETKTLEKEEMMRTLNKMKDKLARESQELRQARGQVAELVAQLSELSTGPVSSPPPPGGPLTLSSSMTTNDLPPPPPPLPFACCPPPPPPPLPPGGPPTPPGAPPCLGMGLPLPQDPYPSSDVPLRKKRVPQPSHPLKSFNWVKLNEERVPGTVWNEIDDMQVFRILDLEDFEKMFSAYQRHQELITNPSQQKELGSTEDIYLASRKVKELSVIDGRRAQNCIILLSKLKLSNEEIRQAILKMDEQEDLAKDMLEQLLKFIPEKSDIDLLEEHKHEIERMARADRFLYEMSRIDHYQQRLQALFFKKKFQERLAEAKPKVEAILLASRELVRSKRLRQMLEVILAIGNFMNKGQRGGAYGFRVASLNKIADTKSSIDRNISLLHYLIMILEKHFPDILNMPSELQHLPEAAKVNLAELEKEVGNLRRGLRAVEVELEYQRRQVREPSDKFVPVMSDFITVSSFSFSELEDQLNEARDKFAKALMHFGEHDSKMQPDEFFGIFDTFLQAFSEARQDLEAMRRRKEEEERRARMEAMLKEQRERERWQRQRKVLAAGSSLEEGGEFDDLVSALRSGEVFDKDLCKLKRSRKRSGSQALEVTRERAINRLNY

SEQ ID NO: 860033 - protein, 1171 aa, Homo sapiens; identical to SEQ ID NO: 860028

SEQ ID NO: 860034 - protein, 756 aa, Homo sapiens
MELLRQHENAILDKHLDFFEMVRNEDDLELARRFDMVHIDTKSASQMFELIHKKLKYTEAYPCLLSVLHHCLQMPYKRNGGYFQQWQLLDRILQQIVLQDERGVDPDLAPLENFNVKNIVNMLINENEVKQWRDQAEKFRKEHMELVSRLERKERECETKTLEKEEMMRTLNKMKDKLARESQELRQARGQVAELVAQLSELSTGPVSSPPPPGGPLTLSSSMTTNDLPPPPPPLPFACCPPPPPPPLPPGGPPTPPGAPPCLGMGLPLPQDPYPSSDVPLRKKRVPQPSHPLKSFNWVKLNEERVPGTVWNEIDDMQVFRILDLEDFEKMFSAYQRHQKELGSTEDIYLASRKVKELSVIDGRRAQNCIILLSKLKLSNEEIRQAILKMDEQEDLAKDMLEQLLKFIPEKSDIDLLEEHKHEIERMARADRFLYEMSRIDHYQQRLQALFFKKKFQERLAEAKPKVEAILLASRELVRSKRLRQMLEVILAIGNFMNKGQRGGAYGFRVASLNKIADTKSSIDRNISLLHYLIMILEKHFPDILNMPSELQHLPEAAKVNLAELEKEVGNLRRGLRAVEVELEYQRRQVREPSDKFVPVMSDFITVSSFSFSELEDQLNEARDKFAKALMHFGEHDSKMQPDEFFGIFDTFLQAFSEARQDLEAMRRRKEEEERRARMEAMLKEQRERERWQRQRKVLAAGSSLEEGGEFDDLVSALRSGEVFDKDLCKLKRSRKRSGSQALEVTRERAINRLNY

SEQ ID NO: 860035 - protein, 1171 aa, Homo sapiens; identical to SEQ ID NO: 860028

SEQ ID NO: 860036 - protein, 1171 aa, Homo sapiens; identical to SEQ ID NO: 860028

SEQ ID NO: 860037 - protein, 107 aa, Homo sapiens
SPPFFTWYQHLGHKFGLVKSQTVTSNVALESPTAPQQRAALECLAPSHSSLLHINCSGPPTPSLTLASRQKPQQPLSSLQVATWNHVSTGVGELVPERSEGQSCPLH

SEQ ID NO: 860038 - protein, 1171 aa, Homo sapiens; identical to SEQ ID NO: 860028

SEQ ID NO: 860039 - protein, 436 aa, Homo sapiens [sequence omitted]

SEQ ID NO: 860040 - protein, 440 aa, Homo sapiens
MATRSCREKAQKLNEQHQLILSKLLREEDNKYCADCEAKGPRWASWNIGVFICIRCAGIHRNLGVHISRVKSVNLDQWTAEQIQCMQDMGNTKARLLYEANLPENFRRPQTDQAVEFFIRDKYEKKKYYDKNAIAITNKEKEKKKEEKKREKEPEKPAKPLTAEKLQKKDQQLEPKKSTSPKKAAEPTVDLLGLDGPAVAPVTNGNTTVPPLNDDLDIFGPMISNPLPATVMPPAQGTPSAPAAATLSTVTSGDLDLFTEQTTKSEEVAKKQLSKDSILSLYGTGTIQQQSTPGVFMGPTNIPFTSQAPAAFQGFPSMGVPVPAAPGLIGNVMGQSPSMMVGMPMPNGFMGNAQTGVMPLPQNVVGPQGGMVGQMGAPQSKFGLPQAQQPQWSLSQMNQQMAGMSISSATPTAGFGQPSSTTAGWSGSSSGQTLSTQLWK

SEQ ID NO: 860041 - protein, 297 aa, Homo sapiens
MATRSCREKAQKLNEQHQLILSKLLREEDNKYCADCEAKGPRWASWNIGVFICIRCAGIHRNLGVHISRVKSVNLDQWTAEQIQCMQDMGNTKARLLYEANLPENFRRPQTDQAVEFFIRDKYEKKKYYDKNAIAITNKEKEKKKEEKKREKEPEKPAKPLTAEKLQKKDQQLEPKKSTSPKKAAEPTVDLLGLDGPAVAPVTNGNTTVPPLNDDLDIFGPMISNPLPATVMPPAQGTPSAPAAATLSTVTSGDLDLFTEQTTKSEEVAKKQLSKDSILSLYGTGTIQQQSTPGNEF

SEQ ID NO: 860042 - protein, 355 aa, Homo sapiens [sequence omitted]

SEQ ID NO: 860043 - protein, 154 aa, Homo sapiens
MATRSCREKAQKLNEQHQLILSKLLREEDNKYCADCEAKGPRWASWNIGVFICIRCAGIHRNLGVHISRVKSVNLDQWTAEQIQCMQDMGNTKARLLYEANLPENFRRPQTDQAVEFFIRDKYEKKKYCRRKISNWSLKKVPALKKLRSPLWIF

SEQ ID NO: 860044 - protein, 337 aa, Homo sapiens
MLFLKLSVFRAVEFFIRDKYEKKKYYDKNAIAITNKEKEKKKEEKKREKEPEKPAKPLTAEKLQKKDQQLEPKKSTSPKKAAEPTVDLLGLDGPAVAPVTNGNTTVPPLNDDLDIFGPMISNPLPATVMPPAQGTPSAPAAATLSTVTSGDLDLFTEQTTKSEEVAKKQLSKDSILSLYGTGTIQQQSTPGVFMGPTNIPFTSQAPAAFQGFPSMGVPVPAAPGLIGNVMGQSPSMMVGMPMPNGFMGNAQTGVMPLPQNVVGPQGGMVGQMGAPQSKFGLPQAQQPQWSLSQMNQQMAGMSISSATPTAGFGQPSSTTAGWSGSSSGQTLSTQLWK

SEQ ID NO: 860045 - protein, 364 aa, Homo sapiens
MLFLKLSVFRAVEFFIRDKYEKKKYYDKNAIAITNISSSDAPLQPLVSSPSLQAAVDKNKLEKEKEKKKEEKKREKEPEKPAKPLTAEKLQKKDQQLEPKKSTSPKKAAEPTVDLLGLDGPAVAPVTNGNTTVPPLNDDLDIFGPMISNPLPATVMPPAQGTPSAPAAATLSTVTSGDLDLFTEQTTKSEEVAKKQLSKDSILSLYGTGTIQQQSTPGVFMGPTNIPFTSQAPAAFQGFPSMGVPVPAAPGLIGNVMGQSPSMMVGMPMPNGFMGNAQTGVMPLPQNVVGPQGGMVGQMGAPQSKFGLPQAQQPQWSLSQMNQQMAGMSISSATPTAGFGQPSSTTAGWSGSSSGQTLSTQLWK

SEQ ID NO: 860046 - protein, 440 aa, Homo sapiens; identical to SEQ ID NO: 860040

SEQ ID NO: 860047 - protein, 76 aa, Homo sapiens
EIIVDVTPKLQFNECLKNSNFICLSCNLEPLTMNQQMAGMSISSATPTAGFGQPSSTTAGWSGSSSGQTLSTQLWK

SEQ ID NO: 860048 - protein, 297 aa, Homo sapiens; identical to SEQ ID NO: 860041

SEQ ID NO: 860049 - protein, 467 aa, Homo sapiens
MATRSCREKAQKLNEQHQLILSKLLREEDNKYCADCEAKGPRWASWNIGVFICIRCAGIHRNLGVHISRVKSVNLDQWTAEQIQCMQDMGNTKARLLYEANLPENFRRPQTDQAVEFFIRDKYEKKKYYDKNAIAITNISSSDAPLQPLVSSPSLQAAVDKNKLEKEKEKKKEEKKREKEPEKPAKPLTAEKLQKKDQQLEPKKSTSPKKAAEPTVDLLGLDGPAVAPVTNGNTTVPPLNDDLDIFGPMISNPLPATVMPPAQGTPSAPAAATLSTVTSGDLDLFTEQTTKSEEVAKKQLSKDSILSLYGTGTIQQQSTPGVFMGPTNIPFTSQAPAAFQGFPSMGVPVPAAPGLIGNVMGQSPSMMVGMPMPNGFMGNAQTGVMPLPQNVVGPQGGMVGQMGAPQSKFGLPQAQQPQWSLSQMNQQMAGMSISSATPTAGFGQPSSTTAGWSGSSSGQTLSTQLWK

SEQ ID NO: 860050 - protein, 440 aa, Homo sapiens; identical to SEQ ID NO: 860040

SEQ ID NO: 860051 - protein, 250 aa, Homo sapiens
MATRSCREKAQKLNEQHQLILSKLLREEDNKYCADCEAKGPRWASWNIGVFICIRCAGIHRNLGVHISRVKSVNLDQWTAEQIQCMQDMGNTKARLLYEANLPENFRRPQTDQAVEFFIRDKYEKKKYYDKNAIAITNISSSDAPLQPLVSSPSLQAAVDKNKLEKEKEKKKEEKKREKEPEKPAKPLTAEKLQKKDQQLEPKKSTSPKKAAEPTVDLLGLVWRKIEKEKSERQLVEVEELTFMYCFPKN

SEQ ID NO: 860052 - protein, 70 aa, Homo sapiens
TQHTHSWLLTKENRKQADLYSSSLPDCKTMEMPTCPQTSVWSACAMKHSVAERQESPHSKEAADTGLHTV

SEQ ID NO: 860053 - protein, 90 aa, Homo sapiens
MQRTRQEEISRLMHIQKNADCTSFSELVENFKKTLSHTDPMVLDDFGTSLPFIDIYFSTLDYQDTTVHKLQELYVLDRACAESAALGILL

SEQ ID NO: 860054 - protein, 102 aa, Homo sapiens
MQRTRQEEISRLMHIQKNADCTSFSELVENFKKTLSHTDPMVLDDFGTSLPFIDIYFSTLDYQDTTVHKLQELYYEIVHVLSLMLEDLPQEKPQSLEKVDEK

SEQ ID NO: 860055 - protein, 102 aa, Homo sapiens; identical to SEQ ID NO: 860054

SEQ ID NO: 860056 - protein, 509 aa, Homo sapiens
MERRRLWGSIQSRYISMSVWTSPRRLVELAGQSLLKDEALAIAALELLPRELFPPLFMAAFDGRHSQTLKAMVQAWPFTCLPLGVLMKGQHLHLETFKAVLDGLDVLLAQEVRPRRWKLQVLDLRKNSHQDFWTVWSGNRASLYSFPEPEAAQPMTKKRKVDGLSTEAEQPFIPVEVLVDLFLKEGACDELFSYLIEKVKRKKNVLRLCCKKLKIFAMPMQDIKMILKMVQLDSIEDLEVTCTWKLPTLAKFSPYLGQMINLRRLLLSHIHASSYISPEKEEQYIAQFTSQFLSLQCLQALYVDSLFFLRGRLDQLLRHVMNPLETLSITNCRLSEGDVMHLSQSPSVSQLSVLSLSGVMLTDVSPEPLQALLERASATLQDLVFDECGITDDQLLALLPSLSHCSQLTTLSFYGNSISISALQSLLQHLIGLSNLTHVLYPVPLESYEDIHGTLHLERLAYLHARLRELLCELGRPSMVWLSANPCPHCGDRTFYDPEPILCPCFMPN

SEQ ID NO: 860057 - protein, 509 aa, Homo sapiens; identical to SEQ ID NO: 860056

SEQ ID NO: 860058 - protein, 509 aa, Homo sapiens; identical to SEQ ID NO: 860056

SEQ ID NO: 860059 - protein, 509 aa, Homo sapiens; identical to SEQ ID NO: 860056

SEQ ID NO: 860060 - protein, 509 aa, Homo sapiens; identical to SEQ ID NO: 860056

SEQ ID NO: 860061 - protein, 509 aa, Homo sapiens; identical to SEQ ID NO: 860056

SEQ ID NO: 860062 - protein, 509 aa, Homo sapiens; identical to SEQ ID NO: 860056

SEQ ID NO: 860063 - protein, 493 aa, Homo sapiens
MSVWTSPRRLVELAGQSLLKDEALAIAALELLPRELFPPLFMAAFDGRHSQTLKAMVQAWPFTCLPLGVLMKGQHLHLETFKAVLDGLDVLLAQEVRPRRWKLQVLDLRKNSHQDFWTVWSGNRASLYSFPEPEAAQPMTKKRKVDGLSTEAEQPFIPVEVLVDLFLKEGACDELFSYLIEKVKRKKNVLRLCCKKLKIFAMPMQDIKMILKMVQLDSIEDLEVTCTWKLPTLAKFSPYLGQMINLRRLLLSHIHASSYISPEKEEQYIAQFTSQFLSLQCLQALYVDSLFFLRGRLDQLLRHVMNPLETLSITNCRLSEGDVMHLSQSPSVSQLSVLSLSGVMLTDVSPEPLQALLERASATLQDLVFDECGITDDQLLALLPSLSHCSQLTTLSFYGNSISISALQSLLQHLIGLSNLTHVLYPVPLESYEDIHGTLHLERLAYLHARLRELLCELGRPSMVWLSANPCPHCGDRTFYDPEPILCPCFMPN

SEQ ID NO: 860064 - protein, 509 aa, Homo sapiens; identical to SEQ ID NO: 860056

SEQ ID NO: 860065 - protein, 509 aa, Homo sapiens; identical to SEQ ID NO: 860056

SEQ ID NO: 860066 - protein, 509 aa, Homo sapiens; identical to SEQ ID NO: 860056

SEQ ID NO: 860067 - protein, 509 aa, Homo sapiens; identical to SEQ ID NO: 860056

SEQ ID NO: 860068 - protein, 509 aa, Homo sapiens; identical to SEQ ID NO: 860056

SEQ ID NO: 860069 - protein, 509 aa, Homo sapiens; identical to SEQ ID NO: 860056

SEQ ID NO: 860070 - protein, 509 aa, Homo sapiens; identical to SEQ ID NO: 860056

SEQ ID NO: 860071 - protein, 509 aa, Homo sapiens; identical to SEQ ID NO: 860056

SEQ ID NO: 860072 - protein, 493 aa, Homo sapiens; identical to SEQ ID NO: 860063

SEQ ID NO: 860073 - protein, 163 aa, Homo sapiens
MERRRLWGSIQSRYISMSVWTSPRRLVELAGQSLLKDEALAIAALELLPRELFPPLFMAAFDGRHSQTLKAMVQAWPFTCLPLGVLMKGQHLHLETFKAVLDGLDVLLAQEVRPRRWKLQVLDLRKNSHQDFWTVWSGNRASLYSFPEPEAAQPMNNKWPLML

SEQ ID NO: 860074 - protein, 406 aa, Homo sapiens
MAFTERVNSSGNSLYNDDRNLLRIREKERRNQEAHQEKEAFPEKIPLFGEPYKTAKGDELSSRIQNMLGNYEEVKEFLSTKSHTHRLDASENRLGKPKYPLIPDKGSSIPSSSFHTSVHHQSIHTPASGPLSVGNISHNPKMAQPRTEPMPSLHAKSCGPPDSQHLTQDRLGQEGFGSSHHKKGDRRADGDHCASVTDSAPERELSPLISLPSPVPPLSPIHSNQQTLPRTQGSSKVHGSSNNSKGYCPAKSPKDLAVKVHDKETPQDSLVAPAQPPSQTFPPPSLPSKSVAMQQKPTAYVRPMDGQDQAPSESPELKPLPEDYRQQTFEKTDLKVPAKAKLTKLKMPSQSVEQTYSNEVHCVEEILKEKPPPVNKQENAGTLNILSTLSNGNSSKQKIPADGVHR

SEQ ID NO: 860075 - protein, 416 aa, Homo sapiens
PAADNSTELDMTDFVFQAAVPKTFQLQLMSPSSSIVTSIFTRGTITQVIKVLNPQKQQLCECGSSLHIITRGSAMQDLAEVYNFPLSPGNEGLAPFSFRTSPPVGSTKYPLIPDKGSSIPSSSFHTSVHHQSIHTPASGPLSVGNISHNPKMAQPRTEPMPSLHAKSCGPPDSQHLTQDRLGQEGFGSSHHKKGDRRADGDHCASVTDSAPERELSPLISLPSPVPPLSPIHSNQQTLPRTQGSSKVHGSSNNSKGYCPAKSPKDLAVKVHDKETPQDSLVAPAQPPSQTFPPPSLPSKSVAMQQKPTAYVRPMDGQDQAPSESPELKPLPEDYRQQTFEKTDLKVPAKAKLTKLKMPSQSVEQTYSNEVHCVEEILKEKPPPVNKQENAGTLNILSTLSNGNSSKQKIPADGVHR

SEQ ID NO: 860076 - protein, 406 aa, Homo sapiens; identical to SEQ ID NO: 860074

SEQ ID NO: 860077 - protein, 400 aa, Homo sapiens
MAFTERVNSSGNSLYNDDRNLLRIREKERRNQEAHQEKEAFPEKIPLFGEPYKTAKGDELSSRIQNMLGNYEEVKEFLSTKSHTHRLDASENRLGKPKYPLIPDKGSSIPSSSFHTSVHHQSIHTPASGPLSVGNISHNPKMAQPRTEPMPSLHAKSCGPPDSQHLTQDRLGQEGFGSSHHKKGDRRADGDHCASVTDSAPERELSPLISLPSPVPPLSPIHSNQQTLPRTQGSSKVHGSSNNSKGYCPAKSPKDLAVKVHDKETPQDSLVAPAQPPSQTFPPPSLPSKSVAMQQKPTAYVRPMDGQDQAPSESPELKPLPEDYRQQTFEKTDLKVPAKAKLTKLKMPSQSVEQTYSNEVHCVEEILKEMTHSWPPPLTAIHTPSTAEPSKFPFPTKVIP

SEQ ID NO: 860078 - protein, 194 aa, Homo sapiens
GDHCASVTDSAPERELSPLISLPSPVPPLSPIHSNQQTLPRTQGSSKVHGSSNNSKGYCPAKSPKDLAVKVHDKETPQDSLVAPAQPPSQTFPPPSLPSKSVAMQQKPTAYVRPMDGQDQAPSESPELKPLPEDYRQQTFEKTDLKVPAKAKLTKLKMPSQSVEVCGISYLGEFQFEDGFEMKMSGGCGARWGG

SEQ ID NO: 860079 - protein, 84 aa, Homo sapiens
PASERRARAAPAHSAAACARCGRSCTFASAVPQPSPGRRRSPASSALAPFPTATGQGRAEVTRAPDPGLEDGRVWKMNRLATLH

SEQ ID NO: 860080 - protein, 399 aa, Homo sapiens
MAAQSSLYNDDRNLLRIREKERRNQEAHQEKEAFPEKIPLFGEPYKTAKGDELSSRIQNMLGNYEEVKEFLSTKSHTHRLDASENRLGKPKYPLIPDKGSSIPSSSFHTSVHHQSIHTPASGPLSVGNISHNPKMAQPRTEPMPSLHAKSCGPPDSQHLTQDRLGQEGFGSSHHKKGDRRADGDHCASVTDSAPERELSPLISLPSPVPPLSPIHSNQQTLPRTQGSSKVHGSSNNSKGYCPAKSPKDLAVKVHDKETPQDSLVAPAQPPSQTFPPPSLPSKSVAMQQKPTAYVRPMDGQDQAPSESPELKPLPEDYRQQTFEKTDLKVPAKAKLTKLKMPSQSVEQTYSNEVHCVEEILKEKPPPVNKQENAGTLNILSTLSNGNSSKQKIPADGVHR

SEQ ID NO: 860081 - protein, 493 aa, Homo sapiens
LRSSWEYRHAPPSPANFVFLVEMGFLHVGQDGLELQTSGDPPASASQSAGITGVSHPVRLNCYQVLKAIAGSSNLVTDLIYEEKIPGVNILSKGTQADKGLYNDDRNLLRIREKERRNQEAHQEKEAFPEKIPLFGEPYKTAKGDELSSRIQNMLGNYEEVKEFLSTKSHTHRLDASENRLGKPKYPLIPDKGSSIPSSSFHTSVHHQSIHTPASGPLSVGNISHNPKMAQPRTEPMPSLHAKSCGPPDSQHLTQDRLGQEGFGSSHHKKGDRRADGDHCASVTDSAPERELSPLISLPSPVPPLSPIHSNQQTLPRTQGSSKVHGSSNNSKGYCPAKSPKDLAVKVHDKETPQDSLVAPAQPPSQTFPPPSLPSKSVAMQQKPTAYVRPMDGQDQAPSESPELKPLPEDYRQQTFEKTDLKVPAKAKLTKLKMPSQSVEQTYSNEVHCVEEILKEKPPPVNKQENAGTLNILSTLSNGNSSKQKIPADGVHR

SEQ ID NO: 860082 - protein, 454 aa, Homo sapiens
MAFTERVNSSGNSLYNDDRNLLRIREKERRNQEAHQEKEAFPEKIPLFGEPYKTAKGDELSSRIQNMLGNYEEVKEFLSTKSHTHRLDASENRLGKPKYPLIPDKGSSIPSSSFHTSVHHQSIHTPASGPLSVGNISHNPKMAQPRTEPMPSLHAKSCGPPDSQHLTQDRLGQEGFGSSHHKKGDRRADGDHCASVTDSAPERELSPLISLPSPVPPLSPIHSNQQTLPRTQGSSKVHGSSNNSKGYCPAKSPKDLAVKVHDKETPQDSLVAPAQPPSQTFPPPSLPSKSVAMQQKPTAYVRPMDGQDQAPSESPELKPLPEDYRQQTFEKTDLKVPAKAKLTKLKMPSQSVEQTYSNEVHCVEEILKEMTHSWPPPLTAIHTPSTAEPSKFPFPTKDSQHVSSVTQNQKQYDTSSKTHSNSQQGTSSMLEDDLQLSDSEDSDSEQTPEKPLNH

SEQ ID NO: 860083 - protein, 194 aa, Homo sapiens
MAASLVGKKIVFVTGNAKKLEEVVQILGDKFPCTLVAQKIDLPEYQGEPDEISIQKCQEAVRQVQGPVLVEDTCLCFNALGGLPGPYIKWFLEKLKPEGLHQLLAGFEDKSAYALCTFALSTGDPSQPVRLFRGRTSGRIVAPRGCQDFGWDPCFQPDGYEQTYAEMPKAEKNAVSHRFRALLELQEYFGSLAA

SEQ ID NO: 860084 - protein, 194 aa, Homo sapiens; identical to SEQ ID NO: 860083

SEQ ID NO: 860085 - protein, 194 aa, Homo sapiens; identical to SEQ ID NO: 860083

SEQ ID NO: 860086 - protein, 229 aa, Homo sapiens
MPTRPIRALGSGSAFPGTPGRKLSRSLPPPAGSFLSLDAKEFSVAQLGNRGSPWRPHVVQILGDKFPCTLVAQKIDLPEYQGEPDEISIQKCQEAVRQVQGPVLVEDTCLCFNALGGLPGPYIKWFLEKLKPEGLHQLLAGFEDKSAYALCTFALSTGDPSQPVRLFRGRTSGRIVAPRGCQDFGWDPCFQPDGYEQTYAEMPKAEKNAVSHRFRALLELQEYFGSLAA

SEQ ID NO: 860087 - protein, 236 aa, Homo sapiens
MHHHAQLILYFLVEMGFLHVGQAGFKLLTSGDPLASASQSAGITGVSHRAFPHFDEHQNGLRSLVVQILGDKFPCTLVAQKIDLPEYQGEPDEISIQKCQEAVRQVQGPVLVEDTCLCFNALGGLPGPYIKWFLEKLKPEGLHQLLAGFEDKSAYALCTFALSTGDPSQPVRLFRGRTSGRIVAPRGCQDFGWDPCFQPDGYEQTYAEMPKAEKNAVSHRFRALLELQEYFGSLAA

SEQ ID NO: 860088 - protein, 110 aa, Homo sapiens
MRSARLHSAPGTQASPCACSGAGPRAGSWHPEAARTLAGTPAFSLMDMSRRTQRCLRRRRTLSPIASGPCWSCRSTLAVWQLDFCSWRRPLRPGIWGGLAQNLPHRAGTP

SEQ ID NO: 860089 - protein, 110 aa, Homo sapiens; identical to SEQ ID NO: 860088

SEQ ID NO: 860090 - protein, 110 aa, Homo sapiens; identical to SEQ ID NO: 860088

SEQ ID NO: 860091 - protein, 87 aa, Homo sapiens
TDSPNSYWPLPSSCLSSGPSYTPVPPFLWQGRIVAPRGCQDFGWDPCFQPDGYEQTYAEMPKAEKNAVSHRFRALLELQEYFGSLAA

SEQ ID NO: 860092 - protein, 194 aa, Homo sapiens; identical to SEQ ID NO: 860083

SEQ ID NO: 860093 - protein, 110 aa, Homo sapiens; identical to SEQ ID NO: 860088

SEQ ID NO: 860094 - protein, 110 aa, Homo sapiens; identical to SEQ ID NO: 860088

SEQ ID NO: 860095 - protein, 153 aa, Homo sapiens
MAASLVGKKIVFVTGNAKKLEEVQGPVLVEDTCLCFNALGGLPGPYIKWFLEKLKPEGLHQLLAGFEDKSAYALCTFALSTGDPSQPVRLFRGRTSGRIVAPRGCQDFGWDPCFQPDGYEQTYAEMPKAEKNAVSHRFRALLELQEYFGSLAA

SEQ ID NO: 860096 - protein, 182 aa, Homo sapiens
MARLLWLLRGLTLGTAPRRAVRGQAGGGGPGTGPGLGEAGSLATCELPLAKSEWQKKLTPEQFYVTREKGTEPPFSGIYLNNKEAGMYHCVCCDSPLFSSEKKYCSGTGWPSFSEAHGTSGSDESHTGILRRLDTSLGSARTEVVCKQCEAHLGHVFPDGPGPNGQRFCINSVALKFKPRKH

SEQ ID NO: 860097 - protein, 115 aa, Homo sapiens
YLIYFQPFSGIYLNNKEAGMYHCVCCDSPLFSSEKKYCSGTGWPSFSEAHGTSGSDESHTGILRRLDTSLGSARTEVVCKQCEAHLGHVFPDGPGPNGQRFCINSVALKFKPRKH

SEQ ID NO: 860098 - protein, 182 aa, Homo sapiens; identical to SEQ ID NO: 860096

SEQ ID NO: 860099 - protein, 124 aa, Homo sapiens [sequence omitted]

SEQ ID NO: 860100 - protein, 159 aa, Homo sapiens
MARLLWLLRGLTLGTAPRRAVRGQAGGGGPGTGPGLGEAGSLATCELPLAKSEWQKKLTPEQFYVTREKGTEPPFSGIYLNNKEAGMYHCVCCDSPLFRSLLDIQKEVFSIKGSRSPSTSRGNGFDSEVLRKSTALALGGLRFPRLMVRLALMKATQGS

SEQ ID NO: 860101 - protein, 113 aa, Homo sapiens
MARLLWLLRGLTLGTAPRRAVRGQAGGGGPGTGPGLGEAGRTRVPQAPPPPTAFGFISPAAPGSLGPVQAGRCPPTKPSSARPSPPPARGSGTVDCKLGGGRVGTDPCENPRK

SEQ ID NO: 860102 - protein, 182 aa, Homo sapiens; identical to SEQ ID NO: 860096

SEQ ID NO: 860103 - protein, 103 aa, Homo sapiens
MARLLWLLRGLTLGTAPRRAVRGQAGGGGPGTGPGLGEAGSLATCELPLAKSEWQKKLTPEQFYVTREKGTEPPFSGIYLNNKEAGMYHCVCCDSPLFSVKLI

SEQ ID NO: 860104 - protein, 182 aa, Homo sapiens; identical to SEQ ID NO: 860096

SEQ ID NO: 860105 - protein, 159 aa, Homo sapiens; identical to SEQ ID NO: 860100

SEQ ID NO: 860106 - protein, 420 aa, Homo sapiens
MSLKFTNAKRIEGLDSNVWIEFTKLAADPSVVNLGQGFPDISPPTYVKEELSKIAAIDSLNQYTRGFGHPSLVKALSYLYEKLYQKQIDSNKEILVTVGAYGSLFNTIQALIDEGDEVILIVPFYDCYEPMVRMAGATPVFIPLRSKPVYGKRWSSSDWTLDPQELESKFNSKTKAIILNTPHNPLGKVYNREELQVIADLCIKYDTLCISDEVYEWLVYSGNKHLKIATFPGMWERTITIGSAGKTFSVTGWKLGWSIGPNHLIKHLQTVQQNTIYTCATPLQEALAQAFWIDIKRMDDPECYFNSLPKELEVKRDRMVRLLESVGLKPIVPDGGYFIIADVSLLDPDLSDMKNNEPYDYKFVKWMTKHKKLSAIPVSAFCNSETKSQFEKFVRFCFIKKDSTLDAAEEIIKAWSVQKS

SEQ ID NO: 860107 - protein, 454 aa, Homo sapiens
MFLAQRSLCSLSGRAKFLKTISSSKILGFSTSAKMSLKFTNAKRIEGLDSNVWIEFTKLAADPSVVNLGQGFPDISPPTYVKEELSKIAAIDSLNQYTRGFGHPSLVKALSYLYEKLYQKQIDSNKEILVTVGAYGSLFNTIQALIDEGDEVILIVPFYDCYEPMVRMAGATPVFIPLRSKPVYGKRWSSSDWTLDPQELESKFNSKTKAIILNTPHNPLGKVYNREELQVIADLCIKYDTLCISDEVYEWLVYSGNKHLKIATFPGMWERTITIGSAGKTFSVTGWKLGWSIGPNHLIKHLQTVQQNTIYTCATPLQEALAQAFWIDIKRMDDPECYFNSLPKELEVKRDRMVRLLESVGLKPIVPDGGYFIIADVSLLDPDLSDMKNNEPYDYKFVKWMTKHKKLSAIPVSAFCNSETKSQFEKFVRFCFIKKDSTLDAAEEIIKAWSVQKS

SEQ ID NO: 860108 - protein, 402 aa, Homo sapiens
MSLKFTNAKRIEGLDSNVWIEFTKLAADPSVVNLGQGFPDISPPTYVKEELSKIAAIDSLNQYTRGFGHPSLVKALSYLYEKLYPLFNTIQALIDEGDEVILIVPFYDCYEPMVRMAGATPVFIPLRSKPVYGKRWSSSDWTLDPQELESKFNSKTKAIILNTPHNPLGKVYNREELQVIADLCIKYDTLCISDEVYEWLVYSGNKHLKIATFPGMWERTITIGSAGKTFSVTGWKLGWSIGPNHLIKHLQTVQQNTIYTCATPLQEALAQAFWIDIKRMDDPECYFNSLPKELEVKRDRMVRLLESVGLKPIVPDGGYFIIADVSLLDPDLSDMKNNEPYDYKFVKWMTKHKKLSAIPVSAFCNSETKSQFEKFVRFCFIKKDSTLDAAEEIIKAWSVQKS

SEQ ID NO: 860109 - protein, 420 aa, Homo sapiens; identical to SEQ ID NO: 860106

SEQ ID NO: 860110 - protein, 405 aa, Homo sapiens
MSLKFTNAKRIEGLDSNVWIEFTKLAADPSVVNLGQGFPDISPPTYVKEELSKIAAIDSLNQYTRGFGHPSLVKALSYLYEKLYQKQIDSNKEILVTVGAYGSLFNTIQALIDEGDEVILIVPFYDCYEPMKPVYGKRWSSSDWTLDPQELESKFNSKTKAIILNTPHNPLGKVYNREELQVIADLCIKYDTLCISDEVYEWLVYSGNKHLKIATFPGMWERTITIGSAGKTFSVTGWKLGWSIGPNHLIKHLQTVQQNTIYTCATPLQEALAQAFWIDIKRMDDPECYFNSLPKELEVKRDRMVRLLESVGLKPIVPDGGYFIIADVSLLDPDLSDMKNNEPYDYKFVKWMTKHKKLSAIPVSAFCNSETKSQFEKFVRFCFIKKDSTLDAAEEIIKAWSVQKS

SEQ ID NO: 860111 - protein, 420 aa, Homo sapiens; identical to SEQ ID NO: 860106

SEQ ID NO: 860112 - protein, 237 aa, Homo sapiens
MSLKFTNAKRIEGLDSNVWIEFTKLAADPSVVNLGQGFPDISPPTYVKEELSKIAAIDSLNQYTRGFGHPSLVKALSYLYEKLYQKQIDSNKEILVTVGAYGSLFNTIQALIDEGDEVILIVPFYDCYEPMVRMAGATPVFIPLRSKPVYGKRWSSSDWTLDPQELESKFNSKTKAIILNTPHNPLGKVYNREELQVIADLCIKYDTLCISDEVYEWGVLEKLKKYFQVGRTTGIGK

SEQ ID NO: 860113 - protein, 420 aa, Homo sapiens; identical to SEQ ID NO: 860106

SEQ ID NO: 860114 - protein, 396 aa, Homo sapiens
MFLAQRSLCSLSGRAKFLKTISSSKILGFSTSAKMSLKFTNAKRIEGLDSNVWIEFTKLAADPSVVNLGQGFPDISPPTYVKEELSKIAAIDSVILIVPFYDCYEPMVRMAGATPVFIPLRSKPVYGKRWSSSDWTLDPQELESKFNSKTKAIILNTPHNPLGKVYNREELQVIADLCIKYDTLCISDEVYEWLVYSGNKHLKIATFPGMWERTITIGSAGKTFSVTGWKLGWSIGPNHLIKHLQTVQQNTIYTCATPLQEALAQAFWIDIKRMDDPECYFNSLPKELEVKRDRMVRLLESVGLKPIVPDGGYFIIADVSLLDPDLSDMKNNEPYDYKFVKWMTKHKKLSAIPVSAFCNSETKSQFEKFVRFCFIKKDSTLDAAEEIIKAWSVQKS

SEQ ID NO: 860115 - protein, 420 aa, Homo sapiens; identical to SEQ ID NO: 860106

SEQ ID NO: 860116 - protein, 32 aa, Homo sapiens
MQNTSIAPKRFLKFLCSPSLTLLICLCHHILV

SEQ ID NO: 860117 - protein, 1051 aa, Homo sapiens
PFRSRSACALLLGSPWFPGVLPLQAGAGAEDPALRGCRTMRWGLRPRGPGAAALATARSLWGTPRLPCSPGWQGATKRLLVRSVSGASNHQPNSNSGRYRDTVLLPQTSFPMKLLGRQQPDTELEIQQKCGFSELYSWQRERKVKTEFCLHDGPPYANGDPHVGHALNKILKDIANRFHMMNGSKIHFVPGWDCHGLPIEIKVLSELGREAQNLSAMEIRKKARSFAKAAIEKQKSAFIRWGIMADWNNCYYTFDGKYEAKQLRTFYQMYDKGLVYRSYKPVFWSPSSRTALAEAELEYNPEHVSRSIYVKFPLLKPSPKLASLIDGSSPVSILVWTTQPWTIPANEAVCYMPESKYAVVKCSKSGDLYVLAADKVASVASTLETTFETISTLSGVDLENGTCSHPLIPDKASPLLPANHVTMAKGTGLVHTAPAHGMEDYGVASQHNLPMDCLVDEDGVFTDVAGPELQNKAVLEEGTDVVIKMLQTAKNLLKEEKLVHSYPYDWRTKKPVVIRASKQWFINITDIKTAAKELLKKVKFIPGSALNGMVEMMDRRPYWCISRQRVWGVPIPVFHHKTKDEYLINSQTTEHIVKLVEQHGSDIWWTLPPEQLLPKEVLSEVGGPDALEYVPGQDILDIWFDSGTSWSYVLPGPDQRADLYLEGKDQLGGWFQSSLLTSVAARKRAPYKTVIVHGFTLGEKGEKMSKSLGNVIHPDVVVNGGQDQSKEPPYGADVLRWWVADSNVFTEVAIGPSVLNAARDDISKLRNTLRFLLGNVADFNPETDSIPVNDMYVIDQYMLHLLQDLANKITELYKQYDFGKVVRLLRTFYTRELSNFYFSIIKDRLYCEKENDPKRRSCQTALVEILDVIVRSFAPILPHLAEEVFQHIPYIKEPKSVFRTGWISTSSIWKKPGLEEAVESACAMRDSFLGSIPGKNAAEYKVITVIEPGLLFEIIEMLQSEETSSTSQLNELMMASESTLLAQEPREMTADVIELKGKFLINLEGGDIREESSYKVIVMPTTKEKCPRCWKYTAESSDTLCPRCAEVVSGK

SEQ ID NO: 860118 - protein, 1051 aa, Homo sapiens; identical to SEQ ID NO: 860117

SEQ ID NO: 860119 - protein, 1025 aa, Homo sapiens
PFRSRSACALLLGSPWFPGVLPLQAGAGAEDPALRGCRTMRWGLRPRGPGAAALATARSLWGTPRLPCSPGWQGATKRLLVRSVSGASNHQPNSNSGRYRDTVLLPQTSFPMKLLGRQQPDTELEIQQKCGFSELYSWQRERKVKTEFCLHDGPPYANGDPHVGHALNKILKDIANRFHMMNGSKIHFVPGWDCHGLPIEIKVLSELGREAQNLSAMEIRKKARSFAKAAIEKQKSAFIRWGIMADWNNCYYTFDGKYEAKQLRTFYQMYDKGLVYRSYKPVFWSPSSRTALAEAELEYNPEHVSRSIYVKFPLLKPSPKLASLIDGSSPVSILVWTTQPWTIPANEAVCYMPESKYAVVKCSKSGDLYVLAADKVASVASTLETTFETISTLSGVDLENGTCSHPLIPDKASPLLPANHVTMAKGTGLVHTAPAHGMEDYGVASQHNLPMDCLVDEDGVFTDVAGPELQNKAVLEEGTDVVIKMLQTAKNLLKEEKLVHSYPYDWRTKKPVVIRASKQWFINITDIKTAAKWCISRQRVWGVPIPVFHHKTKDEYLINSQTTEHIVKLVEQHGSDIWWTLPPEQLLPKEVLSEVGGPDALEYVPGQDILDIWFDSGTSWSYVLPGPDQRADLYLEGKDQLGGWFQSSLLTSVAARKRAPYKTVIVHGFTLGEKGEKMSKSLGNVIHPDVVVNGGQDQSKEPPYGADVLRWWVADSNVFTEVAIGPSVLNAARDDISKLRNTLRFLLGNVADFNPETDSIPVNDMYVIDQYMLHLLQDLANKITELYKQYDFGKVVRLLRTFYTRELSNFYFSIIKDRLYCEKENDPKRRSCQTALVEILDVIVRSFAPILPHLAEEVFQHIPYIKEPKSVFRTGWISTSSIWKKPGLEEAVESACAMRDSFLGSIPGKNAAEYKVITVIEPGLLFEIIEMLQSEETSSTSQLNELMMASESTLLAQEPREMTADVIELKGKFLINLEGGDIREESSYKVIVMPTTKEKCPRCWKYTAESSDTLCPRCAEVVSGK

SEQ ID NO: 860120 - protein, 261 aa, Homo sapiens
MYVIDQYMLHLLQDLANKITELYKQYDFGKVVRLLRTFYTRELSNFYFSIIKDRLYCEKENDPKRRSCQTALVEILDVIVRSFAPILPHLAEEVFQHIPYIKEPKSVFRTGWISTSSIWKKPGLEEAVESACAMRDSFLGSIPGKNAAEYKVITVIEPGLLFEIIEMLQSEETSSTSQLNELMMASESTLLAQEPREMTADVIELKGKFLINLEGGDIREESSYKVIVMPTTKEKCPRCWKYTAESSDTLCPRCAEVVSGK

SEQ ID NO: 860121 - protein, 781 aa, Homo sapiens
  misc_feature (765)..(765): Xaa can be any naturally occurring amino acid
  misc_feature (769)..(769): Xaa can be any naturally occurring amino acid
PFRSRSACALLLGSPWFPGVLPLQAGAGAEDPALRGCRTMRWGLRPRGPGAAALATARSLWGTPRLPCSPGWQGATKRLLVRSVSGASNHQPNSNSGRYRDTVLLPQTSFPMKLLGRQQPDTELEIQQKCGFSELYSWQRERKVKTEFCLHDGPPYANGDPHVGHALNKILKDIANRFHMMNGSKIHFVPGWDCHGLPIEIKVLSELGREAQNLSAMEIRKKARSFAKAAIEKQKSAFIRWGIMADWNNCYYTFDGKYEAKQLRTFYQMYDKGLVYRSYKPVFWSPSSRTALAEAELEYNPEHVSRSIYVKFPLLKPSPKLASLIDGSSPVSILVWTTQPWTIPANEAVCYMPESKYAVVKCSKSGDLYVLAADKVASVASTLETTFETISTLSGVDLENGTCSHPLIPDKASPLLPANHVTMAKGTGLVHTAPAHGMEDYGVASQHNLPMDCLVDEDGVFTDVAGPELQNKAVLEEGTDVVIKMLQTAKNLLKEEKLVHSYPYDWRTKKPVVIRASKQWFINITDIKTAAKELLKKVKFIPGSALNGMVEMMDRRPYWCISRQRVWGVPIPVFHHKTKDEYLINSQTTEHIVKLVEQHGSDIWWTLPPEQLLPKEVLSEVGGPDALEYVPGQDILDIWFDSGTSWSYVLPGPDQRADLYLEGKDQLGGWFQSSLLTSVAARKRAPYKTVIVHGFTLGEKGEKMSKSLGNVIHPDVVVNGGQDQSKEPPYGADVLRWWVADSNVFTEVAIGPSVLNAARDDISKXWDYXFGFLFWENLGCF

SEQ ID NO: 860122 - protein, 690 aa, Homo sapiens
PFRSRSACALLLGSPWFPGVLPLQAGAGAEDPALRGCRTMRWGLRPRGPGAAALATARSLWGTPRLPCSPGWQGATKRLLVRSVSGASNHQPNSNSGRYRDTVLLPQTSFPMKLLGRQQPDTELEIQQKCGFSELYSWQRERKVKTEFCLHDGPPYANGDPHVGHALNKILKDIANRFHMMNGSKIHFVPGWDCHGLPIEIKVLSELGREAQNLSAMEIRKKARSFAKAAIEKQKSAFIRWGIMADWNNCYYTFDGKYEAKQLRTFYQMYDKGLVYRSYKPVFWSPSSRTALAEAELEYNPEHVSRSIYVKFPLLKPSPKLASLIDGSSPVSILVWTTQPWTIPANEAVCYMPESKYAVVKCSKSGDLYVLAADKVASVASTLETTFETISTLSGVDLENGTCSHPLIPDKASPLLPANHVTMAKGTGLVHTAPAHGMEDYGVASQHNLPMDCLVDEDGVFTDVAGPELQNKAVLEEGTDVVIKMLQTAKNLLKEEKLVHSYPYDWRTKKPVVIRASKQWFINITDIKTAAKELLKKVKFIPGSALNGMVEMMDRRPYWCISRQRVWGVPIPVFHHKTKDEYLINSQTTEHIVKLVEQHGSDIWWTLPPEQLLPKEVLSEVGGPDALEYVPGQDILDIWFDSGTSWSYVLPGPDQRADLYLEGKDQLGGWFQSSLLTSVAARKRAPYNVL

SEQ ID NO: 860123 - protein, 546 aa, Homo sapiens
  misc_feature (537)..(537): Xaa can be any naturally occurring amino acid
PFRSRSACALLLGSPWFPGVLPLQAGAGAEDPALRGCRTMRWGLRPRGPGAAALATARSLWGTPRLPCSPGWQGATKRLLVRSVSGASNHQPNSNSGRYRDTVLLPQTSFPMKLLGRQQPDTELEIQQKCGFSELYSWQRERKVKTEFCLHDGPPYANGDPHVGHALNKILKDIANRFHMMNGSKIHFVPGWDCHGLPIEIKVLSELGREAQNLSAMEIRKKARSFAKAAIEKQKSAFIRWGIMADWNNCYYTFDGKYEAKQLRTFYQMYDKGLVYRSYKPVFWSPSSRTALAEAELEYNPEHVSRSIYVKFPLLKPSPKLASLIDGSSPVSILVWTTQPWTIPANEAVCYMPESKYAVVKCSKSGDLYVLAADKVASVASTLETTFETISTLSGVDLENGTCSHPLIPDKASPLLPANHVTMAKGTGLVHTAPAHGMEDYGVASQHNLPMDCLVDEDGVFTDVAGPELQNKAVLEEGTDVVIKMLQTAKNLLKEEKLVHSYPYDWRTKKPVVIRASKQWFINITDIKTAAKNGKKXIILTPDAGE

SEQ ID NO: 860124 - protein, 1033 aa, Homo sapiens
PFRSRSACALLLGSPWFPGVLPLQAGAGAEDPALRGCRTMRWGLRPRGPGAAALATARSLWGTPRLPCSPGWQGATKRLLVRSVSGASNHQPNSNSGRYRDTVLLPQTSFPMKLLGRQQPDTELEIQQKCGFSELYSWQRERKVKTEFCLHDGPPYANGDPHVGHALNKILKDIANRFHMMNGSKIHFVPGWDCHGLPIEIKVLSELGREAQNLSAMEIRKKARSFAKAAIEKQKSAFIRWGIMADWNNCYYTFDGKYEAKQLRTFYQMYDKGLVYRSYKPVFWSPSSRTALAEAELEYNPEHVSRSIYVKFPLLKPSPTQPWTIPANEAVCYMPESKYAVVKCSKSGDLYVLAADKVASVASTLETTFETISTLSGVDLENGTCSHPLIPDKASPLLPANHVTMAKGTGLVHTAPAHGMEDYGVASQHNLPMDCLVDEDGVFTDVAGPELQNKAVLEEGTDVVIKMLQTAKNLLKEEKLVHSYPYDWRTKKPVVIRASKQWFINITDIKTAAKELLKKVKFIPGSALNGMVEMMDRRPYWCISRQRVWGVPIPVFHHKTKDEYLINSQTTEHIVKLVEQHGSDIWWTLPPEQLLPKEVLSEVGGPDALEYVPGQDILDIWFDSGTSWSYVLPGPDQRADLYLEGKDQLGGWFQSSLLTSVAARKRAPYKTVIVHGFTLGEKGEKMSKSLGNVIHPDVVVNGGQDQSKEPPYGADVLRWWVADSNVFTEVAIGPSVLNAARDDISKLRNTLRFLLGNVADFNPETDSIPVNDMYVIDQYMLHLLQDLANKITELYKQYDFGKVVRLLRTFYTRELSNFYFSIIKDRLYCEKENDPKRRSCQTALVEILDVIVRSFAPILPHLAEEVFQHIPYIKEPKSVFRTGWISTSSIWKKPGLEEAVESACAMRDSFLGSIPGKNAAEYKVITVIEPGLLFEIIEMLQSEETSSTSQLNELMMASESTLLAQEPREMTADVIELKGKFLINLEGGDIREESSYKVIVMPTTKEKCPRCWKYTAESSDTLCPRCAEVVSGK

SEQ ID NO: 860125 - protein, 1051 aa, Homo sapiens; identical to SEQ ID NO: 860117

SEQ ID NO: 860126 - protein, 250 aa, Homo sapiens
SSAHAAYPNCTNTDLLVNDVHTAEAVEADLVETLFARPVYGDSGVCMHTPKPKRRSCQTALVEILDVIVRSFAPILPHLAEEVFQHIPYIKEPKSVFRTGWISTSSIWKKPGLEEAVESACAMRDSFLGSIPGKNAAEYKVITVIEPGLLFEIIEMLQSEETSSTSQLNELMMASESTLLAQEPREMTADVIELKGKFLINLEGGDIREESSYKVIVMPTTKEKCPRCWKYTAESSDTLCPRCAEVVSGK

SEQ ID NO: 860127 - protein, 688 aa, Homo sapiens
PFRSRSACALLLGSPWFPGVLPLQAGAGAEDPALRGCRTMRWGLRPRGPGAAALATARSLWGTPRLPCSPGWQGATKRLLVRSVSGASNHQPNSNSGRYRDTVLLPQTSFPMKLLGRQQPDTELEIQQKCGFSELYSWQRERKVKTEFCLHDGPPYANGDPHVGHALNKILKDIANRFHMMNGSKIHFVPGWDCHGLPIEIKVLSELGREAQNLSAMEIRKKARSFAKAAIEKQKSAFIRWGIMADWNNCYYTFDGKYEAKQLRTFYQMYDKGLVYRSYKPVFWSPSSRTALAEAELEYNPEHVSRSIYVKFPLLKPSPKLASLIDGSSPVSILVWTTQPWTIPANEAVCYMPESKYAVVKCSKSGDLYVLAADKVASVASTLETTFETISTLSGVDLENGTCSHPLIPDKASPLLPANHVTMAKGTGLVHTAPAHGMEDYGVASQHNLPMDCLVDEDGVFTDVAGPELQNKAVLEEGTDVVIKMLQTAKNLLKEEKLVHSYPYDWRTKKPVVIRASKQWFINITDIKTAAKELLKKVKFIPGSALNGMVEMMDRRPYWCISRQRVWGVPIPVFHHKTKDEYLINSQTTEHIVKLVEQHGSDIWWTLPPEQLLPKEVLSEVGGPDALEYVPGQDILDIWFDSGTSWSYVLPGPDQRADLYLEGKDQLGGWFQSSLLTSVAARKRAPYK

SEQ ID NO: 860128 - protein, 534 aa, Homo sapiens
PFRSRSACALLLGSPWFPGVLPLQAGAGAEDPALRGCRTMRWGLRPRGPGAAALATARSLWGTPRLPCSPGWQGATKRLLVRSVSGASNHQPNSNSGRYRDTVLLPQTSFPMKLLGRQQPDTELEIQQKCGFSELYSWQRERKVKTEFCLHDGPPYANGDPHVGHALNKILKDIANRFHMMNGSKIHFVPGWDCHGLPIEIKVLSELGREAQNLSAMEIRKKARSFAKAAIEKQKSAFIRWGIMADWNNCYYTFDGKYEAKQLRTFYQMYDKGLVYRSYKPVFWSPSSRTALAEAELEYNPEHVSRSIYVKFPLLKPSPKLASLIDGSSPVSILVWTTQPWTIPANEAVCYMPESKYAVVKCSKSGDLYVLAADKVASVASTLETTFETISTLSGVDLENGTCSHPLIPDKASPLLPANHVTMAKGTGLVHTAPAHGMEDYGVASQHNLPMDCLVDEDGVFTDVAGPELQNKAVLEEGTDVVIKMLQTAKNLLKEEKLVHSYPYDWRTKKPVVIRASKQWFINITDIKTAAKNC

SEQ ID NO: 860129 - protein, 296 aa, Homo sapiens
MARAAALLPSRSPPTPLLWPLLLLLLLETGAQDVRVQVLPEVRGQLGGTVELPCHLLPPVPGLYISLVTWQRPDAPANHQNVAASHFLGTWREVEQHTGLLPSLGLHGEPGELSSGDPERTPAPRDLVLAPAFPWPRDTQELINALEENKNKKKKPRKKNTHSRALWAFQSPYISHYKAYQALGTHPPGTDALGPKTPPSLIAPEIPIPHKGIFGHRVATVPSQKTLHISLARWKISGNLCAPTAVPPRGYTVCRLGQFRGVTPVCKSPVMLRQKLSPVEEPPVYAGAEGVRLKPP

SEQ ID NO: 860130 - protein, 88 aa, Homo sapiens
RGSPNSSSRTDGVTVTCKVEHESFEEPALIPVTLSVRCECIGGDPSPIKTAYTGFSKALSTLSLNVVYVGSLKPNSALPSCHCLHWLP

SEQ ID NO: 860131 - protein, 479 aa, Homo sapiens
MARAAALLPSRSPPTPLLWPLLLLLLLETGAQDVRVQVLPEVRGQLGGTVELPCHLLPPVPGLYISLVTWQRPDAPANHQNVAAFHPKMGPSFPSPKPGSERLSFVSAKQSTGQDTEAELQDATLALHGLTVEDEGNYTCEFATFPKGSVRGMTWLRVIAKPKNQAEAQKVTFSQDPTTVALCISKEGRPPARISWLSSLDWEAKETQVSGTLAGTVTVTSRFTLVPSGRADGVTVTCKVEHESFEEPALIPVTLSVRYPPEVSISGYDDNWYLGRTDATLSCDVRSNPEPTGYDWSTTSGTFPTSAVAQGSQLVIHAVDSLFNTTFVCTVTNAVGMGRAEQVIFVRETPRASPRDVGPLVWGAVGGTLLVLLLLAGGSLAFILLRVRRRRKSPGGAGGGASGDGGFYDPKAQVLGNGDPVFWTPVVPGPMEPDGKDEEEEEEEEKAEKGLMLPPPPALEDDMESQLDGSLISRRAVYV

SEQ ID NO: 860132 - protein, 538 aa, Homo sapiens
MARAAALLPSRSPPTPLLWPLLLLLLLETGAQDVRVQVLPEVRGQLGGTVELPCHLLPPVPGLYISLVTWQRPDAPANHQNVAAFHPKMGPSFPSPKPGSERLSFVSAKQSTGQDTEAELQDATLALHGLTVEDEGNYTCEFATFPKGSVRGMTWLRVIAKPKNQAEAQKVTFSQDPTTVALCISKEGRPPARISWLSSLDWEAKETQVSGTLAGTVTVTSRFTLVPSGRADGVTVTCKVEHESFEEPALIPVTLSVRYPPEVSISGYDDNWYLGRTDATLSCDVRSNPEPTGYDWSTTSGTFPTSAVAQGSQLVIHAVDSLFNTTFVCTVTNAVGMGRAEQVIFVRETPNTAGAGATGGIIGGIIAAIIATAVAATGILICRQQRKEQTLQGAEEDEDLEGPPSYKPPTPKAKLEAQEMPSQLFTLGASEHSPLKTPYFDAGASCTEQEMPRYHELPTLEERSGPLHPGATSLGSPIPVPPGPPAVEDVSLDLEDEEGEEEEEYLDKINPIYDALSYSSPSDSYQGKGFVMSRAMYV

SEQ ID NO: 860133 - protein, 538 aa, Homo sapiens; identical to SEQ ID NO: 860132

SEQ ID NO: 860134 - protein, 369 aa, Homo sapiens
MARAAALLPSRSPPTPLLWPLLLLLLLETGAQDVRVQVLPEVRGQLGGTVELPCHLLPPVPGLYISLVTWQRPDAPANHQNVAAFHPKMGPSFPSPKPGSERLSFVSAKQSTGQDTEAELQDATLALHGLTVEDEGNYTCEFATFPKGSVRGMTWLRVIAKPKNQAEAQKVTFSQDPTTVALCISKEGRPPARISWLSSLDWEAKETQVSGTLAGTVTVTSRFTLVPSGRADGVTVTCKVEHESFEEPALIPVTLSVRYPPEVSISGYDDNWYLGRTDATLSCDVRSNPEPTGYDWSTTSGTFPTSAVAQGSQLVIHAVDSLFNTTFVCTVTNAVGMGRAEQVIFVRALEDDMESQLDGSLISRRAVYV

SEQ ID NO: 860135 - protein, 290 aa, Homo sapiens
MARAAALLPSRSPPTPLLWPLLLLLLLETGAQDVRVQVLPEVRGQLGGTVELPCHLLPPVPGLYISLVTWQRPDAPANHQNVAAFHPKMGPSFPSPKPGSERLSFVSAKQSTGQDTEAELQDATLALHGLTVEDEGNYTCEFATFPKGSVRGMTWLRVIAKPKNQAEAQKVTFSQDPTTVALCISKEGRPPARISWLSSLDWEAKETQVSGTLAGTVTVTSRFTLVPSGRADGVTVTCKVEHESFEEPALIPVTLSVRYPPEVSISGYDDNWYLGRTDATLSAWGARGAE

SEQ ID NO: 860136 - protein, 150 aa, Homo sapiens
MRLCGGLDDSDLVVSLLLLATEPDSVLEAHEMPSQLFTLGASEHSPLKTPYFDAGASCTEQEMPRYHELPTLEERSGPLHPGATSLGSPIPVPPGPPAVEDVSLDLEDEEGEEEEEYLDKINPIYDALSYSSPSDSYQGKGFVMSRAMYV

SEQ ID NO: 860137 - protein, 170 aa, Homo sapiens
EAGFESAEAVDSLFNTTFVCTVTNAVGMGRAEQVIFVRETPRASPRDVGPLVWGAVGGTLLVLLLLAGGSLAFILLRVRRRRKSPGGAGGGASGDGGFYDPKAQVLGNGDPVFWTPVVPGPMEPDGKDEEEEEEEEKAEKGLMLPPPPALEDDMESQLDGSLISRRAVYV

SEQ ID NO: 860138 - protein, 173 aa, Homo sapiens
MGCSTLELRQNQQEKLANHSCSTSTIPQGNTGLRPRHQLLRATPGSSSHFEEGSPPRTFTTTTKSEPDKDTIYEQQARDKHRMTLEITHITQVTTIWHHNMVQLATTTAHWQQTIESKPDPQWQGVPTEKHIPKQGKTGHQNRTNCVTPKYTANTEVEPIRNPRRIGRNERNQ

SEQ ID NO: 860139 - protein, 538 aa, Homo sapiens; identical to SEQ ID NO: 860132

SEQ ID NO: 860140 - protein, 443 aa, Homo sapiens
MARAAALLPSRSPPTPLLWPLLLLLLLETGAQDVRVQVLPEVRGQLGGTVELPCHLLPPVPGLYISLVTWQRPDAPANHQNVAAFHPKMGPSFPSPKPGSERLSFVSAKQSTGQDTEAELQDATLALHGLTVEDEGNYTCEFATFPKGSVRGMTWLRVIAKPKNQAEAQKVTFSQDPTTVALCISKEGRPPARISWLSSLDWEAKETQVSGTLAGTVTVTSRFTLVPSGRADGVTVTCKVEHESFEEPALIPVTLSVRYPPEVSISGYDDNWYLGRTDATLSCDVRSNPEPTGYDWSTTSGTFPTSAVAQGSQLVIHAVDSLFNTTFVCTVTNAVGMGRAEQVIFVRETPNTAGAGATGGIIGGIIAAIIATAVAATGILICRQQRKEQTLQGAEEDEEKCLDTMSCPPWKNGQDPCTLEPQAWGPPSRCLQGHLLWKTFPWI

SEQ ID NO: 860141 - protein, 538 aa, Homo sapiens; identical to SEQ ID NO: 860132

SEQ ID NO: 860142 - protein, 479 aa, Homo sapiens; identical to SEQ ID NO: 860131

SEQ ID NO: 860143 - protein, 506 aa, Homo sapiens
MARAAALLPSRSPPTPLLWPLLLLLLLETGAQDVRVQVLPEVRGQLGGTVELPCHLLPPVPGLYISLVTWQRPDAPANHQNVAAFHPKMGPSFPSPKPGSERLSFVSAKQSTGQDTEAELQDATLALHGLTVEDEGNYTCEFATFPKGSVRGMTWLRVIAKPKNQAEAQKVTFSQDPTTVALCISKEGRPPARISWLSSLDWEAKETQVSGTLAGTVTVTSRFTLVPSGRADGVTVTCKVEHESFEEPALIPVTLSVRYPPEVSISGYDDNWYLGRTDATLSCDVRSNPEPTGYDWSTTSGTFPTSAVAQGSQLVIHAVDSLFNTTFVCTVTNAVGMGRAEQVIFVRETPNTAGAGATGGIIGGIIAAIIATAVAATGILICRQQRKEQTLQGAEEDEDLEGPPSYKPPTPKAKLEAQEMPSQLFTLGASEHSPLKTPYFDAGASCTEQKCSIHELPLGEVGPALGPSWVPLRAPGLVGTFLFRWGGGNLDPFFCLPVSECCRFCP

SEQ ID NO: 860144 - protein, 390 aa, Homo sapiens [sequence omitted]

SEQ ID NO: 860145 - protein, 165 aa, Homo sapiens
MYELGLIGTEVHFVCTVTNAVGMGRAEQVIFVRETPRASPRDVGPLVWGAVGGTLLVLLLLAGGSLAFILLRVRRRRKSPGGAGGGASGDGGFYDPKAQVLGNGDPVFWTPVVPGPMEPDGKDEEEEEEEEKAEKGLMLPPPPALEDDMESQLDGSLISRRAVYV

SEQ ID NO: 860146 - protein, 139 aa, Homo sapiens [sequence omitted]

SEQ ID NO: 860147 - protein, 244 aa, Homo sapiens
  misc_feature (5)..(6): Xaa can be any naturally occurring amino acid
  misc_feature (8)..(9): Xaa can be any naturally occurring amino acid
  misc_feature (18)..(18): Xaa can be any naturally occurring amino acid
TTLVXXPXXLKTPVCGVXKKKAAVRESGSMSQSCHMLVMTISVGYFGLSLDTPNLHGDIFVNCFLSAMVEVPAYVLAWLLLQYLPRRYSMATALFLGGSVLLFMQLVPPDLYYLATVLVMVGKFGVTAAFSMVYVYTAELYPTVVRNMGVGVSSTASRLGSILSPYFVYLGAYDRFLPYILMGSLTILTAILTLFLPESFGTPLPDTIDQMLRVKGMKHRKTPSHTRMLKDGQERPTILKSTAF

SEQ ID NO: 860148 - protein, 365 aa, Homo sapiens
MRDYDEVTAFLGEWGPFQRLIFFLLSASIIPNGFTGLSSVFLIATPEHRCRVPDAANLSSAWRNHTVPLRLRDGREVPHSCRRYRLATIANFSALGLEPGRDVDLGQLEQESCLDGWEFSQDVYLSTIVTEWNLVCEDDWKAPLTISLFFVGVLLGSFISGQLSDRFGRKNVLFVTMGMQTGFSFLQIFSKNFEMFVVLFVLVGMGQISNYVAAFVLGTEILGKSVRIIFSTLGVCIFYAFGYMVLPLFAYFIRDWRMLLVALTMPGVLCVALWWFIPESPRWLISQGRFEEAEVIIRKAAKANGIVVPSTIFDPSELQDLSSKKQQSHNILDLLRTWNIRMVTIMSIMLWYVKETCLRLPDKAS

SEQ ID NO: 860149 - protein, 71 aa, Homo sapiens
CPCRHGPDLQLCGSICPGYGHQVGVEYLILYFTIIPSPTFLETAVMSLKGDRVSNKTSQSFLVNLTYRQGN

SEQ ID NO: 860150 - protein, 557 aa, Homo sapiens
MRDYDEVTAFLGEWGPFQRLIFFLLSASIIPNGFTGLSSVFLIATPEHRCRVPDAANLSSAWRNHTVPLRLRDGREVPHSCRRYRLATIANFSALGLEPGRDVDLGQLEQESCLDGWEFSQDVYLSTIVTEWNLVCEDDWKAPLTISLFFVGVLLGSFISGQLSDRFGRKNVLFVTMGMQTGFSFLQIFSKNFEMFVVLFVLVGMGQISNYVAAFVLGTEILGKSVRIIFSTLGVCIFYAFGYMVLPLFAYFIRDWRMLLVALTMPGVLCVALWWFIPESPRWLISQGRFEEAEVIIRKAAKANGIVVPSTIFDPSELQDLSSKKQQSHNILDLLRTWNIRMVTIMSIMLWMTISVGYFGLSLDTPNLHGDIFVNCFLSAMVEVPAYVLAWLLLQYLPRRYSMATALFLGGSVLLFMQLVPPDLYYLATVLVMVGKFGVTAAFSMVYVYTAELYPTVVRNMGVGVSSTASRLGSILSPYFVYLGAYDRFLPYILMGSLTILTAILTLFLPESFGTPLPDTIDQMLRVKGMKHRKTPSHTRMLKDGQERPTILKSTAF

SEQ ID NO: 860151 - protein, 581 aa, Homo sapiens
MRDYDEVTAFLGEWGPFQRLIFFLLSASIIPNGFTGLSSVFLIATPEHRCRVPDAANLSSAWRNHTVPLRLRDGREVPHSCRRYRLATIANFSALGLEPGRDVDLGQLEQESCLDGWEFSQDVYLSTIVTEQDSGAYNAMKNRMGKKPALCLPAQWNLVCEDDWKAPLTISLFFVGVLLGSFISGQLSDRFGRKNVLFVTMGMQTGFSFLQIFSKNFEMFVVLFVLVGMGQISNYVAAFVLGTEILGKSVRIIFSTLGVCIFYAFGYMVLPLFAYFIRDWRMLLVALTMPGVLCVALWWFIPESPRWLISQGRFEEAEVIIRKAAKANGIVVPSTIFDPSELQDLSSKKQQSHNILDLLRTWNIRMVTIMSIMLWMTISVGYFGLSLDTPNLHGDIFVNCFLSAMVEVPAYVLAWLLLQYLPRRYSMATALFLGGSVLLFMQLVPPDLYYLATVLVMVGKFGVTAAFSMVYVYTAELYPTVVRNMGVGVSSTASRLGSILSPYFVYLGAYDRFLPYILMGSLTILTAILTLFLPESFGTPLPDTIDQMLRVKGMKHRKTPSHTRMLKDGQERPTILKSTAF

SEQ ID NO: 860152 - protein, 245 aa, Homo sapiens
MLFLQLQDLSSKKQQSHNILDLLRTWNIRMVTIMSIMLWMTISVGYFGLSLDTPNLHGDIFVNCFLSAMVEVPAYVLAWLLLQYLPRRYSMATALFLGGSVLLFMQLVPPDLYYLATVLVMVGKFGVTAAFSMVYVYTAELYPTVVRNMGVGVSSTASRLGSILSPYFVYLGAYDRFLPYILMGSLTILTAILTLFLPESFGTPLPDTIDQMLRVKGMKHRKTPSHTRMLKDGQERPTILKSTAF

SEQ ID NO: 860153 - protein, 748 aa, Homo sapiens
MKTSPRRPLILKRRRLPLPVQNAPSETSEEEPKRSPAQQESNQAEASKEVAESNSCKFPAGIKIINHPTMPNTQVVAIPNNANIHSIITALTAKGKESGSSGPNKFILISCGGAPTQPPGLRPQTQTSYDAKRTEVTLETLGPKPAARDVNLPRPPGALCEQKRETCADGEAAGCTINNSLSNIQWLRKMSSDGLGSRSIKQEMEEKENCHLEQRQVKVEEPSRPSASWQNSVSERPPYSYMAMIQFAINSTERKRMTLKDIYTWIEDHFPYFKHIAKPGWKNSIRHNLSLHDMFVRETSANGKVSFWTIHPSANRYLTLDQVFKQQKRPNPELRRNMTIKTELPLGARRKMKPLLPRVSSYLVPIQFPVNQSLVLQPSVKVPLPLAASLMSSELARHSKRVRIAPKVLLAEEGIAPLSSAGPGKEEKLLFGEGFSPLLPVQTIKEEEIQPGEEMPHLARPIKVESPPLEEWPSPAPSFKEESSHSWEDSSQSPTPRPKKSYSGLRSPTRCVSEMLVIQHRERRERSRSRRKQHLLPPCVDEPELLFSEGPSTSRWAAELPFPADSSDPASQLSYSQEVGGPFKTPIKETLPISSTPSKSVLPRTPESWRLTPPAKVGGLDFSPVQTSQGASDPLPDPLGLMDLSTTPLQSAPPLESPQRLLSSEPLDLISVPFGNSSPSDIDVPKPGSPEPQVSGLAANRSLTEGLVLDTMNDSLSKILLDISFPGLDEDPLGPDNINWSQFIPELQ

SEQ ID NO: 860154 - protein, 761 aa, Homo sapiens
GRVGRPTLSATAGLPLPVQNAPSETSEEEPKRSPAQQESNQAEASKEVAESNSCKFPAGIKIINHPTMPNTQVVAIPNNANIHSIITALTAKGKESGSSGPNKFILISCGGAPTQPPGLRPQTQTSYDAKRTEVTLETLGPKPAARDVNLPRPPGALCEQKRETCADGEAAGCTINNSLSNIQWLRKMSSDGLGSRSIKQEMEEKENCHLEQRQVKVEEPSRPSASWQNSVSERPPYSYMAMIQFAINSTERKRMTLKDIYTWIEDHFPYFKHIAKPGWKNSIRHNLSLHDMFVRETSANGKVSFWTIHPSANRYLTLDQVFKPLDPGSPQLPEHLESQQKRPNPELRRNMTIKTELPLGARRKMKPLLPRVSSYLVPIQFPVNQSLVLQPSVKVPLPLAASLMSSELARHSKRVRIAPKVLLAEEGIAPLSSAGPGKEEKLLFGEGFSPLLPVQTIKEEEIQPGEEMPHLARPIKVESPPLEEWPSPAPSFKEESSHSWEDSSQSPTPRPKKSYSGLRSPTRCVSEMLVIQHRERRERSRSRRKQHLLPPCVDEPELLFSEGPSTSRWAAELPFPADSSDPASQLSYSQEVGGPFKTPIKETLPISSTPSKSVLPRTPESWRLTPPAKVGGLDFSPVQTSQGASDPLPDPLGLMDLSTTPLQSAPPLESPQRLLSSEPLDLISVPFGNSSPSDIDVPKPGSPEPQVSGLAANRSLTEGLVLDTMNDSLSKILLDISFPGLDEDPLGPDNINWSQFIPELQ

SEQ ID NO: 860155 - protein, 763 aa, Homo sapiens
MKTSPRRPLILKRRRLPLPVQNAPSETSEEEPKRSPAQQESNQAEASKEVAESNSCKFPAGIKIINHPTMPNTQVVAIPNNANIHSIITALTAKGKESGSSGPNKFILISCGGAPTQPPGLRPQTQTSYDAKRTEVTLETLGPKPAARDVNLPRPPGALCEQKRETCADGEAAGCTINNSLSNIQWLRKMSSDGLGSRSIKQEMEEKENCHLEQRQVKVEEPSRPSASWQNSVSERPPYSYMAMIQFAINSTERKRMTLKDIYTWIEDHFPYFKHIAKPGWKNSIRHNLSLHDMFVRETSANGKVSFWTIHPSANRYLTLDQVFKPLDPGSPQLPEHLESQQKRPNPELRRNMTIKTELPLGARRKMKPLLPRVSSYLVPIQFPVNQSLVLQPSVKVPLPLAASLMSSELARHSKRVRIAPKVLLAEEGIAPLSSAGPGKEEKLLFGEGFSPLLPVQTIKEEEIQPGEEMPHLARPIKVESPPLEEWPSPAPSFKEESSHSWEDSSQSPTPRPKKSYSGLRSPTRCVSEMLVIQHRERRERSRSRRKQHLLPPCVDEPELLFSEGPSTSRWAAELPFPADSSDPASQLSYSQEVGGPFKTPIKETLPISSTPSKSVLPRTPESWRLTPPAKVGGLDFSPVQTSQGASDPLPDPLGLMDLSTTPLQSAPPLESPQRLLSSEPLDLISVPFGNSSPSDIDVPKPGSPEPQVSGLAANRSLTEGLVLDTMNDSLSKILLDISFPGLDEDPLGPDNINWSQFIPELQ

SEQ ID NO: 860156 - protein, 470 aa, Homo sapiens [sequence omitted]

SEQ ID NO: 860157 - protein, 783 aa, Homo sapiens
MKTSPRRPLILKRRRLPLPVQNAPSETSEEEPKRSPAQQESNQAEASKEVAESNSCKFPAGIKIINHPTMPNTQVVAIPNNANIHSIITALTAKGKESGSSGPNKFILISCGGAPTQPPGLRPQTQTSYDAKRTEVTLETLGPKPAARDVNLPRPPGALCEQKRETCADGEAAGCTINNSLSNIQWLRKMSSDGLGSRSIKQEMEEKENCHLEQRQVKVEEPSRPSASWQNSVSERPPYSYMAMIQFAINSTERKRMTLKDIYTWIEDHFPYFKHIAKPGWKNSIRHNLSLHDMFVRETSANGKVSFWTIHPSANRYLTLDQVFKPLDPGSPQLPEHLESATHLPTHHSFGDCSLRPSPQQQKRPNPELRRNMTIKTELPLGARRKMKPLLPRVSSYLVPIQFPVNQSLVLQPSVKVPLPLAASLMSSELARHSKRVRIAPKVLLAEEGIAPLSSAGPGKEEKLLFGEGFSPLLPVQTIKEEEIQPGEEMPHLARPIKVESPPLEEWPSPAPSFKEESSHSWEDSSQSPTPRPKKSYSGLRSPTRCVSEMLVIQHRERRERSRSRRKQHLLPPCVDEPELLFSEGPSTSRWAAELPFPADSSDPASQLSYSQEVGGPFKTPIKETLPISSTPSKSVLPRTPESWRLTPPAKVGGLDFSPVQTSQGASDPLPDPLGLMDLSTTPLQSAPPLESPQRLLSSEPLDLISVPFGNSSPSDIDVPKPGSPEPQVSGLAANRSLTEGLVLDTMNDSLSKILLDISFPGLDEDPLGPDNINWSQFIPELQ

SEQ ID NO: 860158 - protein, 759 aa, Homo sapiens
MKTSPRRPLILKRRRLPLPVQNAPSETSEEEPKRSPAQQESNQAEASKEVAESNSCKFPAGIKIINHPTMPNTQVVAIPNNANIHSIITALTAKGKESGSSGPNKFILISCGGAPTQPPGLRPQTQTSYDAKRTEVTLETLGPKPAARDVNLPRPPGALCEQKRETCADGEAAGCTINNSLSNIQWLRKMSSDGLGSRSIKQEMEEKENCHLEQRQVKVEEPSRPSASWQNSVSERPPYSYMAMIQFAINSTERKRMTLKDIYTWIEDHFPYFKHIAKPGWKNSIRHNLSLHDMFVRETSANGKVSFWTIHPSANRYLTLDQVFKQQKRPNPELRRNMTIKTELPLGARRKMKPLLPRVSSYLVPIQFPVNQSLVLQPSVKVPLPLAASLMSSELARHSKRVRIAPKVFGEQVVFGYMVLLAEEGIAPLSSAGPGKEEKLLFGEGFSPLLPVQTIKEEEIQPGEEMPHLARPIKVESPPLEEWPSPAPSFKEESSHSWEDSSQSPTPRPKKSYSGLRSPTRCVSEMLVIQHRERRERSRSRRKQHLLPPCVDEPELLFSEGPSTSRWAAELPFPADSSDPASQLSYSQEVGGPFKTPIKETLPISSTPSKSVLPRTPESWRLTPPAKVGGLDFSPVQTSQGASDPLPDPLGLMDLSTTPLQSAPPLESPQRLLSSEPLDLISVPFGNSSPSDIDVPKPGSPEPQVSGLAANRSLTEGLVLDTMNDSLSKILLDISFPGLDEDPLGPDNINWSQFIPELQ

SEQ ID NO: 860159 - protein, 763 aa, Homo sapiens; identical to SEQ ID NO: 860155

SEQ ID NO: 860160 - protein, 763 aa, Homo sapiens; identical to SEQ ID NO: 860155

SEQ ID NO: 860161 - protein, 696 aa, Homo sapiens
MKTSPRRPLILKRRRLPLPVQNAPSETSEEEPKRSPAQQESNQAEASKEVAESNSCKFPAGIKIINHPTMPNTQVVAIPNNANIHSIITALTAKGKESGSSGPNKFILISCGGAPTQPPGLRPQTQTSYDAKRTEVTLETLGPKPAARDVNLPRPPGALCEQKRETCADGEAAGCTINNSLSNIQWLRKMSSDGLGSRSIKQEMEEKENCHLEQRQVKVEEPSRPSASWQNSVSERPPYSYMAMIQFAINSTERKRMTLKDIYTWIEDHFPYFKHIAKPGWKNSIRHNLSLHDMFVRETSANGKVSFWTIHPSANRYLTLDQVFKPLDPGSPQLPEHLESQQKRPNPELRRNMTIKTELPLGARRKMKPLLPRVSSYLVPIQFPVNQSLVLQPSVKVPLPLAASLMSSELARHSKRVRIAPKVLLAEEGIAPLSSAGPGKEEKLLFGEGFSPLLPVQTIKEEEIQPGEEMPHLARPIKVESPPLEEWPSPAPSFKEESSHSWEDSSQSPTPRPKKSYSGLRSPTRCVSEMLVIQHRERRERSRSRRKQHLLPPCVDEPELLFSEGPSTSRWAAELPFPADSSDPASQLSYSQEVGGPFKTPIKETLPISSTPSKSVLPRTPESWRLTPPAKVGGLDFSPVQTSQGASDPLPDPLGLMDLSTTPLQSAPPLESPQRLLSVHPKPLSEDSRQGLFCSS

SEQ ID NO: 860162 - protein, 115 aa, Homo sapiens
LSSEPFAVIQGGEHFAREWCSPLNPKHPSSSEPLDLISVPFGNSSPSDIDVPKPGSPEPQVSGLAANRSLTEGLVLDTMNDSLSKILLDISFPGLDEDPLGPDNINWSQFIPELQ

SEQ ID NO: 860163 - protein, 333 aa, Homo sapiens [sequence omitted]

SEQ ID NO: 860164 - protein, 296 aa, Homo sapiens [sequence omitted]

SEQ ID NO: 860165 - protein, 763 aa, Homo sapiens; identical to SEQ ID NO: 860155

SEQ ID NO: 860166 - protein, 801 aa, Homo sapiens
MKTSPRRPLILKRRRLPLPVQNAPSETSEEEPKRSPAQQESNQAEASKEVAESNSCKFPAGIKIINHPTMPNTQVVAIPNNANIHSIITALTAKGKESGSSGPNKFILISCGGAPTQPPGLRPQTQTSYDAKRTEVTLETLGPKPAARDVNLPRPPGALCEQKRETCADGEAAGCTINNSLSNIQWLRKMSSDGLGSRSIKQEMEEKENCHLEQRQVKVEEPSRPSASWQNSVSERPPYSYMAMIQFAINSTERKRMTLKDIYTWIEDHFPYFKHIAKPGWKNSIRHNLSLHDMFVRETSANGKVSFWTIHPSANRYLTLDQVFKPLDPGSPQLPEHLESQQKRPNPELRRNMTIKTELPLGARRKMKPLLPRVSSYLVPIQFPVNQSLVLQPSVKVPLPLAASLMSSELARHSKRVRIAPKVFGEQVVFGYMSKFFSGDLRDFGTPITSLFNFIFLCLSVLLAEEGIAPLSSAGPGKEEKLLFGEGFSPLLPVQTIKEEEIQPGEEMPHLARPIKVESPPLEEWPSPAPSFKEESSHSWEDSSQSPTPRPKKSYSGLRSPTRCVSEMLVIQHRERRERSRSRRKQHLLPPCVDEPELLFSEGPSTSRWAAELPFPADSSDPASQLSYSQEVGGPFKTPIKETLPISSTPSKSVLPRTPESWRLTPPAKVGGLDFSPVQTSQGASDPLPDPLGLMDLSTTPLQSAPPLESPQRLLSSEPLDLISVPFGNSSPSDIDVPKPGSPEPQVSGLAANRSLTEGLVLDTMNDSLSKILLDISFPGLDEDPLGPDNINWSQFIPELQ

SEQ ID NO: 860167 - protein, 641 aa, Homo sapiens
GRVGRPTLSATVRVTLETLGPKPAARDVNLPRPPGALCEQKRETCADGEAAGCTINNSLSNIQWLRKMSSDGLGSRSIKQEMEEKENCHLEQRQVKVEEPSRPSASWQNSVSERPPYSYMAMIQFAINSTERKRMTLKDIYTWIEDHFPYFKHIAKPGWKNSIRHNLSLHDMFVRETSANGKVSFWTIHPSANRYLTLDQVFKPLDPGSPQLPEHLESQQKRPNPELRRNMTIKTELPLGARRKMKPLLPRVSSYLVPIQFPVNQSLVLQPSVKVPLPLAASLMSSELARHSKRVRIAPKVLLAEEGIAPLSSAGPGKEEKLLFGEGFSPLLPVQTIKEEEIQPGEEMPHLARPIKVESPPLEEWPSPAPSFKEESSHSWEDSSQSPTPRPKKSYSGLRSPTRCVSEMLVIQHRERRERSRSRRKQHLLPPCVDEPELLFSEGPSTSRWAAELPFPADSSDPASQLSYSQEVGGPFKTPIKETLPISSTPSKSVLPRTPESWRLTPPAKVGGLDFSPVQTSQGASDPLPDPLGLMDLSTTPLQSAPPLESPQRLLSSEPLDLISVPFGNSSPSDIDVPKPGSPEPQVSGLAANRSLTEGLVLDTMNDSLSKILLDISFPGLDEDPLGPDNINWSQFIPELQ

SEQ ID NO: 860168 - protein, 763 aa, Homo sapiens; identical to SEQ ID NO: 860155

SEQ ID NO: 860169 - protein, 763 aa, Homo sapiens; identical to SEQ ID NO: 860155

SEQ ID NO: 860170 - protein, 763 aa, Homo sapiens; identical to SEQ ID NO: 860155

SEQ ID NO: 860171 - protein, 681 aa, Homo sapiens
MKTSPRRPLILKRRRLPLPVQNAPSETSEEEPKRSPAQQESNQAEASKEVAESNSCKFPAGIKIINHPTMPNTQVVAIPNNANIHSIITALTAKGKESGSSGPNKFILISCGGAPTQPPGLRPQTQTSYDAKRTEVTLETLGPKPAARDVNLPRPPGALCEQKRETCADGEAAGCTINNSLSNIQWLRKMSSDGLGSRSIKQEMEEKENCHLEQRQVKVEEPSRPSASWQNSVSERPPYSYMAMIQFAINSTERKRMTLKDIYTWIEDHFPYFKHIAKPGWKNSIRHNLSLHDMFVRETSANGKVSFWTIHPSANRYLTLDQVFKPLDPGSPQLPEHLESQQKRPNPELRRNMTIKTELPLGARRKMKPLLPRVSSYLVPIQFPVNQSLVLQPSVKVPLPLAASLMSSELARHSKRVRIAPKVLLAEEGIAPLSSAGPGKEEKLLFGEGFSPLLPVQTIKEEEIQPGEEMPHLARPIKVESPPLEEWPSPAPSFKEESSHSWEDSSQSPTPRPKKSYSGLRSPTRCVSEMLVIQHRERRERSRSRRKQHLLPPCVDEPELLFSEGPSTSRWAAELPFPADSSDPASQLSYSQEVGGPFKTRTCISSPRIVSQNLIWGYAPQIGAVSASQPQGLTCLPGWVSHLDGPVRRSGLTSAWIRLSPAAVLTFRGYAVGGEIKHPRV

SEQ ID NO: 860172 - protein, 432 aa, Homo sapiens [sequence omitted]

SEQ ID NO: 860173 - protein, 343 aa, Homo sapiens
MKTSPRRPLILKRRRLPLPVQNAPSETSEEEPKRSPAQQESNQAEASKEVAESNSCKFPAGIKIINHPTMPNTQVVAIPNNANIHSIITALTAKGKESGSSGPNKFILISCGGAPTQPPGLRPQTQTSYDAKRTEVTLETLGPKPAARDVNLPRPPGALCEQKRETCADGEAAGCTINNSLSNIQWLRKMSSDGLGSRSIKQEMEEKENCHLEQRQVKVEEPSRPSASWQNSVSERPPYSYMAMIQFAINSTERKRMTLKDIYTWIEDHFPYFKHIAKPGWKNSIRHNLSLHDMFVRETSANGKVSFWTIHPSANRYLTLDQVFKPLTQVSTMPRTEGILKND

SEQ ID NO: 860174 - protein, 169 aa, Homo sapiens
DFKTSKRHKEDQNPYVIFLCVLSGDRWFTLSLFPFQVLLAEEGIAPLSSAGPGKEEKLLFGEGFSPLLPVQTIKEEEIQPGEEMPHLARPIKVESPPLEEWPSPAPSFKEESSHSWEDSSQSPTPRPKKSYSGLRSPTRCVSEMLVIQHRERRERSRSRRKQHLLPPCV

SEQ ID NO: 860175 - protein, 391 aa, Homo sapiens
MALSKTFGQKPVKFQLEDDGEFYMIGSEVGNYLRMFRGSLYKRYPSLWRRLATVEERKKIVASSHDHGYTTLATSVTLLKASEVEEILDGNDEKYKAVSISTEPPTYLREQKAKRNSQWVPTLPNSSHHLDAVPCSTTINRNRMGRDKKRTFPLWCGCIAALTLRADSALVLRFDDHDPAVIHENASQPEVLVPIRLDMEIDGQKLRDAFTWNMNEKLMTPEMFSEILCDDLDLNPLTFVPAIASAIRQQIESYPTDSILEDQSDQRVIIKLNIHVGNISLVDQFEWDMSEKENSPEKFALKLCSELGLGGEFVTTIAYSIRGQLSWHQKTYAFSENPLPTVEIAIRNTGDADQWCPLLETLTDAEMEKKIRDQDRNTRRMRRLANTAPAW

SEQ ID NO: 860176 - protein, 228 aa, Homo sapiens
MAKVRGWVAGFDDHDPAVIHENASQPEVLVPIRLDMEIDGQKLRDAFTWNMNEKLMTPEMFSEILCDDLDLNPLTFVPAIASAIRQQIESYPTDSILEDQSDQRVIIKLNIHVGNISLVDQFEWDMSEKENSPEKFALKLCSELGLGGEFVTTIAYSIRGQLSWHQKTYAFSENPLPTVEIAIRNTGDADQWCPLLETLTDAEMEKKIRDQDRNTRRMRRLANTAPAW

SEQ ID NO: 860177 - protein, 374 aa, Homo sapiens
MMALSKTFGQKPVKFQLEDDGEFYMIGSEVGNYLRMFRGSLYKRYPSLWRRLATVEERKKIVASSHDHGYTTLATSVTLLKASEVEEILDGNDEKYKAVSISTEPPTYLREQKAKRNSQWVPTLPNSSHHLDAVPCSTTINRNRMGRDKKRTFPLCFDDHDPAVIHENASQPEVLVPIRLDMEIDGQKLRDAFTWNMNEKLMTPEMFSEILCDDLDLNPLTFVPAIASAIRQQIESYPTDSILEDQSDQRVIIKLNIHVGNISLVDQFEWDMSEKENSPEKFALKLCSELGLGGEFVTTIAYSIRGQLSWHQKTYAFSENPLPTVEIAIRNTGDADQWCPLLETLTDAEMEKKIRDQDRNTRRMRRLANTAPAW

SEQ ID NO: 860178 - protein, 383 aa, Homo sapiens
MMALSKTFGQKPVKFQLEDDGEFYMIGSEVGNYLRMFRGSLYKRYPSLWRRLATVEERKKIVASSHGKKTKPNTKDHGYTTLATSVTLLKASEVEEILDGNDEKYKAVSISTEPPTYLREQKAKRNSQWVPTLPNSSHHLDAVPCSTTINRNRMGRDKKRTFPLCFDDHDPAVIHENASQPEVLVPIRLDMEIDGQKLRDAFTWNMNEKLMTPEMFSEILCDDLDLNPLTFVPAIASAIRQQIESYPTDSILEDQSDQRVIIKLNIHVGNISLVDQFEWDMSEKENSPEKFALKLCSELGLGGEFVTTIAYSIRGQLSWHQKTYAFSENPLPTVEIAIRNTGDADQWCPLLETLTDAEMEKKIRDQDRNTRRMRRLANTAPAW

SEQ ID NO: 860179 - protein, 383 aa, Homo sapiens; identical to SEQ ID NO: 860178

SEQ ID NO: 860180 - protein, 374 aa, Homo sapiens; identical to SEQ ID NO: 860177

SEQ ID NO: 860181 - protein, 374 aa, Homo sapiens; identical to SEQ ID NO: 860177

SEQ ID NO: 860182 - protein, 298 aa, Homo sapiens
SVLMDTAPHLPLGLLFPEVGGGLCADGHSLVLLREQKAKRNSQWVPTLPNSSHHLDAVPCSTTINRNRMGRDKKRTFPLCFDDHDPAVIHENASQPEVLVPIRLDMEIDGQKLRDAFTWNMNEKLMTPEMFSEILCDDLDLNPLTFVPAIASAIRQQIESYPTDSILEDQSDQRVIIKLNIHVGNISLVDQFEWDMSEKENSPEKFALKLCSELGLGGEFVTTIAYSIRGQLSWHQKTYAFSENPLPTVEIAIRNTGDADQWCPLLETLTDAEMEKKIRDQDRNTRRMRRLANTAPAW

SEQ ID NO: 860183 - protein, 258 aa, Homo sapiens
CSEDTRLLSEYEHCESSWPCSTTINRNRMGRDKKRTFPLCFDDHDPAVIHENASQPEVLVPIRLDMEIDGQKLRDAFTWNMNEKLMTPEMFSEILCDDLDLNPLTFVPAIASAIRQQIESYPTDSILEDQSDQRVIIKLNIHVGNISLVDQFEWDMSEKENSPEKFALKLCSELGLGGEFVTTIAYSIRGQLSWHQKTYAFSENPLPTVEIAIRNTGDADQWCPLLETLTDAEMEKKIRDQDRNTRRMRRLANTAPAW

SEQ ID NO: 860184 - protein, 223 aa, Homo sapiens
MFTFSFDDHDPAVIHENASQPEVLVPIRLDMEIDGQKLRDAFTWNMNEKLMTPEMFSEILCDDLDLNPLTFVPAIASAIRQQIESYPTDSILEDQSDQRVIIKLNIHVGNISLVDQFEWDMSEKENSPEKFALKLCSELGLGGEFVTTIAYSIRGQLSWHQKTYAFSENPLPTVEIAIRNTGDADQWCPLLETLTDAEMEKKIRDQDRNTRRMRRLANTAPAW

SEQ ID NO: 860185 - protein, 420 aa, Homo sapiens
  misc_feature (420)..(420): Xaa can be any naturally occurring amino acid
MMALSKTFGQKPVKFQLEDDGEFYMIGSEVGNYLRMFRGSLYKRYPSLWRRLATVEERKKIVASSHDHGYTTLATSVTLLKASEVEEILDGNDEKYKAVSISTEPPTYLREQKAKRNSQWVPTLPNSSHHLDAVPCSTTINRNRMGRDKKRTFPLCFDDHDPAVIHENASQPEVLVPIRLDMEIDGQKLRDAFTWNMNEKLMTPEMFSEILCDDLDLNPLTFVPAIASAIRQQIESYPTDSILEDQSDQRVIIKLNIHVGNISLVDQFEWDMSEKENSPEKFALKLCSELGLGGEFVTTIAYSIRGQLSWHQKTYAFSENPLPTVEIAIRNTGDADQWCPLLETLTDASAAAMMMMALSKTFGQKPVKFQLEDDGEFYMIGSEVGNYLRMFRGSLYKRYPSLWRRLPTVEERKKIVHRYX

SEQ ID NO: 860186 - protein, 213 aa, Homo sapiens
MVQYYASSVRGARSPIRLDVRSMFAKLIDSNFWDIELEFNYILELFSEILCDDLDLNPLTFVPAIASAIRQQIESYPTDSILEDQSDQRVIIKLNIHVGNISLVDQFEWDMSEKENSPEKFALKLCSELGLGGEFVTTIAYSIRGQLSWHQKTYAFSENPLPTVEIAIRNTGDADQWCPLLETLTDAEMEKKIRDQDRNTRRMRRLANTAPAW

SEQ ID NO: 860187 - protein, 276 aa, Homo sapiens
MMALSKTFGQKPVKFQLEDDGEFYMIGSEVGNYLRMFRGSLYKRYPSLWRRLATVEERKKIVASSHDHGYTTLATSVTLLKASEVEEILDGNDEKYKAVSISTEPPTYLREQKAKRNSQWVPTLPNSSHHLDAVPCSTTINRNRMGRDKKRTFPLCFDDHDPAVIHENASQPEVLVPIRLDMEIDGQKLRDAFTWNMNGTRQSGLAGPGPNPCVLRGNSPVSCQLPVRQILDLTRRTSGHSFGGCGLWVQSWFCCCSLWIGPVNFGLFPHTEVGWP

SEQ ID NO: 860188 - protein, 188 aa, Homo sapiens
MMALSKTFGQKPVKFQLEDDGEFYMIGSEVGNYLRMFRGSLYKRYPSLWRRLATVEERKKIVASSHDHGYTTLATSVTLLKASEVEEILDGNDEKYKAVSISTEPPTYLREQKAKRNSQWVPTLPNSSHHLDAVPCSTTINRNRMGRDKKRTFPLCFDDHDPAVIHENASQPEVLVPIRLDMEIDGQG

SEQ ID NO: 860189 - protein, 174 aa, Homo sapiens
MALSKTFGQKPVKFQLEDDGEFYMIGSEVGNYLRMFRGSLYKRYPSLWRRLATVEERKKIVASSHDHGYTTLATSVTLLKASEVEEILDGNDEKYKAVSISTEPPTYLREQKAKRNSQWVPTLPNSSHHLDAVPCSTTINRNRMGRDKKRTFPLWCGCIAALTLRADSALVLQL

SEQ ID NO: 860190 - protein, 171 aa, Homo sapiens
ALWHQHGPARAVLSRTTSTASGPFLHLRDRETLGTKALLKVHFEGKPMGSWRQHLLWKGPGASSSSLEVQVTGASTGCQQCCWEEQGTEQGPKLSEDSPSIAGKVIPLTASPPRSENPLPTVEIAIRNTGDADQWCPLLETLTDAEMEKKIRDQDRNTRRMRRLANTAPAW

SEQ ID NO: 860191 - protein, 197 aa, Homo sapiens
MMALSKTFGQKPVKFQLEDDGEFYMIGSEVGNYLRMFRGSLYKRYPSLWRRLATVEERKKIVASSHGKKTKPNTKDHGYTTLATSVTLLKASEVEEILDGNDEKYKAVSISTEPPTYLREQKAKRNSQWVPTLPNSSHHLDAVPCSTTINRNRMGRDKKRTFPLCFDDHDPAVIHENASQPEVLVPIRLDMEIDGQG

SEQ ID NO: 860192 - protein, 221 aa, Homo sapiens
LDVLHPLGWLLCATATSRVTQCCLSVTDHGYTTLATSVTLLKASEVEEILDGNDEKYKAVSISTEPPTYLREQKAKRNSQWVPTLPNSSHHLDAVPCSTTINRNRMGRDKKRTFPLWCGCIAALTLRADSALVLQHVSVPSSPEKHSALTLCSPQRHSTSSPLNCCVSLTSRTLSIASLALSAVTLPCPPHLSGPSSGVTQGAVLGPFLCPQFHMSGPQPV

SEQ ID NO: 860193 - protein, 374 aa, Homo sapiens; identical to SEQ ID NO: 860177

SEQ ID NO: 860194 - protein, 374 aa, Homo sapiens; identical to SEQ ID NO: 860177

SEQ ID NO: 860195 - protein, 374 aa, Homo sapiens; identical to SEQ ID NO: 860177

SEQ ID NO: 860196 - protein, 374 aa, Homo sapiens; identical to SEQ ID NO: 860177

SEQ ID NO: 860197 - protein, 228 aa, Homo sapiens; identical to SEQ ID NO: 860176

SEQ ID NO: 860198 - protein, 355 aa, Homo sapiens
MMALSKTFGQKPVKFQLEDDGEFYMIGSEVGNYLRMFRGSLYKRYPSLWRRLATVEERKKIVASSHDHGYTTLATSVTLLKASEVEEILDGNDEKYKAVSISTEPPTYLREQKAKRNSQWVPTLPNSSHHLDAVPCSTTINRNRMGRDKKRTFPLCFDDHDPAVIHENASQPEVLVPIRLDMEIDGQKLRDAFTWNMNEKLMTPEMFSEILCDDLDLNPLTFVPAIASAIRQQIESYPTDSILEDQSDQRVIIKLNIHVGNISLVDQFEWDMSEKENSPEKFALKLCSELGLGGEFVTTIAYSIRGQLSWHQKTYAFSENPLPTVETTSVCSEVLCTRDTPHSGGDYPLWKRGRK

SEQ ID NO: 860199 - protein, 188 aa, Homo sapiens; identical to SEQ ID NO: 860188

SEQ ID NO: 860200 - protein, 260 aa, Homo sapiens
MMALSKTFGQKPVKFQLEDDGEFYMIGSEVGNYLRMFRGSLYKRYPSLWRRLATVEERKKIVASSHDHGYTTLATSVTLLKASEVEEILDGNDEKYKAVSISTEPPTYLREQKAKRNSQWVPTLPNSSHHLDAVPCSTTINRNRMGRDKKRTFPLWCGCIAALTLRADSALVLQHVSVPSSPEKHSALTLCSPQRHSTSSPLNCCVSLTSRTLSIASLALSAVTLPCPPHLSGPSSGVTQGAVLGPFLCPQFHMSGPQPV

SEQ ID NO: 860201 - protein, 306 aa, Homo sapiens
MAEVSIDQSKLPGVKEVCRDFAVLEDHTLAHSLQEQEIEHHLASNVQRNRLVQHDLQVAKQLQEEDLKAQAQLQKRYKDLEQQDCEIAQEIQEKLAIEAERRRIQEKKDEDIARLLQEKELQEEKKRKKHFPEFPATRAYADSYYYEDGGMKPRVMKEAVSTPSRMAHRDQEWYDAEIARKLQEEELLATQVDMRAAQVAQDEEIARLLMAEEKKAYKKAKEREKSSLDKRKQDPEWKPKTAKAANSKSKESDEPHHSKNERPARPPPPIMTDGEDADYTHFTNQQSSTRHFSKSESSHKGFHYKH

SEQ ID NO: 860202 - protein, 306 aa, Homo sapiens; identical to SEQ ID NO: 860201

SEQ ID NO: 860203 - protein, 306 aa, Homo sapiens; identical to SEQ ID NO: 860201

SEQ ID NO: 860204 - protein, 199 aa, Homo sapiens
MAEVSIDQSKLPGVKEVCRDFAVLEDHTLAHSLQEQEIEHHLASNVQRNRLVQHDLQVAKQLQEEDLKAQAQLQKRYKDLEQQDCEIAQEIQEKLAIEAERRRIQEKKDEDIARLLQEKELQEEKKRKKHFPEFPATRAYADSYYYEDGERIRERMNECGMCSASSVTQKGVQLQGPRRADGGLSNLGRAGQREAQLGK

SEQ ID NO: 860205 - protein, 306 aa, Homo sapiens; identical to SEQ ID NO: 860201

SEQ ID NO: 860206 - protein, 169 aa, Homo sapiens
MAEVSIDQSKLPGVKEVCRDFAVLEDHTLAHSLQEQEIEHHLASNVQRNRLVQHDLQVAKQLQEEDLKAQAQLQKRYKDLEQQDCEIAQEIQEKLAIEAERRRIQEKKDEDIARLLQEKELQEEKKRKKHFPEFPATRAYADSYYYEDGGNNSCIMIYSILRLNHKTPL

SEQ ID NO: 860207 - protein, 84 aa, Homo sapiens
RLEIGKNSLDTKIDFHPSPHKKQGFTARKLYMGGTMGKVSTEEGDTGPGLLHSQRVRSSSTSMTQVIEDSLDGSPGIMYITTNQ

SEQ ID NO: 860208 - protein, 607 aa, Homo sapiens
MPRKKPFSVKQKKKQLQDKRERKRGLQDGLRSSSNSRSGSRERREEQTDTSDGESVTHHIRRLNQQPSQGLGPRGYDPNRYRLHFERDSREEVERRKRAAREQVLQPVSAELLELDIREVYQPGSVLDFPRRPPWSYEMSKEQLMSQEERSFQDYLGKIHGAYSSEKLSYFEHNLETWRQLWRVLEMSDIVLLITDIRHPVVNFPPALYEYVTGELGLALVLVLNKVDLAPPALVVAWKHYFHQHYPQLHVVLFTSFPRDPRTPQDPSSVLKKSRRRGRGWTRALGPEQLLRACEAITVGKVDLSSWREKIARDVAGATWGNGSGEEEEEEDGPAVLVEQQTDSAMEPTGPTQERYKDGVVTIGCVGFPNVGKSSLINGLVGRKVVSVSRTPGHTRYFQTYFLTPSVKLCDCPGLIFPSLLPRQLQVLAGIYPIAQIQEPYTAVGYLASRIPVQALLHLRHPEAEDPSAEHPWCAWDICEAWAEKRGYKTAKAARNDVYRAANSLLRLAVDGRLSLCFHPPGYSEQKGTWESHPETTELVVLQGRVGPAGDEEEEEEEELSSSCEEEGEEDRDADEEGEGDEETPTSAPGSSLAGRNPYALLGEDEC

SEQ ID NO: 860209 - protein, 607 aa, Homo sapiens; identical to SEQ ID NO: 860208

SEQ ID NO: 860210 - protein, 607 aa, Homo sapiens; identical to SEQ ID NO: 860208

SEQ ID NO: 860211 - protein, 605 aa, Homo sapiens
MGERVLWPLRAGQHWRHRPLPAGLQDGLRSSSNSRSGSRERREEQTDTSDGESVTHHIRRLNQQPSQGLGPRGYDPNRYRLHFERDSREEVERRKRAAREQVLQPVSAELLELDIREVYQPGSVLDFPRRPPWSYEMSKEQLMSQEERSFQDYLGKIHGAYSSEKLSYFEHNLETWRQLWRVLEMSDIVLLITDIRHPVVNFPPALYEYVTGELGLALVLVLNKVDLAPPALVVAWKHYFHQHYPQLHVVLFTSFPRDPRTPQDPSSVLKKSRRRGRGWTRALGPEQLLRACEAITVGKVDLSSWREKIARDVAGATWGNGSGEEEEEEDGPAVLVEQQTDSAMEPTGPTQERYKDGVVTIGCVGFPNVGKSSLINGLVGRKVVSVSRTPGHTRYFQTYFLTPSVKLCDCPGLIFPSLLPRQLQVLAGIYPIAQIQEPYTAVGYLASRIPVQALLHLRHPEAEDPSAEHPWCAWDICEAWAEKRGYKTAKAARNDVYRAANSLLRLAVDGRLSLCFHPPGYSEQKGTWESHPETTELVVLQGRVGPAGDEEEEEEEELSSSCEEEGEEDRDADEEGEGDEETPTSAPGSSLAGRNPYALLGEDEC

SEQ ID NO: 860212 - protein, 521 aa, Homo sapiens
MPRKKPFSVKQKKKQLQDKRERKRGLQDGLRSSSNSRSGSRERREEQTDTSDGESVTHHIRRLNQQPSQGLGPRGYDPNRYRLHFERDSREEVERRKRAAREQVLQPVSAELLELDIREVYQPGSVLDFPRRPPWSYEMSKEQLMSQEERSFQDYLGKIHGAYSSEKLSYFEHNLETWRQLWRVLEMSDIVLLITDIRHPVVNFPPALYEYVTGELGLALVLVLNKVDLAPPALVVAWKHYFHQHYPQLHVVLFTSFPRDPRTPQDPSSVLKKSRRRGRGWTRALGPEQLLRACEAITVGKVDLSSWREKIARDVAGATWGNGSGEEEEEEDGPAVLVEQQTDSAMEPTGPTQERYKDGVVTIGCVGFPNVGKSSLINGLVGRKVVSVSRTPGHTRYFQTYFLTPSVKLCDCPGLIFPSLLPRQLQVLAGIYPIAQIQEPYTAVGYLASRIPVQALLHLRHPEAEDPSAEHPWCAWDICEAWAEKRGYKTAKAARNDVYRANNLYSQLGWQRGDTPRSVQK

SEQ ID NO: 860213 - protein, 262 aa, Homo sapiens
MEPTGPTQERYKDGVVTIGCVGFPNVGKSSLINGLVGRKVVSVSRTPGHTRYFQTYFLTPSVKLCDCPGLIFPSLLPRQLQVLAGIYPIAQIQEPYTAVGYLASRIPVQALLHLRHPEAEDPSAEHPWCAWDICEAWAEKRGYKTAKAARNDVYRAANSLLRLAVDGRLSLCFHPPGYSEQKGTWESHPETTELVVLQGRVGPAGDEEEEEEEELSSSCEEEGEEDRDADEEGEGDEETPTSAPGSSLAGRNPYALLGEDEC

SEQ ID NO: 860214 - protein, 288 aa, Homo sapiens
GSGDTVDGNNASRQPQELAGPDPPCSKPAPGPVQERYKDGVVTIGCVGFPNVGKSSLINGLVGRKVVSVSRTPGHTRYFQTYFLTPSVKLCDCPGLIFPSLLPRQLQVLAGIYPIAQIQEPYTAVGYLASRIPVQALLHLRHPEAEDPSAEHPWCAWDICEAWAEKRGYKTAKAARNDVYRAANSLLRLAVDGRLSLCFHPPGYSEQKGTWESHPETTELVVLQGRVGPAGDEEEEEEEELSSSCEEEGEEDRDADEEGEGDEETPTSAPGSSLAGRNPYALLGEDEC

SEQ ID NO: 860215 - protein, 216 aa, Homo sapiens
MPRKKPFSVKQKKKQLQDKRERKRGLQDGLRSSSNSRSGSRERREEQTDTSDGESVTHHIRRLNQQPSQGLGPRGYDPNRYRLHFERDSREEVERRKRAAREQVLQPVSAELLELDIREVYQPGSVLDFPRRPPWSYEMSKEQLMSQEERSFQDYLGKIHGAYSSEKLSYFEHNLETWRQLWRVLEMSDIVLLITDIRHPVVNFPPALYEYVTGLD

SEQ ID NO: 860216 - protein, 86 aa, Homo sapiens
MTGRVGKGKREGGTLRKVLSAHFPQVLAGIYPIAQIQEPYTAVGYLASRIPVQALLHLRHPEAEDPSAEHPWCAWDICEGEFHVPG

SEQ ID NO: 860217 - protein, 607 aa, Homo sapiens; identical to SEQ ID NO: 860208

SEQ ID NO: 860218 - protein, 304 aa, Homo sapiens
MPRKKPFSVKQKKKQLQDKRERKRGLQDGLRSSSNSRSGSRERREEQTDTSDGESVTHHIRRLNQQPSQGLGPRGYDPNRYRLHFERDSREEVERRKRAAREQVLQPVSAELLELDIREVYQPGSVLDFPRRPPWSYEMSKEQLMSQEERSFQDYLGKIHGAYSSEKLSYFEHNLETWRQLWRVLEMSDIVLLITDIRHPVVNFPPALYEYVTGELGLALVLVLNKVDLAPPALVVAWKHYFPSFPRDPRTPQDPSSVLKKSRRRGRGWTRALGPEQLLRAWSSRLIQQWSQLAQPKSATRMGW

SEQ ID NO: 860219 - protein, 517 aa, Homo sapiens
MPRKKPFSVKQKKKQLQDKRERKRGLQDGLRSSSNSRSGSRERREEQTDTSDGESVTHHIRRLNQQPSQGLGPRGYDPNRYRLHFERDSREEVERRKRAAREQVLQPVSAELLELDIREVYQPGSVLDFPRRPPWSYEMSKEQLMSQEERSFQDYLGKIHGAYSSEKLSYFEHNLETWRQLWRVLEMSDIVLLITDIRHPVVNFPPALYEYVTGELGLALVLVLNKVDLAPPALVVAWKHYFHQHYPQLHVVLFTSFPRDPRTPQDPSSVLKKSRRRGRGWTRALGPEQLLRACEAITVGKVDLSSWREKIARDVAGATWGNGSGEEEEEEDGPAVLVEQQTDSAMEPTGPTQERYKDGVVTIGCVGFPNVGKSSLINGLVGRKVVSVSRTPGHTRYFQTYFLTPSVKLCDCPGLIFPSLLPRQLQVLAGIYPIAQIQEPYTAVGYLASRIPVQALLHLRHPEAEDPSAEHPWCAWDICEGEFHVPGFAPPGFSCSSLPASPFTLPCLLSSPQRFCH

SEQ ID NO: 860220 - protein, 262 aa, Homo sapiens; identical to SEQ ID NO: 860213

SEQ ID NO: 860221 - protein, 469 aa, Homo sapiens
MSKEQLMSQEERSFQDYLGKIHGAYSSEKLSYFEHNLETWRQLWRVLEMSDIVLLITDIRHPVVNFPPALYEYVTGELGLALVLVLNKVDLAPPALVVAWKHYFHQHYPQLHVVLFTSFPRDPRTPQDPSSVLKKSRRRGRGWTRALGPEQLLRACEAITVGKVDLSSWREKIARDVAGATWGNGSGEEEEEEDGPAVLVEQQTDSAMEPTGPTQERYKDGVVTIGCVGFPNVGKSSLINGLVGRKVVSVSRTPGHTRYFQTYFLTPSVKLCDCPGLIFPSLLPRQLQVLAGIYPIAQIQEPYTAVGYLASRIPVQALLHLRHPEAEDPSAEHPWCAWDICEAWAEKRGYKTAKAARNDVYRAANSLLRLAVDGRLSLCFHPPGYSEQKGTWESHPETTELVVLQGRVGPAGDEEEEEEEELSSSCEEEGEEDRDADEEGEGDEETPTSAPGSSLAGRNPYALLGEDEC

SEQ ID NO: 860222 - protein, 454 aa, Homo sapiens
MPRKKPFSVKQKKKQLQDKRERKRGLQDGLRSSSNSRSGSRERREEQTDTSDGESVTHHIRRLNQQPSQGLGPRGYDPNRYRLHFERDSREEVERRKRAAREQVLQPVSAELLELDIREVYQPGSVLDFPRRPPWSYEMSKEQLMSQEERSFQDYLGKIHGAYSSEKLSYFEHNLETWRQLWRVLEMSDIVLLITDIRHPVVNFPPALYEYVTGELGLALVLVLNKVDLAPPALVVAWKHYFHQHYPQLHVVLFTSFPRDPRTPQDPSSVLKKSRRRGRGWTRALGPEQLLRACEAITVGKVDLSSWREKIARDVAGATWGNGSGEEEEEEDGPAVLVEQQTDSAMEPTGPTQERYKDGVVTIGCVGFPNVGKSSLINGLVGRKVVSVSRTPGHTRYFQTYFLTPSVKLCDCPGLIFPSLLPRQLQVLAGIYPIAQIQEPYTAVGYLASRIPSR

SEQ ID NO: 860223 - protein, 401 aa, Homo sapiens [sequence omitted]

SEQ ID NO: 860224 - protein, 136 aa, Homo sapiens
MPRKKPFSVKQKKKQLQDKRERKRGLQDGLRSSSNSRSGSRERREEQTDTSDGESVTHHIRRLNQQPSQGLGPRGYDPNRYRLHFERDSREEVERRKRAAREQVLQPVSAELLELDIREVYQPGSAGWPKPLCPAG

SEQ ID NO: 860225 - protein, 261 aa, Homo sapiens
MDGWMDVDGWMDGWMDVDGWMDGWMDVDGWMDGWMDVDGWMDGWMDVDGWMDGWMDVDGWMDGWMDVDGWMDGWMDVDGWMDGWMDVDGWMDGWMDVDGWMDGWMDVDGWMDGWMDVDGWMDGWMDVDGWMDGWMDVDGWMDGWMDVDGWMDGWMDVDGWMDGWMDVDGWMDGWMDVDGWMDGWMDVDGWMDGWMDVDGWMDGWMDVDGWMDGWMDVDGWMDGWMDVDGWMDGWMDVDGWMDGWMDGGWMDGWMGNKEIWL

SEQ ID NO: 860226 - protein, 331 aa, Homo sapiens
EIPASGWTQWFCTEALVMVAPVWYLVAAALLVGFILFLTRSRGRAASAGQEPLHNEELAGAGRVAQPGPLEPEEPRAGGRPRRRRDLGSRLQAQRRAQRVAWAEADENEEEAVILAQEEEGVEKPAETHLSGKIGAKKLRKLEEKQARKAQREAEEAEREERKRLESQREAEWKKEEERLRLEEEQKEEEERKAREEQAQREHEEYLKLKEAFVVEEEGVGETMTEEQSQSFLTEFINYIKQSKVVLLEDLASQVGLRTQDTINRIQDLLAEGTITGVIDDRGKFIYITPEELAAVANFIRQRGRVSIAELAQASNSLIAWGRESPAQAPA

SEQ ID NO: 860227 - protein, 585 aa, Homo sapiens
SCAGWGFRSALPGIGGRAATPFSRLQARVWPHPSLHPRELHTSKGLRPWPAHTPIRHRRGPFPLHLLGRPQGFSIPPSLAPEQVPGRGHLNIFCLSPTSWRSARRLQEIPEALSLPAKERAHSPSPIRSPIRRPCHWPGHRTDTPILPLSPHFWSAGGFVYVFSCSLGPQATSEHLRAPRSGRDTLREGGDPAGLPGGGSATAGKCTLWLGSQIKPQVVLGEKSVDSCRGYSMRAGDIRIGAPDRPAGKVEPGGERSIHTGPREGLSPRLGPSCGPGGKGLASQTEKSGPCAVGSRPLSRGAGQEPLHNEELAGAGRVAQPGPLEPEEPRAGGRPRRRRDLGSRLQAQRRAQRVAWAEADENEEEAVILAQEEEGVEKPAETHLSGKIGAKKLRKLEEKQARKAQREAEEAEREERKRLESQREAEWKKEEERLRLEEEQKEEEERKAREEQAQREHEEYLKLKEAFVVEEEGVGETMTEEQSQSFLTEFINYIKQSKVVLLEDLASQVGLRTQDTINRIQDLLAEGTITGVIDDRGKFIYITPEELAAVANFIRQRGRVSIAELAQASNSLIAWGRESPAQAPA

SEQ ID NO: 860228 - protein, 244 aa, Homo sapiens
RVPGGASAVPYLESVAAPLPLSLDSKPESQEEEGVEKPAETHLSGKIGAKKLRKLEEKQARKAQREAEEAEREERKRLESQREAEWKKEEERLRLEEEQKEEEERKAREEQAQREHEEYLKLKEAFVVEEEGVGETMTEEQSQSFLTEFINYIKQSKVVLLEDLASQVGLRTQDTINRIQDLLAEGTITGVIDDRGKFIYITPEELAAVANFIRQRGRVSIAELAQASNSLIAWGRESPAQAPA

SEQ ID NO: 860229 - protein, 315 aa, Homo sapiens
EIPASGWTQWFCTEALVMVAPVWYLVAAALLVGFILFLTRSRGRAASAGQEPLHNEELAGAGRVAQPGPLEPEEPRAGGRPRRRRDLGSRLQAQRRAQRVAWAEADENEEEAVILAQEEEGVEKPAETHLSGKIGAKKLRKLEEKQARKAQREAEEAEREERKRLESQREAEWKKEEERLRLEEEQKEEEERKAREEQAQREHEEYLKLKEAFVVEEEGVGETMTEEQSQSFLTEFINYIKQSKVVLLEDLASQVGLRTQVSPGTWPAVCSVARGLWLAERTCPKDRVLMHRLPCPQPRVSSAQKSPGTLGILHF

SEQ ID NO: 860230 - protein, 259 aa, Homo sapiens
RLVEAGCWFCTEALVMVAPVWYLVAAALLVGFILFLTRSRGRAASAGQEPLHNEELAGAGRVAQPGPLEPEEPRAGGRPRRRRDLGSRLQAQRRAQRVAWAEADENEEEAVILAQEEEGVEKPAETHLSGKIGAKKLRKLEEKQARKAQREAEEAEREERKRLESQREAEWKKEEERLRLEEEQKEEEERKAREEQAQREHEEYLKLKEAFVVEEEGVGETMTEEQSQSFLTEFINYIKQSKVVLLEDLASQVGLRTQV

SEQ ID NO: 860231 - protein, 331 aa, Homo sapiens; identical to SEQ ID NO: 860226

SEQ ID NO: 860232 - protein, 329 aa, Homo sapiens
RLVEAGCWFCTEALVMVAPVWYLVAAALLVGFILFLTRSRGRAASAGQEPLHNEELAGAGRVAQPGPLEPEEPRAGGRPRRRRDLGSRLQAQRRAQRVAWAEADENEEEAVILAQEEEGVEKPAETHLSGKIGAKKLRKLEEKQARKAQREAEEAEREERKRLESQREAEWKKEEERLRLEEEQKEEEERKAREEQAQREHEEYLKLKEAFVVEEEGVGETMTEEQSQSFLTEFINYIKQSKVVLLEDLASQVGLRTQDTINRIQDLLAEGTITGVIDDRGKFIYITPEELAAVANFIRQRGRVSIAELAQASNSLIAWGRESPAQAPA

SEQ ID NO: 860233 - protein, 328 aa, Homo sapiens
HDGSPREDTLVSRVSWPRVWYLVAAALLVGFILFLTRSRGRAASAGQEPLHNEELAGAGRVAQPGPLEPEEPRAGGRPRRRRDLGSRLQAQRRAQRVAWAEADENEEEAVILAQEEEGVEKPAETHLSGKIGAKKLRKLEEKQARKAQREAEEAEREERKRLESQREAEWKKEEERLRLEEEQKEEEERKAREEQAQREHEEYLKLKEAFVVEEEGVGETMTEEQSQSFLTEFINYIKQSKVVLLEDLASQVGLRTQDTINRIQDLLAEGTITGVIDDRGKFIYITPEELAAVANFIRQRGRVSIAELAQASNSLIAWGRESPAQAPA

SEQ ID NO: 860234 - protein, 315 aa, Homo sapiens; identical to SEQ ID NO: 860229

SEQ ID NO: 860235 - protein, 261 aa, Homo sapiens
EIPASGWTQWFCTEALVMVAPVWYLVAAALLVGFILFLTRSRGRAASAGQEPLHNEELAGAGRVAQPGPLEPEEPRAGGRPRRRRDLGSRLQAQRRAQRVAWAEADENEEEAVILAQEEEGVEKPAETHLSGKIGAKKLRKLEEKQARKAQREAEEAEREERKRLESQREAEWKKEEERLRLEEEQKEEEERKAREEQAQREHEEYLKLKEAFVVEEEGVGETMTEEQSQSFLTEFINYIKQSKVVLLEDLASQVGLRTQV

SEQ ID NO: 860236 - protein, 494 aa, Homo sapiens
ERKMAEPPSPVHCVAAAAPTATVSEKEPFGKLQLSSRDPPGSLSAKKVRTEEKKAPRRVNGEGGSGGNSRQLQPPAAPSPQSYGSPASWSFAPLSAAPSPSSSRSSFSFSAGTAVPSSASASLSQPVPRKLLVPPTLLHAQPHHLLLPAAAAAASANAKSRRPKEKREKERRRHGLGGAREAGGASREENGEVKPLPRDKIKDKIKERDKEKEREKKKHKVMNEIKKENGEVKILLKSGKEKPKTNIEDLQIKKVKKKKKKKHKENEKRKRPKMYSKSIQTICSGLLTDVEDQAAKGILNDNIKDYVGKNLDTKNYDSKIPENSEFPFVSLKEPRVQNNLKRLDTLEFKQLIHIEHQPNGGASVIHAYSNELSHLSPMEMERFAEEFVGLVFSENENSAAFYVMGIVHGAATYLPDFLDYFSFNFPNSPVKMEILGKKDIETTTMSNFHAQSLTVLQPGRQSETPSQKKRKKFMIMLSSRWEGETKNKYRRLTN

SEQ ID NO: 860237 - protein, 267 aa, Homo sapiens
MEFQKTFFPTGGKEKPKTNIEDLQIKKVKKKKKKKHKENEKRKRPKMYSKSIQTICSGLLTDVEDQAAKGILNDNIKDYVGKNLDTKNYDSKIPENSEFPFVSLKEPRVQNNLKRLDTLEFKQLIHIEHQPNGGASVIHAYSNELSHLSPMEMERFAEEFVGLVFSENENSAAFYVMGIVHGAATYLPDFLDYFSFNFPNSPVKMEILGKKDIETTTMSNFHAQSLTVLQPGRQSETPSQKKRKKFMIMLSSRWEGETKNKYRRLTN

SEQ ID NO: 860238 - protein, 466 aa, Homo sapiens
ERKMAEPPSPVHCVAAAAPTATVSEKEPFGKLQLSSRDPPGSLSAKKVRTEEKKAPRRVNGEGGSGGNSRQLQPPAAPSPQSYGRAVPSSASASLSQPVPRKLLVPPTLLHAQPHHLLLPAAAAAASANAKSRRPKEKREKERRRHGLGGAREAGGASREENGEVKPLPRDKIKDKIKERDKEKEREKKKHKVMNEIKKENGEVKILLKSGKEKPKTNIEDLQIKKVKKKKKKKHKENEKRKRPKMYSKSIQTICSGLLTDVEDQAAKGILNDNIKDYVGKNLDTKNYDSKIPENSEFPFVSLKEPRVQNNLKRLDTLEFKQLIHIEHQPNGGASVIHAYSNELSHLSPMEMERFAEEFVGLVFSENENSAAFYVMGIVHGAATYLPDFLDYFSFNFPNSPVKMEILGKKDIETTTMSNFHAQSLTVLQPGRQSETPSQKKRKKFMIMLSSRWEGETKNKYRRLTN

SEQ ID NO: 860239 - protein, 285 aa, Homo sapiens
GSPPPQDKVLNDRLQLLLVCCRLCTVESGGKEKPKTNIEDLQIKKVKKKKKKKHKENEKRKRPKMYSKSIQTICSGLLTDVEDQAAKGILNDNIKDYVGKNLDTKNYDSKIPENSEFPFVSLKEPRVQNNLKRLDTLEFKQLIHIEHQPNGGASVIHAYSNELSHLSPMEMERFAEEFVGLVFSENENSAAFYVMGIVHGAATYLPDFLDYFSFNFPNSPVKMEILGKKDIETTTMSNFHAQSLTVLQPGRQSETPSQKKRKKFMIMLSSRWEGETKNKYRRLTN

SEQ ID NO: 860240 - protein, 181 aa, Homo sapiens
MGRLSGGSRPLGILALLLLVIVCPLLCAFLDLSEEERAGPETFSRPQLPVIPPLCFLRQAKANLDKNKQTLEKENADLAGELRVLGQAKQEVEHKKKKLEAQVQELQSKCSDGERARAELNDKVHKLQVRRWRGGVVGSAGWCPVLWGGASSRLAEVSLAARQVLSSSCVPGGEAMISLFN

SEQ ID NO: 860241 - protein, 1453 aa, Homo sapiens
MAQKGQLSDDEKFLFVDKNFINSPVAQADWAAKRLVWVPSEKQGFEAASIKEEKGDEVVVELVENGKKVTVGKDDIQKMNPPKFSKVEDMAELTCLNEASVLHNLRERYFSGLIYTYSGLFCVVVNPYKHLPIYSEKIVDMYKGKKRHEMPPHIYAIADTAYRSMLQDREDQSILCTGESGAGKTENTKKVIQYLAVVASSHKGKKDTSITGELEKQLLQANPILEAFGNAKTVKNDNSSRFGKFIRINFDVTGYIVGANIETYLLEKSRAIRQARDERTFHIFYYMIAGAKEKMRSDLLLEGFNNYTFLSNGFVPIPAAQDDEMFQETVEAMAIMGFSEEEQLSILKVVSSVLQLGNIVFKKERNTDQASMPDNTAAQKVCHLMGINVTDFTRSILTPRIKVGRDVVQKAQTKEQADFAVEALAKATYERLFRWILTRVNKALDKTHRQGASFLGILDIAGFEIFEVNSFEQLCINYTNEKLQQLFNHTMFILEQEEYQREGIEWNFIDFGLDLQPCIELIERPNNPPGVLALLDEECWFPKATDKSFVEKLCTEQGSHPKFQKPKQLKDKTEFSIIHYAGKVDYNASAWLTKNMDPLNDNVTSLLNASSDKFVADLWKDVDRIVGLDQMAKMTESSLPSASKTKKGMFRTVGQLYKEQLGKLMTTLRNTTPNFVRCIIPNHEKRSGKLDAFLVLEQLRCNGVLEGIRICRQGFPNRIVFQEFRQRYEILAANAIPKGFMDGKQACILMIKALELDPNLYRIGQSKIFFRTGVLAHLEEERDLKITDVIMAFQAMCRGYLARKAFAKRQQQLTAMKVIQRNCAAYLKLRNWQWWRLFTKVKPLLQVTRQEEEMQAKEDELQKTKERQQKAENELKELEQKHSQLTEEKNLLQEQLQAETELYAEAEEMRVRLAAKKQELEEILHEMEARLEEEEDRGQQLQAERKKMAQQMLDLEEQLEEEEAARQKLQLEKVTAEAKIKKLEDEILVMDDQNNKLSKERKLLEERISDLTTNLAEEEEKAKNLTKLKNKHESMISELEVRLKKEEKSRQELEKLKRKLEGDASDFHEQIADLQAQIAELKMQLAKKEEELQAALARLDDEIAQKNNALKKIRELEGHISDLQEDLDSERAARNKAEKQKRDLGEELEALKTELEDTLDSTATQQELRAKREQEVTVLKKALDEETRSHEAQVQEMRQKHAQAVEELTEQLEQFKRAKANLDKNKQTLEKENADLAGELRVLGQAKQEVEHKKKKLEAQVQELQSKCSDGERARAELNDKVHKLQNEVESVTGMLNEAEGKAIKLAKDVASLSSQLQDTQELLQEETRQKLNVSTKLRQLEEERNSLQDQLDEEMEAKQNLERHISTLNIQLSDSKKKLQDFASTVEALEEGKKRFQKEIENLTQQYEEKAAAYDKLEKTKNRLQQELDDLVVDLDNQRQLVSNPGKEAEEI

SEQ ID NO: 860242 - protein, 1266 aa, Homo sapiens
MAQKGQLSDDEKFLFVDKNFINSPVAQADWAAKRLVWVPSEKQGFEAASIKEEKGDEVVVELVENGKKVTVGKDDIQKMNPPKFSKVEDMAELTCLNEASVLHNLRERYFSGLIYTYSGLFCVVVNPYKHLPIYSEKIVDMYKGKKRHEMPPHIYAIADTAYRSMLQDREDQSILCTGESGAGKTENTKKVIQYLAVVASSHKGKKDTSITGELEKQLLQANPILEAFGNAKTVKNDNSSRFGKFIRINFDVTGYIVGANIETYLLEKSRAIRQARDERTFHIFYYMIAGAKEKMRSDLLLEGFNNYTFLSNGFVPIPAAQDDEMFQETVEAMAIMGFSEEEQLSILKVVSSVLQLGNIVFKKERNTDQASMPDNTAAQKVCHLMGINVTDFTRSILTPRIKVGRDVVQKAQTKEQADFAVEALAKATYERLFRWILTRVNKALDKTHRQGASFLGILDIAGFEIFEVNSFEQLCINYTNEKLQQLFNHTMFILEQEEYQREGIEWNFIDFGLDLQPCIELIERPNNPPGVLALLDEECWFPKATDKSFVEKLCTEQGSHPKFQKPKQLKDKTEFSIIHYAGKVDYNASAWLTKNMDPLNDNVTSLLNASSDKFVADLWKDVDRIVGLDQMAKMTESSLPSASKTKKGMFRTVGQLYKEQLGKLMTTLRNTTPNFVRCIIPNHEKRSGKLDAFLVLEQLRCNGVLEGIRICRQGFPNRIVFQEFRQRYEILAANAIPKGFMDGKQACILMIKALELDPNLYRIGQSKIFFRTGVLAHLEEERDLKITDVIMAFQAMCRGYLARKAFAKRQQQLTAMKVIQRNCAAYLKLRNWQWWRLFTKVKPLLQVTRQEEEMQAKEDELQKTKERQQKAENELKELEQKHSQLTEEKNLLQEQLQAETELYAEAEEMRVRLAAKKQELEEILHEMEARLEEEEDRGQQLQAERKKMAQQMLDLEEQLEEEEAARQKLQLEKVTAEAKIKKLEDEILVMDDQNNKLSKERKLLEERISDLTTNLAEEEEKAKNLTKLKNKHESMISELEVRLKKEEKSRQELEKLKRKLEGDASDFHEQIADLQAQIAELKMQLAKKEEELQAALARLDDEIAQKNNALKKIRELEGHISDLQEDLDSERAARNKAEKQKRDLGEELEALKTELEDTLDSTATQQELRAKREQEVTVLKKALDEETRSHEAQVQEMRQKHAQAVEELTEQLEQFKRAKANLDKNKQTLEKENADLAGELRVLGQAKQEVEHKKKKLEAQVQTLSF

SEQ ID NO: 860243 - protein, 179 aa, Homo sapiens
RRISRQKLQLEKVTAEAKIKKLEDEILVMDDQKNKLSRRTENSLKERMSDLSDKSCRRGITGQESSKATDKSFVEKLCTEQGSHPKFQKPKQLKDKTEFSIIHYAGKVDYNASAWLTKNMDPLNDNVTSLLNASSDKFVADLWKDVDRIVGLDQMAKVGRSRGQKFETSLANMVKPHLY

SEQ ID NO: 860244 - protein, 82 aa, Homo sapiens
MRVRLAAKKQELEEILHEMEARLEEEEDRGQQLQAERKKMAQQMLDLEEQLEEEEAARQKLQLEKSRAEDQRRRGREFSSSR

SEQ ID NO: 860245 - protein, 131 aa, Homo sapiens
GTLLSGPEELEDELQATVDAKLRLESRKSRRFKGQFERDLSSPGTSRMRRRGGNCRDSFTSMQLHEYETELEDERKQRALAAAAKKKLEGDLKDLELQADSAIKGREEAIKQLRKLQAQMKDLKMGVMGWA

SEQ ID NO: 860246 - protein, 809 aa, Homo sapiens
SPPRPPPRLRPAYYCILLLLNSRPRRPTPNFVRCIIPNHEKRSGKLDAFLVLEQLRCNGVLEGIRICRQGFPNRIVFQEFRQRYEILAANAIPKGFMDGKQACILMIKALELDPNLYRIGQSKIFFRTGVLAHLEEERDLKITDVIMAFQAMCRGYLARKAFAKRQQQLTAMKVIQRNCAAYLKLRNWQWWRLFTKVKPLLQVTRQEEEMQAKEDELQKTKERQQKAENELKELEQKHSQLTEEKNLLQEQLQAETELYAEAEEMRVRLAAKKQELEEILHEMEARLEEEEDRGQQLQAERKKMAQQMLDLEEQLEEEEAARQKLQLEKVTAEAKIKKLEDEILVMDDQNNKLSKERKLLEERISDLTTNLAEEEEKAKNLTKLKNKHESMISELEVRLKKEEKSRQELEKLKRKLEGDASDFHEQIADLQAQIAELKMQLAKKEEELQAALARLDDEIAQKNNALKKIRELEGHISDLQEDLDSERAARNKAEKQKRDLGEELEALKTELEDTLDSTATQQELRAKREQEVTVLKKALDEETRSHEAQVQEMRQKHAQAVEELTEQLEQFKRAKANLDKNKQTLEKENADLAGELRVLGQAKQEVEHKKKKLEAQVQELQSKCSDGERARAELNDKVHKLQNEVESVTGMLNEAEGKAIKLAKDVASLSSQLQDTQELLQEETRQKLNVSTKLRQLEEERNSLQDQLDEEMEAKQNLERHISTLNIQLSDSKKKLQDFASTVEALEEGKKRFQKEIENLTQQYEEKAAAYDKLEKTKNRLQQELDDLVVDLDNQRQLVSNPGKEAEEI

SEQ ID NO: 860247 - protein, 593 aa, Homo sapiens
SPPRPPPRLRPAYYCILLLLNSRPRRPTPNFVRCIIPNHEKRSGKLDAFLVLEQLRCNGVLEGIRICRQGFPNRIVFQEFRQRYEILAANAIPKGFMDGKQACILMIKALELDPNLYRIGQSKIFFRTGVLAHLEEERDLKITDVIMAFQAMCRGYLARKAFAKRQQQLTAMKVIQRNCAAYLKLRNWQWWRLFTKVKPLLQVTRQEEEMQAKEDELQKTKERQQKAENELKELEQKHSQLTEEKNLLQEQLQAETELYAEAEEMRVRLAAKKQELEEILHEMEARLEEEEDRGQQLQAERKKMAQQMLDLEEQLEEEEAARQKLQLEKVTAEAKIKKLEDEILVMDDQNNKLSKERKLLEERISDLTTNLAEEEEKAKNLTKLKNKHESMISELEVRLKKEEKSRQELEKLKRKLEGDASDFHEQNEVESVTGMLNEAEGKAIKLAKDVASLSSQLQDTQELLQEETRQKLNVSTKLRQLEEERNSLQDQLDEEMEAKQNLERHISTLNIQLSDSKKKLQDFASTVEALEEGKKRFQKEIENLTQQYEEKAAAYDKLEKTKNRLQQELDDLVVDLDNQRQLVSNPGKEAEEI

SEQ ID NO: 860248 - protein, 809 aa, Homo sapiens; identical to SEQ ID NO: 860246

SEQ ID NO: 860249 - protein, 755 aa, Homo sapiens
SPPRPPPRLRPAYYCILLLLNSRPRRPTPNFVRCIIPNHEKRSGKLDAFLVLEQLRCNGVLEGIRICRQGFPNRIVFQEFRQRYEILAANAIPKGFMDGKQACILMIKALELDPNLYRIGQSKIFFRTGVLAHLEEERDLKITDVIMAFQAMCRGYLARKAFAKRQQQLTAMKVIQRNCAAYLKLRNWQWWRLFTKVKPLLQVTRQEEEMQAKEDELQKTKERQQKAENELKELEQKHSQLTEEKNLLQEQLQAETELYAEAEEMRVRLAAKKQELEEILHEMEARLEEEEDRGQQLQAERKKMAQQMLDLEEQLEEEEAARQKLQLEKVTAEAKIKKLEDEILVMDDQNNKLSKERKLLEERISDLTTNLAEEEEKAKNLTKLKNKHESMISELEVRLKKEEKSRQELEKLKRKLEGDASDFHEQIADLQAQIAELKMQLAKKEEELQAALARLDDEIAQKNNALKKIRELEGHISDLQEDLDSERAARNKAEKQKRDLGEELEALKTELEDTLDSTATQQELRAKREQEVTVLKKALDEETRSHEAQVQEMRQKHAQAVEELTEQLEQFKRAKANLDKNKQTLEKENADLAGELRVLGQAKQEVEHKKKKLEAQVQELQSKCSDGERARAELNDKVHKLQNEVESVTGMLNEAEGMEAKQNLERHISTLNIQLSDSKKKLQDFASTVEALEEGKKRFQKEIENLTQQYEEKAAAYDKLEKTKNRLQQELDDLVVDLDNQRQLVSNPGKEAEEI

SEQ ID NO: 860250 - protein, 1253 aa, Homo sapiens
SPPRPPPRLRPAYYCILLLLNSRPRRPTPNFVRCIIPNHEKRSGKLDAFLVLEQLRCNGVLEGIRICRQGFPNRIVFQEFRQRYEILAANAIPKGFMDGKQACILMIKALELDPNLYRIGQSKIFFRTGVLAHLEEERDLKITDVIMAFQAMCRGYLARKAFAKRQQQLTAMKVIQRNCAAYLKLRNWQWWRLFTKVKPLLQVTRQEEEMQAKEDELQKTKERQQKAENELKELEQKHSQLTEEKNLLQEQLQAETELYAEAEEMRVRLAAKKQELEEILHEMEARLEEEEDRGQQLQAERKKMAQQMLDLEEQLEEEEAARQKLQLEKVTAEAKIKKLEDEILVMDDQNNKLSKERKLLEERISDLTTNLAEEEEKAKNLTKLKNKHESMISELEVRLKKEEKSRQELEKLKRKLEGDASDFHEQIADLQAQIAELKMQLAKKEEELQAALARLDDEIAQKNNALKKIRELEGHISDLQEDLDSERAARNKAEKQKRDLGEELEALKTELEDTLDSTATQQELRAKREQEVTVLKKALDEETRSHEAQVQEMRQKHAQAVEELTEQLEQFKRAKANLDKNKQTLEKENADLAGELRVLGQAKQEVEHKKKKLEAQVQELQSKCSDGERARAELNDKVHKLQNEVESVTGMLNEAEGCHKASLDEEMEARWRPSRTWSATSPLSTSSSPTRRRSCRTLPAPWKLWKRGRRGSRRRSRTSPSSTRRRRPLMINWKRPRTGFSRSWTTWLLIWTTSGNSCPTLEKKQRKFDQLLAEEKNISSKYADERDRAEAEAREKETKALSLARALEEALEAKEELERTNKMLKAEMEDLVSSKDDVGKNVHELEKSKRALETQMEEMKTQLEELEDELQATEDAKLRLEVNMQALKGQFERDLQARDEQNEEKRRQLQRQLHEYETELEDERKQRALAAAAKKKLEGDLKDLELQADSAIKGREEAIKQLRKLQAQMKDFQRELEDARASRDEIFATAKENEKKAKSLEADLMQLQEDLAAAERARKQADLEKEELAEELASSLSGRNALQDEKRRLEARIAQLEEELEEEQGNMEAMSDRVRKATQQAEQLSNELATERSTAQKNESARQQLERQNKELRSKLHEMEGAVKSKFKSTIAALEAKIAQLEEQVEQEAREKQAATKSLKQKDKKLKEILLQVEDERKMAEQYKEQAEKGNARVKQLKRQLEEAEEESQRINANRRKLQRELDEATESNEAMGREVNALKSKLRGPPPQETSQ

SEQ ID NO: 860251 - protein, 809 aa, Homo sapiens; identical to SEQ ID NO: 860246

SEQ ID NO: 860252 - protein, 809 aa, Homo sapiens; identical to SEQ ID NO: 860246

SEQ ID NO: 860253 - protein, 809 aa, Homo sapiens; identical to SEQ ID NO: 860246

SEQ ID NO: 860254 - protein, 975 aa, Homo sapiens
SPPRPPPRLRPAYYCILLLLNSRPRRPTPNFVRCIIPNHEKRSGKLDAFLVLEQLRCNGVLEGIRICRQGFPNRIVFQEFRQRYEILAANAIPKGFMDGKQACILMIKALELDPNLYRIGQSKIFFRTGVLAHLEEERDLKITDVIMAFQAMCRGYLARKAFAKRQQQLTAMKVIQRNCAAYLKLRNWQWWRLFTKVKPLLQVTRQEEEMQAKEDELQKTKERQQKAENELKELEQKHSQLTEEKNLLQEQLQAETELYAEAEEMRVRLAAKKQELEEILHEMEARLEEEEDRGQQLQAERKKMAQQMLDLEEQLEEEEAARQKLQLEKVTAEAKIKKLEDEILVMDDQNNKLSKERKLLEERISDLTTNLAEEEEKAKNLTKLKNKHESMISELEVRLKKEEKSRQELEKLKRKLEGDASDFHEQIADLQAQIAELKMQLAKKEEELQAALARLDDEIAQKNNALKKIRELEGHISDLQEDLDSERAARNKAEKQKRDLGEELEALKTELEDTLDSTATQQELRAKREQEVTVLKKALDEETRSHEAQVQEMRQKHAQAVEELTEQLEQFKRAKANLDKNKQTLEKENADLAGELRVLGQAKQEVEHKKKKLEAQVQELQSKCSDGERARAELNDKVHKLQNEVESVTGMLNEAEGKAIKLAKDVASLSSQLQDTQEEAIKQLRKLQAQMKDFQRELEDARASRDEIFATAKENEKKAKSLEADLMQLQEDLAAAERARKQADLEKEELAEELASSLSGRNALQDEKRRLEARIAQLEEELEEEQGNMEAMSDRVRKATQQAEQLSNELATERSTAQKNESARQQLERQNKELRSKLHEMEGAVKSKFKSTIAALEAKIAQLEEQVEQEAREKQAATKSLKQKDKKLKEILLQVEDERKMAEQYKEQAEKGNARVKQLKRQLEEAEEESQRINANRRKLQRELDEATESNEAMGREVNALKSKLRGPPPQETSQ

SEQ ID NO: 860255 - protein, 809 aa, Homo sapiens; identical to SEQ ID NO: 860246

SEQ ID NO: 860256 - protein, 809 aa, Homo sapiens; identical to SEQ ID NO: 860246

SEQ ID NO: 860257 - protein, 809 aa, Homo sapiens; identical to SEQ ID NO: 860246

SEQ ID NO: 860258 - protein, 809 aa, Homo sapiens; identical to SEQ ID NO: 860246

SEQ ID NO: 860259 - protein, 809 aa, Homo sapiens; identical to SEQ ID NO: 860246

SEQ ID NO: 860260 - protein, 634 aa, Homo sapiens
SPPRPPPRLRPAYYCILLLLNSRPRRPTPNFVRCIIPNHEKRSGKLDAFLVLEQLRCNGVLEGIRICRQGFPNRIVFQEFRQRYEILAANAIPKGFMDGKQACILMIKALELDPNLYRIGQSKIFFRTGVLAHLEEERDLKITDVIMAFQAMCRGYLARKAFAKRQQQLTAMKVIQRNCAAYLKLRNWQWWRLFTKVKPLLQVTRQEEEMQAKEDELQKTKERQQKAENELKELEQKHSQLTEEKNLLQEQLQAETELYAEAEEMRVRLAAKKQELEEILHEMEARLEEEEDRGQQLQAERKKMAQQMLDLEEQLEEEEAARQKLQLEKVTAEAKIKKLEDEILVMDDQNNKLSKERKLLEERISDLTTNLAEEEEKAKNLTKLKNKHESMISELEVRLKKEEKSRQELEKLKRKLEGDASDFHEQIADLQAQIAELKMQLAKKEEELQAALARLDDEIAQKNNALKKIRELEGHISDLQEDLDSERAARNKAEKQKRDLGEELEALKTELEDTLDSTATQQELRAKREQEVTVLKKALDEETRSHEAQVQEMRQKHAQAVEELTEQLEQFKRAKANLDKNKRTLETQTSMEPRPVNKQLSTVLHHGKKTKNQNKQTKKTQQQPRTKQNPADCT

SEQ ID NO: 860261 - protein, 809 aa, Homo sapiens; identical to SEQ ID NO: 860246

SEQ ID NO: 860262 - protein, 809 aa, Homo sapiens; identical to SEQ ID NO: 860246

SEQ ID NO: 860263 - protein, 809 aa, Homo sapiens; identical to SEQ ID NO: 860246

SEQ ID NO: 860264 - protein, 775 aa, Homo sapiens
SPPRPPPRLRPAYYCILLLLNSRPRRPTPNFVRCIIPNHEKRSGKLDAFLVLEQLRCNGVLEGIRICRQGFPNRIVFQEFRQRYEILAANAIPKGFMDGKQACILMIKALELDPNLYRIGQSKIFFRTGVLAHLEEERDLKITDVIMAFQAMCRGYLARKAFAKRQQQLTAMKVIQRNCAAYLKLRNWQWWRLFTKVKPLLQVTRQEEEMQAKEDELQKTKERQQKAENELKELEQKHSQLTEEKNLLQEQLQAETELYAEAEEMRVRLAAKKQELEEILHEMEARLEEEEDRGQQLQAERKKMAQQMLDLEEQLEEEEAARQKLQLEKVTAEAKIKKLEDEILVMDDQNNKLSKERKLLEERISDLTTNLAEEEEKAKNLTKLKNKHESMISELEVRLKKEEKSRQELEKLKRKLEGDASDFHEQIADLQAQIAELKMQLAKKEEELQAALARLDDEIAQKNNALKKIRELEGHISDLQEDLDSERAARNKAEKQKRDLGEELEALKTELEDTLDSTATQQELRAKREQEVTVLKKALDEETRSHEAQVQEMRQKHAQAVEELTEQLEQFKRAKANLDKNKQTLEKENADLAGELRVLGQAKQEVEHKKKKLEAQVQELQSKCSDGERARAELNDKVHKLQNEVESVTGMLNEAEGKAIKLAKDVASLSSQLQDTQVSVLPHHPGDLGGGLPRGRSLGPLCIPFAGAASRRNPAEAQRVYEAAPAGGGAEQPARPAGRGDGGQAEPGAPHLHSQHPGACPVSLLPSWVLSTSLR

SEQ ID NO: 860265 - protein, 695 aa, Homo sapiens
SPPRPPPRLRPAYYCILLLLNSRPRRPTPNFVRCIIPNHEKRSGKLDAFLVLEQLRCNGVLEGIRICRQGFPNRIVFQEFRQRYEILAANAIPKGFMDGKQACILMIKALELDPNLYRIGQSKIFFRTGVLAHLEEERDLKITDVIMAFQAMCRGYLARKAFAKRQQQLTAMKVIQRNCAAYLKLRNWQWWRLFTKVKPLLQVTRQEEEMQAKEDELQKTKERQQKAENELKELEQKHSQLTEEKNLLQEQLQAETELYAEAEEMRVRLAAKKQELEEILHEMEARLEEEEDRGQQLQAERKKMAQQMLDLEEQLEEEEAARQKLQLEKVTAEAKIKKLEDEILVMDDQNNKLSKERKLLEERISDLTTNLAEEEEKAKNLTKLKNKHESMISELEVRLKKEEKSRQELEKLKRKLEGDASDFHEQIADLQAQIAELKMQLAKKEEELQAALARLDDEIAQKNNALKKIRELEGHISDLQEDLDSERAARNKAEKQKRDLGEELEALKTELEDTLDSTATQQELRAKREQEVTVLKKALDEETRSHEAQVQEMRQKHAQAVEELTEQLEQFKRAKANLDKNKQTLEKENADLAGELRVLGQAKQEVEHKKKKLEAQVQELQSKCSDGERARAELNDKVHKLQVRRWRGGVVGSAGWCPVLWGGASSRLAEVSLAARQVLSSSCVPGGEAMISLFN

SEQ ID NO: 860266 - protein, 49 aa, Homo sapiens
QVQDAAGQGSVDSRVWLHDPRTFSSPLPRAFAKRQQQLTAMKVIQRNCA

SEQ ID NO: 860267 - protein, 145 aa, Homo sapiens
MLVSPRTREIMRQPLPKQRDENPEGGTALPLGPQLSPPWVLLLVPSWPGQVGHPGRRFGALLRHGFWPQGSTALFDLCSPASWMRSWCWSSCGAMGCWKAFASAGRASPTGSSSRSSANGKSQGLAQVGQGVSGTGWRNGCWRYP

SEQ ID NO: 860268 - protein, 1453 aa, Homo sapiens; identical to SEQ ID NO: 860241

SEQ ID NO: 860269 - protein, 148 aa, Homo sapiens
ISADAHALCIVGQLFMECLRLGVLSDSSPTCLPQNNPPGVLALLDEECWFPKATDKSFVEKLCTEQGSHPKFQKPKQLKDKTEFSIIHYAGKVPATGPRGLCLRGPPVAAQRRDSLRVAEPWAAWKLQSHLLLSESQPSPIRNLSTHL

SEQ ID NO: 860270 - protein, 135 aa, Homo sapiens
SPPRPPPRLRPAYYCILLLLNSRPRRPTPNFVRCIIPNHEKRSGKLDAFLVLEQLRCNGVLEGIRICRQGFPNRIVFQEFRQRYEILAANAIPKGFMDGKQACILMIKALELDPNLYRSRAEDQRRRGREFSSSR

SEQ ID NO: 860271 - protein, 809 aa, Homo sapiens; identical to SEQ ID NO: 860246

SEQ ID NO: 860272 - protein, 809 aa, Homo sapiens; identical to SEQ ID NO: 860246

SEQ ID NO: 860273 - protein, 1403 aa, Homo sapiens
SPPRPPPRLRPAYYCILLLLNSRPRRPTPNFVRCIIPNHEKRSGKLDAFLVLEQLRCNGVLEGIRICRQGFPNRIVFQEFRQRYEILAANAIPKGFMDGKQACILMIKALELDPNLYRIGQSKIFFRTGVLAHLEEERDLKITDVIMAFQAMCRGYLARKAFAKRQQQLTAMKVIQRNCAAYLKLRNWQWWRLFTKVKPLLQVTRQEEEMQAKEDELQKTKERQQKAENELKELEQKHSQLTEEKNLLQEQLQAETELYAEAEEMRVRLAAKKQELEEILHEMEARLEEEEDRGQQLQAERKKMAQQMLDLEEQLEEEEAARQKLQLEKVTAEAKIKKLEDEILVMDDQNNKLSKERKLLEERISDLTTNLAEEEEKAKNLTKLKNKHESMISELEVRLKKEEKSRQELEKLKRKLEGDASDFHEQIADLQAQIAELKMQLAKKEEELQAALARLDDEIAQKNNALKKIRELEGHISDLQEDLDSERAARNKAEKQKRDLGEELEALKTELEDTLDSTATQQELRAKREQEVTVLKKALDEETRSHEAQVQEMRQKHAQAVEELTEQLEQFKRAKANLDKNKQTLEKENADLAGELRVLGQAKQEVEHKKKKLEAQVQELQSKCSDGERARAELNDKVHKLQNEVESVTGMLNEAEGKAIKLAKDVASLSSQLQDTQVSVLPHHPGDLGGGLSSGQVPGTSLHPFCRSCFKKKPGRSSTCLRSCASWRRSGTACKTSWTRRWRPSRTWSATSPLSTSRCLPRVLASFMGPLNFSALRSPAGRSRWSVGAMVLDPPASPAIGFLQRGDMVFASQSLWGQGQGPFMVPLSPYPGRCPCSSPTRRRSCRTLPAPWKLWKRGRRGSRRRSRTSPSSTRRRRPLMINWKRPRTGFSRSWTTWLLIWTTSGNSCPTLEKKQRKFDQLLAEEKNISSKYADERDRAEAEAREKETKALSLARALEEALEAKEELERTNKMLKAEMEDLVSSKDDVGKNVHELEKSKRALETQMEEMKTQLEELEDELQATEDAKLRLEVNMQALKGQFERDLQARDEQNEEKRRQLQRQLHEYETELEDERKQRALAAAAKKKLEGDLKDLELQADSAIKGREEAIKQLRKLQAQMKDFQRELEDARASRDEIFATAKENEKKAKSLEADLMQLQEDLAAAERARKQADLEKEELAEELASSLSGRNALQDEKRRLEARIAQLEEELEEEQGNMEAMSDRVRKATQQAEQLSNELATERSTAQKNESARQQLERQNKELRSKLHEMEGAVKSKFKSTIAALEAKIAQLEEQVEQEAREKQAATKSLKQKDKKLKEILLQVEDERKMAEQYKEQAEKGNARVKQLKRQLEEAEEESQRINANRRKLQRELDEATESNEAMGREVNALKSKLRGPPPQETSQ

SEQ ID NO: 860274 - protein, 1297 aa, Homo sapiens
SPPRPPPRLRPAYYCILLLLNSRPRRPTPNFVRCIIPNHEKRSGKLDAFLVLEQLRCNGVLEGIRICRQGFPNRIVFQEFRQRYEILAANAIPKGFMDGKQACILMIKALELDPNLYRIGQSKIFFRTGVLAHLEEERDLKITDVIMAFQAMCRGYLARKAFAKRQQQLTAMKVIQRNCAAYLKLRNWQWWRLFTKVKPLLQVTRQEEEMQAKEDELQKTKERQQKAENELKELEQKHSQLTEEKNLLQEQLQAETELYAEAEEMRVRLAAKKQELEEILHEMEARLEEEEDRGQQLQAERKKMAQQMLDLEEQLEEEEAARQKLQLEKVTAEAKIKKLEDEILVMDDQNNKLSKERKLLEERISDLTTNLAEEEEKAKNLTKLKNKHESMISELEVRLKKEEKSRQELEKLKRKLEGDASDFHEQIADLQAQIAELKMQLAKKEEELQAALARLDDEIAQKNNALKKIRELEGHISDLQEDLDSERAARNKAEKQKRDLGEELEALKTELEDTLDSTATQQELRAKREQEVTVLKKALDEETRSHEAQVQEMRQKHAQAVEELTEQLEQFKRAKANLDKNKQTLEKENADLAGELRVLGQAKQEVEHKKKKLEAQVQELQSKCSDGERARAELNDKVHKLQNEVESVTGMLNEAEGKAIKLAKDVASLSSQLQDTQELLQEETRQKLNVSTKLRQLEEERNSNAKTILDEEMEAMQNLEAPHLPLYNIQSSPTRRRSCRTLPAPWKLWKRGRRGSRRRSRTSPSSTRRRRPLMINWKRPRTGFSRSWTTWLLIWTTSGNSCPTLEKKQRKFDQLLAEEKNISSKYADERDRAEAEAREKETKALSLARALEEALEAKEELERTNKMLKAEMEDLVSSKDDVGKNVHELEKSKRALETQMEEMKTQLEELEDELQATEDAKLRLEVNMQALKGQFERDLQARDEQNEEKRRQLQRQLHEYETELEDERKQRALAAAAKKKLEGDLKDLELQADSAIKGREEAIKQLRKLQAQMKDFQRELEDARASRDEIFATAKENEKKAKSLEADLMQLQEDLAAAERARKQADLEKEELAEELASSLSGRNALQDEKRRLEARIAQLEEELEEEQGNMEAMSDRVRKATQQAEQLSNELATERSTAQKNESARQQLERQNKELRSKLHEMEGAVKSKFKSTIAALEAKIAQLEEQVEQEAREKQAATKSLKQKDKKLKEILLQVEDERKMAEQYKEQAEKGNARVKQLKRQLEEAEEESQRINANRRKLQRELDEATESNEAMGREVNALKSKLRGPPPQETSQ

SEQ ID NO: 860275 - protein, 809 aa, Homo sapiens; identical to SEQ ID NO: 860246

SEQ ID NO: 860276 - protein, 809 aa, Homo sapiens; identical to SEQ ID NO: 860246

SEQ ID NO: 860277 - protein, 809 aa, Homo sapiens; identical to SEQ ID NO: 860246

SEQ ID NO: 860278 - protein, 809 aa, Homo sapiens; identical to SEQ ID NO: 860246

SEQ ID NO: 860279 - protein, 809 aa, Homo sapiens; identical to SEQ ID NO: 860246

SEQ ID NO: 860280 - protein, 809 aa, Homo sapiens; identical to SEQ ID NO: 860246

SEQ ID NO: 860281 - protein, 809 aa, Homo sapiens; identical to SEQ ID NO: 860246

SEQ ID NO: 860282 - protein, 79 aa, Homo sapiens
GPAGQVGQYKEQAEKGNARVKQLKRQLEEAEEESQRINANRRKLQRELDEATESNEAMGREVNALKSKLRGPPPQETSQ

SEQ ID NO: 860283 - protein, 809 aa, Homo sapiens; identical to SEQ ID NO: 860246

SEQ ID NO: 860284 - protein, 809 aa, Homo sapiens; identical to SEQ ID NO: 860246

SEQ ID NO: 860285 - protein, 809 aa, Homo sapiens; identical to SEQ ID NO: 860246

SEQ ID NO: 860286 - protein, 809 aa, Homo sapiens; identical to SEQ ID NO: 860246

SEQ ID NO: 860287 - protein, 809 aa, Homo sapiens; identical to SEQ ID NO: 860246

SEQ ID NO: 860288 - protein, 813 aa, Homo sapiens
SPPRPPPRLRPAYYCILLLLNSRPRRPTPNFVRCIIPNHEKRSGKLDAFLVLEQLRCNGVLEGIRICRQGFPNRIVFQEFRQRYEILAANAIPKGFMDGKQACILMIKALELDPNLYRIGQSKIFFRTGVLAHLEEERDLKITDVIMAFQAMCRGYLARKAFAKRQQQLTAMKVIQRNCAAYLKLRNWQWWRLFTKVKPLLQVTRQEEEMQAKEDELQKTKERQQKAENELKELEQKHSQLTEEKNLLQEQLQAETELYAEAEEMRVRLAAKKQELEEILHEMEARLEEEEDRGQQLQAERKKMAQQMLDLEEQLEEEEAARQKLQLEKVTAEAKIKKLEDEILVMDDQNNKLSKERKLLEERISDLTTNLAEEEEKAKNLTKLKNKHESMISELEVRLKKEEKSRQELEKLKRKLEGDASDFHEQIADLQAQIAELKMQLAKKEEELQAALARLDDEIAQKNNALKKIRELEGHISDLQEDLDSERAARNKAEKQKRDLGEELEALKTELEDTLDSTATQQELRAKREQEVTVLKKALDEETRSHEAQVQEMRQKHAQAVEELTEQLEQFKRAKANLDKNKQTLEKENADLAGELRVLGQAKQEVEHKKKKLEAQVQELQSKCSDGERARAELNDKVHKLQNEVESVTGMLNEAEGKAIKLAKDVASLSSQLQDTQELLQEETRQKLNVSTKLRQLEEERNSLQDQLDEEMEAKQNLERHISTLNIQLSDSKKKLQDFASTVEALEEGKKRFQKEIENLTQQYEEKAAAYDKLEKTKNRLQQELDDLVVDLDNQRQLVSNHQHQDLQLPWFS

SEQ ID NO: 860289 - protein, 813 aa, Homo sapiens; identical to SEQ ID NO: 860288

SEQ ID NO: 860290 - protein, 456 aa, Homo sapiens
SPPRPPPRLRPAYYCILLLLNSRPRRPTPNFVRCIIPNHEKRSGKLDAFLVLEQLRCNGVLEGIRICRQGFPNRIVFQEFRQRYEILAANAIPKGFMDGKQACILMIKALELDPNLYRIGQSKIFFRTGVLAHLEEERDLKITDVIMAFQAMCRGYLARKAFAKRQQQLTAMKVIQRNCAAYLKLRNWQWWRLFTKVKPLLQVTRQEEEMQAKEDELQKTKERQQKAENELKELEQKHSQLTEEKNLLQEQLQAETELYAEAEEMRVRLAAKKQELEEILHEMEARLEEEEDRGQQLQAERKKMAQQMLDLEEQLEEEEAARQKLQLEKVTAEAKIKKLEDEILVMDDQNNKLSKERKLLEERISDLTTNLAEEEEKAKNLTKLKNKHESMISELEVRLKKEEKSRQELEKLKRKLEGDASDFHEQIADLQAQNPGSSSGPCSSERLHRQTRARAA

SEQ ID NO: 860291 - protein, 98 aa, Homo sapiens
VEIKKYVLLTLTCLPLLLGDLLLEGFNNYTFLSNGFVPIPAAQDDEMFQETVEAMAIMGFSEEEQLCKPHTLSLEGSLPGYQWNLLRTLLWSGQISAL

SEQ ID NO: 860292 - protein, 127 aa, Homo sapiens
THSRPFSSSHVPGISVRPRVSTKTPSSSFPISNMRILSASVQSVYPGGGLEVSWVLCLQTYSGLFCVVVNPYKHLPIYSEKIVDMYKGKKRHEMPPHIYAIADTAYRSMLQDREDQGCTGPAPGSPS

SEQ ID NO: 860293 - protein, 113 aa, Homo sapiens
DAEPRPVPAKLNPRSWPRTAGALPLRPPPLTMAVFHDEVEIEDFQYDEDSETYFYPCPCGDNFSITKEDLENGEDVATCPSCSLIIKVIYDKDQFVCGETVPAPSANKELVKC

SEQ ID NO: 860294 - protein, 88 aa, Homo sapiens
DAEPRPVPAKLNPRSWPRTAGALPLRPPPLTMAVFHDEVEIEDFQYDEDSETYFYPCPCGDNFSITKDQFVCGETVPAPSANKELVKC

SEQ ID NO: 860295 - protein, 88 aa, Homo sapiens; identical to SEQ ID NO: 860294

SEQ ID NO: 860296 - protein, 113 aa, Homo sapiens; identical to SEQ ID NO: 860293

SEQ ID NO: 860297 - protein, 92 aa, Homo sapiens
DAEPRPVPAKLNPRSWPRTAGALPLRPPPLTMAVFHDEVEIEDFQYDEDSETYFYPCPCGDNFSITKVTSGSRPAVHPSKRSLVPPVPSIIG

SEQ ID NO: 860298 - protein, 113 aa, Homo sapiens; identical to SEQ ID NO: 860293

SEQ ID NO: 860299 - protein, 113 aa, Homo sapiens; identical to SEQ ID NO: 860293

SEQ ID NO: 860300 - protein, 113 aa, Homo sapiens; identical to SEQ ID NO: 860293

SEQ ID NO: 860301 - protein, 103 aa, Homo sapiens
HTHCEPFQREEEVGGKYVPKKDDFFQALPGPLDLQFRQALAAGGFTHELAILLGPQGTKGIRDKGPSCQPMIPGLALFPYFHLFLTLRTFGTQWNQHFKVKMN

SEQ ID NO: 860302 - protein, 508 aa, Homo sapiens
RRGSGCARGRAGRGGRSRGRGQGRLRGFSRRRRQGEFPGSGHIGSIQPQPPGRSASRSRLVPVAAPALVPAHPPGAELAMAATDLERFSNAEPEPRSLSLGGHVGFDSLPDQLVSKSVTQGFSFNILCVGETGIGKSTLMNTLFNTTFETEEASHHEACVRLRPQTYDLQESNVQLKLTIVDAVGFGDQINKDESYRPIVDYIDAQFENYLQEELKIRRSLFDYHDTRIHVCLYFITPTGHSLKSLDLVTMKKLDSKVNIIPIIAKADTISKSELHKFKIKIMGELVSNGVQIYQFPTDDEAVAEINAVMNAHLPFAVVGSTEEVKVGNKLVRARQYPWGVVQVENENHCDFVKLREMLIRVNMEDLREQTHSRHYELYRRCKLEEMGFQDSDGDSQPFSLQETYEAKRKEFLSELQRKEEEMRQMFVNKVKETELELKEKERELHEKFEHLKRVHQEEKRKVEEKRRELEEETNAFNRRKAAVEALQSQALHATSQQPLRKDKDKKN

SEQ ID NO: 860303 - protein, 508 aa, Homo sapiens; identical to SEQ ID NO: 860302

SEQ ID NO: 860304 - protein, 508 aa, Homo sapiens; identical to SEQ ID NO: 860302

SEQ ID NO: 860305 - protein, 508 aa, Homo sapiens; identical to SEQ ID NO: 860302

SEQ ID NO: 860306 - protein, 562 aa, Homo sapiens
RRGSGCARGRAGRGGRSRGRGQGRLRGFSRRRRQGEFPGSGHIGSIQPQPPGRSASRSRLVPVAAPALVPAHPPGAELAMAATDLERFSNAEPEPRSLSLGGHVGFDSLPDQLVSKSVTQGFSFNILCVGETGIGKSTLMNTLFNTTFETEEASHHEACVRLRPQTYDLQESNVQLKLTIVDAVGFGDQINKDESYRPIVDYIDAQFENYLQEELKIRRSLFDYHDTRIHVCLYFITPTGHSLKSLDLVTMKKLDSKVNIIPIIAKADTISKSELHKFKIKIMGELVSNGVQIYQFPTDDEAVAEINAVMNAHLPFAVVGSTEEVKVGNKLVRARQYPWGVVQVENENHCDFVKLREMLIRVNMEDLREQTHSRHYELYRRCKLEEMGFQDSDGDSQPFSLQETYEAKRKEFLSELQRKEEEMRQMFVNKVKETELELKEKERELHEKFEHLKRVHQEEKRKVEEKRRELEEETNAFNRRKAAVEALQSQALHATSQQPLRKDKDKKNRSDIGAHQPGMSLSSSKVMMTKASVEPLNCSSWWPAIQCCSCLVRDATWREGFL

SEQ ID NO: 860307 - protein, 521 aa, Homo sapiens
RRGSGCARGRAGRGGRSRGRGQGRLRGFSRRRRQGEFPGSGHIGSIQPQPPGRSASRSRLVPVAAPALVPAHPPGAELAMAATDLERFSNAEPEPRSLSLGGHVGFDSLPDQLVSKSVTQGFSFNILCVGETGIGKSTLMNTLFNTTFETEEASHHEACVRLRPQTYDLQESNVQLKLTIVDAVGFGDQINKDESYRPIVDYIDAQFENYLQEELKIRRSLFDYHDTRIHVCLYFITPTGHSLKSLDLVTMKKLDSKVNIIPIIAKADTISKSELHKFKIKIMGELVSNGVQIYQFPTDDEAVAEINAVMNAHLPFAVVGSTEEVKVGNKLVRARQYPWGVVQVENENHCDFVKLREMLIRVNMEDLREQTHSRHYELYRRCKLEEMGFQDSDGDSQPFSLQETYEAKRKEFLSELQRKEEEMRQMFVNKVKETELELKEKERELHEKFEHLKRVHQEEKRKVEEKRRELEEETNAFNRRKAAVEALQSQALHATSQQPLRKDKDKKKASGWSSIYSVTIP

SEQ ID NO: 860308 - protein, 508 aa, Homo sapiens; identical to SEQ ID NO: 860302

SEQ ID NO: 860309 - protein, 61 aa, Homo sapiens
CVRLRPQTYDLQESNVQLKLTIVDAVGFGDQINKDESKRREGRPHPASSHPTYIGPYNSSP

SEQ ID NO: 860310 - protein, 521 aa, Homo sapiens; identical to SEQ ID NO: 860307

SEQ ID NO: 860311 - protein, 183 aa, Homo sapiens
GPLLSVENENHCDFVKLREMLIRVNMEDLREQTHSRHYELYRRCKLEEMGFQDSDGDSQPFSLQETYEAKRKEFLSELQRKEEEMRQMFVNKVKETELELKEKERELHEKFEHLKRVHQEEKRKVEEKRRELEEETNAFNRRKAAVEALQSQALHATSQQPLRKDKDKKKASGWSSIYSVTIP

SEQ ID NO: 860312 - protein, 128 aa, Homo sapiens
DASVRVSKKVNWHIQGKCGLPMAHLYGNFMLIRVNMEDLREQTHSRHYELYRRCKLEEMGFQDSDGDSQPFSLQETYEAKRKEFLSELQRKEEEMRQMFVNKVKETELELKEKEREMRPGDPAGSLDT

SEQ ID NO: 860313 - protein, 508 aa, Homo sapiens; identical to SEQ ID NO: 860302

SEQ ID NO: 860314 - protein, 508 aa, Homo sapiens
RRGSGCARGRAGRGGRSRGRGQGRLRGFSRRRRQGEFPGSGHIGSIQPQPPGRSASRSRLVPVAAPALVPAHPPGAELAMAATDLERFSNAEPEPRSLSLGGHVGFDSLPDQLVSKSVTQGFSFNILCVGETGIGKSTLMNTLFNTTFETEEASHHEACVRLRPQTYDLQESNVQLKLTIVDAVGFGDQINKDESYRPIVDYIDAQFENYLQEELKIRRSLFDYHDTRIHVCLYFITPTGHSLKSLDLVTMKKLDSKVNIIPIIAKADTISKSELHKFKIKIMGELVSNGVQIYQFPTDDEAVAEINAVMNAHLPFAVVGSTEEVKVGNKLVRARQYPWGVVQVENENHCDFVKLREMLIRVNMEDLREQTHSRHYELYRRCKLEEMGFQDSDGDSQPFSLQETYEAKRKEFLSELQRKEEEMRQMFVNKVKETELELKEKERELHEKFEHLKRVHQEEKRKVEEKRRELEEETNAFNRRKAAVEALQSQALHATSQQPLRKDKDKKK

SEQ ID NO: 860315 - protein, 354 aa, Homo sapiens
MTPGRCCLAADIQVETFIFTDGEDEALARHTGNVVITNCSAAHSRQALSCKMAVEYDRFIESGRKWFCHVDDDNYVNLRALLRLLASYPHTRDVYVGKPSLDRPIQAMERVSENKVRPVHFWFATGGAGFCISRGLALKMSPWASGGHFMNTAERIRLPDDCTIGYIVEALLGVPLIRSGLFHSHLENLQQVPTSELHEQVTLSYGMFENKRNAVHVKGPFSVEADPSRFRSIHCHLYPDTPWCPRTAIFYVAMAETQSLGAPGIQRAQGPCCAALASAFEAPLGPCLCVCVCMCVCVCVYCMPTRVAGCWAVLLCGGAGTSATYVPLLRGPVGCRACLEEGFVCRRPLRGQFC

SEQ ID NO: 860316 - protein, 258 aa, Homo sapiens
RPLAEPLAPRDVFIAVKTTKKFHRARLDLLLETWISRHKEMTFIFTDGEDEALARHTGNVVITNCSAAHSRQALSCKMAVEYDRFIESGRKWFCHVDDDNYVNLRALLRLLASYPHTRDVYVGKPSLDRPIQAMERVSENKVRPVHFWFATGGAGFCISRGLALKMSPWASGGHFMNTAERIRLPDDCTIGYIVEALLGVPLIRSGLFHSHLENLQQVPTSELHEQVTLSYGMFENKRNAVHVKGPFSVEADPSRWGN

SEQ ID NO: 860317 - protein, 272 aa, Homo sapiens
LKPIMDNLPLFSDNIIPPGLTHRKMAEPFSENKVRPVHFWFATGGAGFCISRGLALKMSPWASGGHFMNTAERIRLPDDCTIGYIVEALLGVPLIRSGLFHSHLENLQQVPTSELHEQVTLSYGMFENKRNAVHVKGPFSVEADPSRFRSIHCHLYPDTPWCPRTAIFYVAMAETQSLGAPGIQRAQGPCCAALASAFEAPLGPCLCVCVCMCVCVCVYCMPTRVAGCWAVLLCGGAGTSATYVPLLRGPVGCRACLEEGFVCRRPLRGQFC

SEQ ID NO: 860318 - protein, 380 aa, Homo sapiens
APLAEPLAPRDVFIAVKTTKKFHRARLDLLLETWISRHKEMTFIFTDGEDEALARHTGNVVITNCSAAHSRQALSCKMAVEYDRFIESGRKWFCHVDDDNYVNLRALLRLLASYPHTRDVYVGKPSLDRPIQAMERVSENKVRPVHFWFATGGAGFCISRGLALKMSPWASGGHFMNTAERIRLPDDCTIGYIVEALLGVPLIRSGLFHSHLENLQQVPTSELHEQVTLSYGMFENKRNAVHVKGPFSVEADPSRFRSIHCHLYPDTPWCPRTAIFYVAMAETQSLGAPGIQRAQGPCCAALASAFEAPLGPCLCVCVCMCVCVCVYCMPTRVAGCWAVLLCGGAGTSATYVPLLRGPVGCRACLEEGFVCRRPLRGQFC

SEQ ID NO: 860319 - protein, 380 aa, Homo sapiens
MSLSDWHLAVKLADQPLTPKSILRLPETELGEYSLGGYSISFLKQLIAGKLQESVPDPELIDLIYCGRKLKDDQTLDFYGIQPGSTVHVLRKSWPEPDQKPEPVDKVAAMREFRVLHTALHSSSSYREAVFKMLSNKESLDQIIVATPGLSSDPIALGVLQDKDLFSVFADPNMLDTLVPAHPALVNAIVLVLHSVAGSAPMPGTDSSSRSMPSSSYRDMPGGFLFEGLSDDEDDFHPNTRSTPSSSTPSSRPASLGYSGAAGPRPITQSELATALALASTPESSSHTPTPGTQGHSSGTSPMSSGVQSGTPITNDLFSQALQHALQASGQPSLQSQWQPQLQQLRDMGIQDDELSLRALQATGGDIQAALELIFAGGAP

SEQ ID NO: 860320 - protein, 419 aa, Homo sapiens [sequence omitted]

SEQ ID NO: 860321 - protein, 380 aa, Homo sapiens; identical to SEQ ID NO: 860319

SEQ ID NO: 860322 - protein, 380 aa, Homo sapiens; identical to SEQ ID NO: 860319

SEQ ID NO: 860323 - protein, 366 aa, Homo sapiens [sequence omitted]

SEQ ID NO: 860324 - protein, 283 aa, Homo sapiens
MSLSDWHLAVKLADQPLTPKSILRLPETELGEYSLGGYSISFLKQLIAGKLQESVPDPELIDLIYCGRKLKDDQTLDFYGIQPGSTVHVLRKSWPEPDQKPEPVDKVAAMREFRVLHTALHSSSSYREAVFKMLSNKESLDQIIVATPGLSSDPIALGVLQDKDLFSVFADPNMLDTLVPAHPALVNAIVLVLHSVAGSAPMPGTDSSSRSMPSSSYRDMPGGFLFEGLSDDEDDFHPSQWQPQLQQLRDMGIQDDELSLRALQATGGDIQAALELIFAGGAP

SEQ ID NO: 860325 - protein, 255 aa, Homo sapiens
MSLSDWHLAVKLADQPLTPKSILRLPETELGEYSLGGYSISFLKQLIAGKLQESVPDPELIDLIYCGRKLKDDQTLDFYGIQPGSTVHVLRKSWPEPDQKPEPVDKVAAMREFRVLHTALHSSSSYREAVFKMLSNKESLDQIIVATPGLSSDPIALGVLQDKDLFSVFADPNMLDTLVPAHPALVNAIVLVLHSVAGSAPMPGTDSSSRSMPSSSYRDMPGGFLFEGLSDDEDDFHPNTMYTPSSSSLSCRDPL

SEQ ID NO: 860326 - protein, 167 aa, Homo sapiens
MTITRTYLALQDSSAVRVSDLFSGVPCMPGRKRERERERMSLSDWHLAVKLADQPLTPKSILRLPETELGEYSLGGYSISFLKQLIAGKLQESVPDPELIDLIYCGRKLKDDQTLDFYGIQPGSTVHVLRKSWPEPDQKPEPVDKVAAMREFRVLHTACWAPAHHPE

SEQ ID NO: 860327 - protein, 167 aa, Homo sapiens; identical to SEQ ID NO: 860326

SEQ ID NO: 860328 - protein, 380 aa, Homo sapiens; identical to SEQ ID NO: 860319

SEQ ID NO: 860329 - protein, 380 aa, Homo sapiens; identical to SEQ ID NO: 860319

SEQ ID NO: 860330 - protein, 419 aa, Homo sapiens [sequence omitted]

SEQ ID NO: 860331 - protein, 360 aa, Homo sapiens
MSLSDWHLAVKLADQPLTPKSILRLPETELGEYSLGGYSISFLKQLIAGKLQESVPDPELIDLIYCGRKLKDDQTLDFYGIQPGSTVHVLRKSWPEPDQKPEPVDKVAAMREFRVLHTALHSSSSYREAVFKMLSNKESLDQIIVATPGLSSDPIALGVLQDKDLFSVFADPNMLDTLVPAHPALVNAIVLVLHSVAGSAPMPGTDSSSRSMPSSSYRDMPGGFLFEGLSDDEDDFHPNTRSTPSSSTPSSRPASLGYSGAAGPRPITQSELATALALASTPESSSHTPTPGTQTRVILRTHNVSGVNPEPYMFLAGLEASLGRLSRGPCGRMVRECLARPGDHRDFGPASAPERGGAPR

SEQ ID NO: 860332 - protein, 339 aa, Homo sapiens
MLLSASVNSISSMPSPVYQCRKALRRNMAVNCSELCRIRHESLSLSLSLSLSPRAADQKPEPVDKVAAMREFRVLHTALHSSSSYREAVFKMLSNKESLDQIIVATPGLSSDPIALGVLQDKDLFSVFADPNMLDTLVPAHPALVNAIVLVLHSVAGSAPMPGTDSSSRSMPSSSYRDMPGGFLFEGLSDDEDDFHPNTRSTPSSSTPSSRPASLGYSGAAGPRPITQSELATALALASTPESSSHTPTPGTQGHSSGTSPMSSGVQSGTPITNDLFSQALQHALQASGQPSLQSQWQPQLQQLRDMGIQDDELSLRALQATGGDIQAALELIFAGGAP

SEQ ID NO: 860333 - protein, 165 aa, Homo sapiens
SVRPPPGGFLFEGLSDDEDDFHPNTRSTPSSSTPSSRPASLGYSGAAGPRPITQSELATALALASTPESSSHTPTPGTQGHSSGTSPMSSGVQSGTPITNDLFSQALQHALQASGQPSLQSQWQPQLQQLRDMGIQDDELSLRALQATGGDIQAALELIFAGGAP

SEQ ID NO: 860334 - protein, 181 aa, Homo sapiens
MSLSDWHLAVKLADQPLTPKSILRLPETELGEYSLGGYSISFLKQLIAGKLQESVPDPELIDLIYCGRKLKDDQTLDFYGIQPGSTVHVLRKSWPEPDQKPEPVDKVAAMREFRVLHTALHSSSSYREAVFKMLSNKESLDQIIVATPGLSSDPIALGKCRTEFEEIGVVGKGENRRRQFL

SEQ ID NO: 860335 - protein, 204 aa, Homo sapiens
MKTTTRNSEETLANRRKEFINSLRLYRSFYGGLADQLCANELAAADGLPCWNGEDIVKSYTQRVVGNGIKAQSGNPEVKVKGIDPVINQIIDKLKHVVQLLQGRSPKPDKWELLQLGSGGGMVEQVSGDCDDEDGCGGSGSGEVKRTLKITDWMPDDMNFSDVKQIHQTDTGSTLDTTGAGCAVATESMTFTLISVVMLLPGIW

SEQ ID NO: 860336 - protein, 572 aa, Homo sapiens
MDAQTWPVGFRCLLLLALVGSARSEGVQTCEEVRKLFQWRLLGAVRGLPDSPRAGPDLQVCISKKPTCCTRKMEERYQIAARQDMQQFLQTSSSTLKFLISRNAAAFQETLETLIKQAENYTSILFCSTYRNMALEAAASVQEFFTDVGLYLFGADVNPEEFVNRFFDSLFPLVYNHLINPGVTDSSLEYSECIRMARRDVSPFGNIPQRVMGQMGRSLLPSRTFLQALNLGIEVINTTDYLHFSKECSRALLKMQYCPHCQGLALTKPCMGYCLNVMRGCLAHMAELNPHWHAYIRSLEELSDAMHGTYDIGHVLLNFHLLVNDAVLQAHLNGQKLLEQVNRICGRPVRTPTQSPRCSFDQSKEKHGMKTTTRNSEETLANRRKEFINSLRLYRSFYGGLADQLCANELAAADGLPCWNGEDIVKSYTQRVVGNGIKAQSGNPEVKVKGIDPVINQIIDKLKHVVQLLQGRSPKPDKWELLQLGSGGGMVEQVSGDCDDEDGCGGSGSGEVKRTLKITDWMPDDMNFSDVKQIHQTDTGSTLDTTGAGCAVATESMTFTLISVVMLLPGIW

SEQ ID NO: 860337 - protein, 229 aa, Homo sapiens
MIFTFMTRKSCCSKQVQRKYWRNCQKLTATGSAPFPLALQRFSVVWDACSEALIMFDKDNLDDMGYIVENDVIMHALTKQLEAVSDRVTVLYRSKAIRYTWPCPFPMADSSPWVHITLGDGSTFQTKLLIGADGHNSGVRQAVGIQNVSWNYDQSAVVATLHLSEATENNVAWQRFLPSGPIALLPLSDTLSSLVWSTSHEHAAELVSMDEEKFVDAVNSAFVSINLPS

SEQ ID NO: 860338 - protein, 393 aa, Homo sapiens
GRDWSALLRTHYVGGPAGVLSATAQVCTMAARLVSRCGAVRAAPHSGPLVSWRRWSGASTDTVYDVVVSGGGLVGAAMACALGYDIHFHDKKILLLEAGPKKVLEKLSETYSNRVSSISPGSATLLSSFGAWDHICNMRYRAFRRMQVWDACSEALIMFDKDNLDDMGYIVENDVIMHALTKQLEAVSDRVTVLYRSKAIRYTWPCPFPMADSSPWVHITLGDGSTFQTKLLIGADGHNSGVRQAVGIQNVSWNYDQSAVVATLHLSEATENNVAWQRFLPSGPIALLPLSDTLSSLVWSTSHEHAAELVSMDEEKFVDAVNSAFWSDADHTDFIDTAGAMLQYAVSLLKPTKVSARQLPPSVARVDAKSRVLFPLGLGHAAEYVRPRVALIG

SEQ ID NO: 860339 - protein, 496 aa, Homo sapiens
GRDWSALLRTHYVGGPAGVLSATAQVCTMAARLVSRCGAVRAAPHSGPLVSWRRWSGASTDTVYDVVVSGGGLVGAAMACALGYDIHFHDKKILLLEAGPKKVLEKLSETYSNRVSSISPGSATLLSSFGAWDHICNMRYRAFRRMQVWDACSEALIMFDKDNLDDMGYIVENDVIMHALTKQLEAVSDRVTVLYRSKAIRYTWPCPFPMADSSPWVHITLGDGSTFQTKLLIGADGHNSGVRQAVGIQNVSWNYDQSAVVATLHLSEATENNVAWQRFLPSGPIALLPLSDTLSSLVWSTSHEHAAELVSMDEEKFVDAVNSAFWSDADHTDFIDTAGAMLQYAVSLLKPTKVSARQLPPSVARVDAKSRVLFPLGLGHAAEYVRPRVALIGDAAHRVHPLAGQGVNMGFGDISSLAHHLSTAAFNGKDLGSVSHLTGYETERQRHNTALLAATDLLKRLYSTSASPLVLLRTWGLQATNAVSPLKEQIMAFASK

SEQ ID NO: 860340 - protein, 261 aa, Homo sapiens
GRDWSALLRTHYVGGPAGVLSATAQVCTMAARLVSRCGAVRAAPHSGPLVSWRRWSGASTDTVYDVVVSGGGLVGAAMACALGYDIHFHDKKILLLEAGPKKVLEKLSETYSNRVSSISPGSATLLSSFGAWDHICNMRYRAFRRMQVWDACSEALIMFDKDNLDDMGYIVENDVIMHALTKQLEAVSDRVTVLYRSKAIRYTWPCPFPMADSSPWVHITLGDGSTFQTKLLVVEDSYFARGLVYLHLILDSRDSGFRFKL

SEQ ID NO: 860341 - protein, 418 aa, Homo sapiens
ETGPRRHDESRESPSTTCPKTISQDMIFTFMTRKSCCSKQVQRKYWRNCQKLTATGSAPFPLALQRFSVVWDACSEALIMFDKDNLDDMGYIVENDVIMHALTKQLEAVSDRVTVLYRSKAIRYTWPCPFPMADSSPWVHITLGDGSTFQTKLLIGADGHNSGVRQAVGIQNVSWNYDQSAVVATLHLSEATENNVAWQRFLPSGPIALLPLSDTLSSLVWSTSHEHAAELVSMDEEKFVDAVNSAFWSDADHTDFIDTAGAMLQYAVSLLKPTKVSARQLPPSVARVDAKSRVLFPLGLGHAAEYVRPRVALIGDAAHRVHPLAGQGVNMGFGDISSLAHHLSTAAFNGKDLGSVSHLTGYETERQRHNTALLAATDLLKRLYSTSASPLVLLRTWGLQATNAVSPLKEQIMAFASK

SEQ ID NO: 860342 - protein, 105 aa, Homo sapiens [sequence omitted]

SEQ ID NO: 860343 - protein, 494 aa, Homo sapiens
GRDWSALLRTHYVGGPAGVLSATAQVCTMAARLVSRCGAVRAAPHSGPLVSWRRWSGASTDTVYDVVVSGGGLVGAAMACALGYDIHFHDKKILLLEAGPKKVLEKLSETYSNRVSSISPGSATLLSSFGAWDHICNMRYRAFRRMQVWDACSEALIMFDKDNLDDMGYIVENDVIMHALTKQLEAVSDRVTVLYRSKAIRYTWPCPFPMADSSPWVHITLGDGSTFQTKLLIGADGHNSGVRQAVGIQNVSWNYDQSAVVATLHLSEATENNVAWQRFLPSGPIALLPLSDTLSSLVWSTSHEHAAELVSMDEEKFVDAVNSAFWSDADHTDFIDTAGAMLQYAVSLLKPTKVSARQLPPSVARVDAKSRVLFPLGLGHAAEYVRPRVALIGDAAHRVHPLAGQGVNMGFGDISSLAHHLSTAAFNGKDLGSVSHLTGYETERQRHNTALLAATDLLKRLYSTSASPLVLLRTWGLQATNAVSPLKVRGCSEE

SEQ ID NO: 860344 - protein, 174 aa, Homo sapiens
GRDWSALLRTHYVGGPAGVLSATAQVCTMAARLVSRCGAVRAAPHSGPLVSWRRWSGASTDTVYDVVVSGGGLVGAAMACALGYDIHFHDKKILLLEAGPKKVLEKLSETYSNRVSSISPGSATLLSSFGAWDHICNMRYRAFRRMQVPLYLFNFVKMSWSVLRYRSPLSPSVL

SEQ ID NO: 860345 - protein, 496 aa, Homo sapiens; identical to SEQ ID NO: 860339

SEQ ID NO: 860346 - protein, 496 aa, Homo sapiens; identical to SEQ ID NO: 860339

SEQ ID NO: 860347 - protein, 412 aa, Homo sapiens
GRDWSALLRTHYVGGPAGVLSATAQVCTMAARLVSRCGAVRAAPHSGPLVSWRRWSGASTDTVYDVVVSGGGLVGAAMACALGYDIHFHDKKILLLEAGPKKVLEKLSETYSNRVSSISPGSATLLSSFGAWDHICNMRYRAFRRMQVWDACSEALIMFDKDNLDDMGYIVENDVIMHALTKQLEAVSDRVTVLYRSKAIRYTWPCPFPMADSSPWVHITLGDGSTFQTKLLIGADGHNSGVRQAVGIQNVSWNYDQSAVVATLHLSEATENNVAWQRFLPSGPIALLPLSDTLSSLVWSTSHEHAAELVSMDEEKFVDAVNSAFWSDADHTDFIDTAGAMLQYAVSLLKPTKVSARQLPPSVARVDAKSRVLFPLGLGHAAEYVRPRVALIGNRLWPLQANEYSSPKERLR

SEQ ID NO: 860348 - protein, 496 aa, Homo sapiens; identical to SEQ ID NO: 860339

SEQ ID NO: 860349 - protein, 496 aa, Homo sapiens; identical to SEQ ID NO: 860339

SEQ ID NO: 860350 - protein, 496 aa, Homo sapiens; identical to SEQ ID NO: 860339

SEQ ID NO: 860351 - protein, 334 aa, Homo sapiens
GRDWSALLRTHYVGGPAGVLSATAQVCTMAARLVSRCGAVRAAPHSGPLVSWRRWSGASTDTVYDVVVSGGGLVGAAMACALGYDIHFHDKKILLLEAGPKKVLEKLSETYSNRVSSISPGSATLLSSFGAWDHICNMRYRAFRRMQVWDACSEALIMFDKDNLDDMGYIVENDVIMHALTKQLEAVSDRVTVLYRSKAIRYTWPCPFPMADSSPWVHITLGDGSTFQTKLLIGADGHNSGVRQAVGIQNVSWNYDQSAVVATLHLSEATENNVAWQRFLPSGPIALLPLSDTLSSLVWSTSHEHAAELVSMDEEKFVDAVNSAFEQIMAFASK

SEQ ID NO: 860352 - protein, 491 aa, Homo sapiens
GQSLFSPHLTAPLRASGGSLRPPHGHFSWTEAAATVTAIVAAAVAARAMRGQGPPLSSFGVWLASRAASDPSRPRRQGYDIHFHDKKILLLEAGPKKVLEKLSETYSNRVSSISPGSATLLSSFGAWDHICNMRYRAFRRMQVWDACSEALIMFDKDNLDDMGYIVENDVIMHALTKQLEAVSDRVTVLYRSKAIRYTWPCPFPMADSSPWVHITLGDGSTFQTKLLIGADGHNSGVRQAVGIQNVSWNYDQSAVVATLHLSEATENNVAWQRFLPSGPIALLPLSDTLSSLVWSTSHEHAAELVSMDEEKFVDAVNSAFWSDADHTDFIDTAGAMLQYAVSLLKPTKVSARQLPPSVARVDAKSRVLFPLGLGHAAEYVRPRVALIGDAAHRVHPLAGQGVNMGFGDISSLAHHLSTAAFNGKDLGSVSHLTGYETERQRHNTALLAATDLLKRLYSTSASPLVLLRTWGLQATNAVSPLKEQIMAFASK

SEQ ID NO: 860353 - protein, 266 aa, Homo sapiens
MQIGADGHNSGVRQAVGIQNVSWNYDQSAVVATLHLSEATENNVAWQRFLPSGPIALLPLSDTLSSLVWSTSHEHAAELVSMDEEKFVDAVNSAFWSDADHTDFIDTAGAMLQYAVSLLKPTKVSARQLPPSVARVDAKSRVLFPLGLGHAAEYVRPRVALIGDAAHRVHPLAGQGVNMGFGDISSLAHHLSTAAFNGKDLGSVSHLTGYETERQRHNTALLAATDLLKRLYSTSASPLVLLRTWGLQATNAVSPLKEQIMAFASK

SEQ ID NO: 860354 - protein, 266 aa, Homo sapiens; identical to SEQ ID NO: 860353

SEQ ID NO: 860355 - protein, 496 aa, Homo sapiens; identical to SEQ ID NO: 860339

SEQ ID NO: 860356 - protein, 105 aa, Homo sapiens
MLQYAVSLLKPTKVSARQLPPSVARVDAKSRVLFPLGLGHAAEYVRPRVALIGDAAHRVHPLAGQGVNMGFGDISSLAHHLSTAAFNGKDLGKDSDTMGKYPEVI

SEQ ID NO: 860357 - protein, 112 aa, Homo sapiens
LSCCLSPVGGAFYSLCWAPCGKSPLLPLTSLLGLSQPRRCPRPPVFILGRNHRLSMPRVSLWGPLRPTVTLPYWAAPRPNRRCLKTFPGPGRPPNFFFFFFFLIWLKRAFYY

SEQ ID NO: 860358 - protein, 125 aa, Homo sapiens
KWRVLLKNTENNLLRNRMEGQGGAQVLVKSLWSIDPFFCRFWCLGPYLQHEIQSLSANAGAPLSFQFCQDVLVCLKISESTFSKCSVNVGGIRQGSHSVRGSGEKHSQENFLLILYFPTREADKL

SEQ ID NO: 860359 - protein, 556 aa, Homo sapiens
MEGPLSVFGDRSTGETIRSQNVMAAASIANIVKSSLGPVGLDKMLVDDIGDVTITNDGATILKLLEVEHPAAKVLCELADLQDKEVGDGTTSVVIIAAELLKNADELVKQKIHPTSVISGYRLACKEAVRYINENLIVNTDELGRDCLINAAKTSMSSKIIGINGDFFANMVVDAVLAIKYTDIRGQPRYPVNSVNILKAHGRSQMESMLISGYALNCVVGSQGMPKRIVNAKIACLDFSLQKTKMKLGVQVVITDPEKLDQIRQRESDITKERIQKILATGANVILTTGGIDDMCLKYFVEAGAMAVRRVLKRDLKRIAKASGATILSTLANLEGEETFEAAMLGQAEEVVQERICDDELILIKNTKARTSASIILRGANDFMCDEMERSLHDALCVVKRVLESKSVVPGGGAVEAALSIYLENYATSMGSREQLAIAEFARSLLVIPNTLAVNAAQDSTDLVAKLRAFHNEAQVNPERKNLKWIGLDLSNGKPRDNKQAGVFEPTIVKVKSLKFATEAAITILRIDDLIKLHPESKDDKHGSYEDAVHSGALND

SEQ ID NO: 860360 - protein, 38 aa, Homo sapiens
MSKKLAESEGKGWYSCTKWQSMKLVVITFFFFPRHQIP

SEQ ID NO: 860361 - protein, 556 aa, Homo sapiens; identical to SEQ ID NO: 860359

SEQ ID NO: 860362 - protein, 339 aa, Homo sapiens
MEGPLSVFGDRSTGETIRSQNVMAAASIANIVKSSLGPVGLDKMLVDDIGDVTITNDGATILKLLEVEHPAAKVLCELADLQDKEVGDGTTSVVIIAAELLKNADELVKQKIHPTSVISGYRLACKEAVRYINENLIVNTDELGRDCLINAAKTSMSSKIIGINGDFFANMVVDAVLAIKYTDIRGQPRYPVNSVNILKAHGRSQMESMLISGYALNCVVGSQGMPKRIVNAKIACLDFSLQKTKMKLGVQVVITDPEKLDQIRQRESDITKERIQKILATGANVILTTGGIDDMCLKYFVEAGAMAVRRVLKRDLKRIAKASGGMSCAGCHIKYFYYP

SEQ ID NO: 860363 - protein, 177 aa, Homo sapiens
MEGPLSVFGDRSTGETIRSQNVMAAASIANIVKSSLGPVGLDKMLVDDIGDVTITNDGATILKLLEVEHPAAKVLCELADLQDKEVGDGTTSVVIIAAELLKNADELVKQKIHPTSVISGYRLACKEAVRYINENLIVNTDELGRDCLINAAKTSMSSKIIGMYPCGCQIKFRLFKA

SEQ ID NO: 860364 - protein, 596 aa, Homo sapiens
SFSFPPCPAAGPGQPGSGWGGVLPSSSWDIARVRSTPSQPLLWSPVGRGAAILVARGVSRIRRVSLPSRWRGLCPCSVTAALGKRSAPKTDVTITNDGATILKLLEVEHPAAKVLCELADLQDKEVGDGTTSVVIIAAELLKNADELVKQKIHPTSVISGYRLACKEAVRYINENLIVNTDELGRDCLINAAKTSMSSKIIGINGDFFANMVVDAVLAIKYTDIRGQPRYPVNSVNILKAHGRSQMESMLISGYALNCVVGSQGMPKRIVNAKIACLDFSLQKTKMKLGVQVVITDPEKLDQIRQRESDITKERIQKILATGANVILTTGGIDDMCLKYFVEAGAMAVRRVLKRDLKRIAKASGATILSTLANLEGEETFEAAMLGQAEEVVQERICDDELILIKNTKARTSASIILRGANDFMCDEMERSLHDALCVVKRVLESKSVVPGGGAVEAALSIYLENYATSMGSREQLAIAEFARSLLVIPNTLAVNAAQDSTDLVAKLRAFHNEAQVNPERKNLKWIGLDLSNGKPRDNKQAGVFEPTIVKVKSLKFATEAAITILRIDDLIKLHPESKDDKHGSYEDAVHSGALND

SEQ ID NO: 860365 - protein, 513 aa, Homo sapiens
MLVDDIGDVTITNDGATILKLLEVEHPAAKVLCELADLQDKEVGDGTTSVVIIAAELLKNADELVKQKIHPTSVISGYRLACKEAVRYINENLIVNTDELGRDCLINAAKTSMSSKIIGINGDFFANMVVDAVLAIKYTDIRGQPRYPVNSVNILKAHGRSQMESMLISGYALNCVVGSQGMPKRIVNAKIACLDFSLQKTKMKLGVQVVITDPEKLDQIRQRESDITKERIQKILATGANVILTTGGIDDMCLKYFVEAGAMAVRRVLKRDLKRIAKASGATILSTLANLEGEETFEAAMLGQAEEVVQERICDDELILIKNTKARTSASIILRGANDFMCDEMERSLHDALCVVKRVLESKSVVPGGGAVEAALSIYLENYATSMGSREQLAIAEFARSLLVIPNTLAVNAAQDSTDLVAKLRAFHNEAQVNPERKNLKWIGLDLSNGKPRDNKQAGVFEPTIVKVKSLKFATEAAITILRIDDLIKLHPESKDDKHGSYEDAVHSGALND

SEQ ID NO: 860366 - protein, 534 aa, Homo sapiens [sequence omitted]

SEQ ID NO: 860367 - protein, 538 aa, Homo sapiens
MEGPLSVFGDRSTGETIRSQNVMAAASIANIVKSSLGPVGLDILKLLEVEHPAAKVLCELADLQDKEVGDGTTSVVIIAAELLKNADELVKQKIHPTSVISGYRLACKEAVRYINENLIVNTDELGRDCLINAAKTSMSSKIIGINGDFFANMVVDAVLAIKYTDIRGQPRYPVNSVNILKAHGRSQMESMLISGYALNCVVGSQGMPKRIVNAKIACLDFSLQKTKMKLGVQVVITDPEKLDQIRQRESDITKERIQKILATGANVILTTGGIDDMCLKYFVEAGAMAVRRVLKRDLKRIAKASGATILSTLANLEGEETFEAAMLGQAEEVVQERICDDELILIKNTKARTSASIILRGANDFMCDEMERSLHDALCVVKRVLESKSVVPGGGAVEAALSIYLENYATSMGSREQLAIAEFARSLLVIPNTLAVNAAQDSTDLVAKLRAFHNEAQVNPERKNLKWIGLDLSNGKPRDNKQAGVFEPTIVKVKSLKFATEAAITILRIDDLIKLHPESKDDKHGSYEDAVHSGALND

SEQ ID NO: 860368 - protein, 538 aa, Homo sapiens
MEGPLSVFGDRSTGETIRSQNVMAAASIANIVKSSLGPVGLDKMLVDDIGDVTITNDGATILKLLEVEHPAAKVLCELADLQDKEVGDGTTSVVIIAAELLKNADELVKQKIHPTSVISGYRLACKEAVRYINENLIVNTDELGRDCLINAAKTSMSSKIIGINGDFFANMVVDAVLAIKYTDIRGQPRYPVNSVNILKAHGRSQMESMLISGYALNCVVGSQGMPKRIVNAKIACLDFSLQKTKMKLGVQVVITDPEKLDQIRQRESDITKERIQKILATGANVILTTGGIDDMCLKYFVEAGAMAVRRVLKRDLKRIAKASGATILSTLANLEGEETFEAAMLGQAEEVVQERICDDELILIKNTKARTSASIILRGANDFMCDEMERSLHDALCVVKRVLESKSVVPGGGAVEAALSIYFARSLLVIPNTLAVNAAQDSTDLVAKLRAFHNEAQVNPERKNLKWIGLDLSNGKPRDNKQAGVFEPTIVKVKSLKFATEAAITILRIDDLIKLHPESKDDKHGSYEDAVHSGALND

SEQ ID NO: 860369 - protein, 339 aa, Homo sapiens; identical to SEQ ID NO: 860362

SEQ ID NO: 860370 - protein, 275 aa, Homo sapiens
MEGPLSVFGDRSTGETIRSQNVMAAASIANIVKSSLGPVGLDKMLVDDIGDVTITNDGATILKLLEVEHPAAKVLCELADLQDKEVGDGTTSVVIIAAELLKNADELVKQKIHPTSVISGYRLACKEAVRYINENLIVNTDELGRDCLINAAKTSMSSKIIGINGDFFANMVVDAVLAIKYTDIRGQPRYPVNSVNILKAHGRSQMESMLISGYALNCVVGSQGMPKRIVNAKIACLDFSLQKTKMKLGVQVVITDPEKLDQIRQRYVERLFLAF

SEQ ID NO: 860371 - protein, 194 aa, Homo sapiens
MVLATKARTSASIILRGANDFMCDEMERSLHDALCVVKRVLESKSVVPGGGAVEAALSIYLENYATSMGSREQLAIAEFARSLLVIPNTLAVNAAQDSTDLVAKLRAFHNEAQVNPERKNLKWIGLDLSNGKPRDNKQAGVFEPTIVKVKSLKFATEAAITILRIDDLIKLHPESKDDKHGSYEDAVHSGALND

SEQ ID NO: 860372 - protein, 364 aa, Homo sapiens
MEGPLSVFGDRSTGETIRSQNVMAAASIANIVKSSLGPVGLDTQLIGWTDYLRDCSAIPTRLAANPLTCQVTCDTYDTLPATPHTITTDDAWAWTRSKDQTTRPDAEDTYTTRRETNYARTQLPYTTTARLTIRQNPDKAHRRQYRTHHERHSHLQMRRTQQDDDDTPPDNNLQEGTNELEHGASSIDMELTGGHHAPIPVDPIHKQANSGTEQGDEATVRLPPWRQNDMPCTPQTRHKDKHDPHEPEPGAHRKQRGRTSRRKPTARHAPRGHHKSTKGAHSQHRPPGEPMHRPHGQGGDTPGERPRAPREERNTGRTEHTAEEQQREPTSSRRTEHPQRARTPRPQESPETDTTPRRTPTAGP

SEQ ID NO: 860373 - protein, 401 aa, Homo sapiens
MSSKIIGINGDFFANMVVDAVLAIKYTDIRGQPRYPVNSVNILKAHGRSQMESMLISGYALNCVVGSQGMPKRIVNAKIACLDFSLQKTKMKLGVQVVITDPEKLDQIRQRESDITKERIQKILATGANVILTTGGIDDMCLKYFVEAGAMAVRRVLKRDLKRIAKASGATILSTLANLEGEETFEAAMLGQAEEVVQERICDDELILIKNTKARTSASIILRGANDFMCDEMERSLHDALCVVKRVLESKSVVPGGGAVEAALSIYLENYATSMGSREQLAIAEFARSLLVIPNTLAVNAAQDSTDLVAKLRAFHNEAQVNPERKNLKWIGLDLSNGKPRDNKQAGVFEPTIVKVKSLKFATEAAITILRIDDLIKLHPESKDDKHGSYEDAVHSGALND

SEQ ID NO: 860374 - protein, 354 aa, Homo sapiens
MEGPLSVFGDRSTGETIRSQNGMPKRIVNAKIACLDFSLQKTKMKLGVQVVITDPEKLDQIRQRESDITKERIQKILATGANVILTTGGIDDMCLKYFVEAGAMAVRRVLKRDLKRIAKASGATILSTLANLEGEETFEAAMLGQAEEVVQERICDDELILIKNTKARTSASIILRGANDFMCDEMERSLHDALCVVKRVLESKSVVPGGGAVEAALSIYLENYATSMGSREQLAIAEFARSLLVIPNTLAVNAAQDSTDLVAKLRAFHNEAQVNPERKNLKWIGLDLSNGKPRDNKQAGVFEPTIVKVKSLKFATEAAITILRIDDLIKLHPESKDDKHGSYEDAVHSGALND

SEQ ID NO: 860375 - protein, 163 aa, Homo sapiens
QRPHAGCIVFKVYGKGCFYSTPTGNHRFGLQNYATSMGSREQLAIAEFARSLLVIPNTLAVNAAQDSTDLVAKLRAFHNEAQVNPERKNLKWIGLDLSNGKPRDNKQAGVFEPTIVKVKSLKFATEAAITILRIDDLIKLHPESKDDKHGSYEDAVHSGALND

SEQ ID NO: 860376 - protein, 293 aa, Homo sapiens [sequence omitted]

SEQ ID NO: 860377 - protein, 126 aa, Homo sapiens
MGHMLLPFRLGLGGPIGSGHQFFPWIHIGDLAGILTHALEANHVHGVLNGVAPSSATNAEFAQTFGAALGRRAFIPLPSAVVQAVFGRQRAIMLLEGQKVIPRRTLATGYQYSFPELGAALKEIVA

SEQ ID NO: 860378 - protein, 220 aa, Homo sapiens
MCTYVFSGFLFPMFLLQDAITKAPQPPKAWVLVTGVAYYQPSLTAEYDEDSPGGDFDFFSNLVTKWEAAARLPGDSTRQVVVRSGVVLGRGGGAMGHMLLPFRLGLGGPIGSGHQFFPWIHIGDLAGILTHALEANHVHGVLNGVAPSSATNAEFAQTFGAALGRRAFIPLPSAVVQAVFGRQRAIMLLEGQKVIPRRTLATGYQYSFPELGAALKEIVA

SEQ ID NO: 860379 - protein, 126 aa, Homo sapiens; identical to SEQ ID NO: 860377

SEQ ID NO: 860380 - protein, 126 aa, Homo sapiens; identical to SEQ ID NO: 860377

SEQ ID NO: 860381 - protein, 200 aa, Homo sapiens [sequence omitted]

SEQ ID NO: 860382 - protein, 200 aa, Homo sapiens [sequence omitted]

SEQ ID NO: 860383 - protein, 128 aa, Homo sapiens
MGWRRKRVPQRGRKAPPPQLHGNINNLYFPIRWRDRLHWDSPNPAAECQRPRSDVGLPKARARPDHVGKSILWKRVGGQSWAAQGGAGALCAFSDRMSSLHRGCRAAMPPSTWPERTSSTLSEGQPGP

SEQ ID NO: 860384 - protein, 163 aa, Homo sapiens
KDPSGLYFKGEAEPALEIIHARVVVRSGVVLGRGGGAMGHMLLPFRLGLGGPIGSGHQFFPWIHIGDLAGILTHALEANHVHGVLNGVAPSSATNAEFAQTFGAALGRRAFIPLPSAVVQAVFGRQRAIMLLEGQKVIPRRTLATGYQYSFPELGAALKEIVA

SEQ ID NO: 860385 - protein, 168 aa, Homo sapiens
MGRVRKGKQKPGGAVGSFKAEKTPVPSLFPALGVVLGRGGGAMGHMLLPFRLGLGGPIGSGHQFFPWIHIGDLAGILTHALEANHVHGVLNGVAPSSATNAEFAQTFGAALGRRAFIPLPSAVVQAVFGRQRAIMLLEGQKVIPRRTLATGYQYSFPELGAALKEIVA

SEQ ID NO: 860386 - protein, 89 aa, Homo sapiens
MGHMLLPFRLGLGGPIGSGHQFFPWIHIGDLAGILTHALEANHVHGVLNGVAPSSATNAEFAIPGVPGRQLILFHALSSCFAKRPHARG

SEQ ID NO: 860387 - protein, 126 aa, Homo sapiens; identical to SEQ ID NO: 860377

SEQ ID NO: 860388 - protein, 126 aa, Homo sapiens; identical to SEQ ID NO: 860377

SEQ ID NO: 860389 - protein, 168 aa, Homo sapiens; identical to SEQ ID NO: 860385

SEQ ID NO: 860390 - protein, 126 aa, Homo sapiens; identical to SEQ ID NO: 860377

SEQ ID NO: 860391 - protein, 126 aa, Homo sapiens; identical to SEQ ID NO: 860377

SEQ ID NO: 860392 - protein, 126 aa, Homo sapiens; identical to SEQ ID NO: 860377

SEQ ID NO: 860393 - protein, 126 aa, Homo sapiens; identical to SEQ ID NO: 860377

SEQ ID NO: 860394 - protein, 326 aa, Homo sapiens
MGWRRKRVPQRGRKAPPPQLHGNINNLYFPIRWRDRLHWDSPNPAAECQRPRSDVGLPKARARPDHVGKSILWKRVGGQSWAAQGGAGALCAFSDRMSSLHRGCRAAMPPSTWPERTSSTLSEAYYQPSLTAEYDEDSPGGDFDFFSNLVTKWEAAARLPGDSTRQVVVRSGVVLGRGGGAMGHMLLPFRLGLGGPIGSGHQFFPWIHIGDLAGILTHALEANHVHGVLNGVAPSSATNAEFAQRCGASCLWATACHHAAGGPEGDPTANTGHWLPVFLPRARGCLKGNCSLSRSWQGPEACSSQASRLGTVNRLSSSRELKPSGS

SEQ ID NO: 860395 - protein, 76 aa, Homo sapiens
ETFQKEVLGSRLETTQLLAKAITKAPQPPKAWVLVTGVGTPPKSPAPYIRQGNGVTQTSVAMHTPEHWSFPGKMTS

SEQ ID NO: 860396 - protein, 121 aa, Homo sapiens
MVIFAPLFAIFAFATCGGYSGGLRLSVDCVNKTESNLSIDIAFAYPFRLHQVTFEVPTCEGKERQKLALIGDSSSSAEFFVTVAVFAFLYSLAATVVYIFFQNKYRENNRGPLIQKVQSVG

SEQ ID NO: 860397 - protein, 263 aa, Homo sapiens [sequence omitted]

SEQ ID NO: 860398 - protein, 285 aa, Homo sapiens
MDPVSQLASAGTFRVLKEPLAFLRALELLFAIFAFATCGGYSGGLRLSVDCVNKTESNLSIDIAFAYPFRLHQVTFEVPTCEGKERQKLALIGDSSSSAEFFVTVAVFAFLYSLAATVVYIFFQNKYRENNRGPLIDFIVTVVFSFLWLVGSSAWAKGLSDVKVATDPKEVLLLMSACKQPSNKCMAIHSPVMSSLNTSVVFGFLNFILWAGNIWFVFKETGWHSSGQRYLSDPMEKHSSSYNQGGYNQDSYGSSSGYSQQASLGPTSDEFGQQPTGPTSFTNQI

SEQ ID NO: 860399 - protein, 300 aa, Homo sapiens
MVIFAPLFAIFAFATCGGYSGGLRLSVDCVNKTESNLSIDIAFAYPFRLHQVTFEVPTCEGKERQKLALIGDSSSSAEFFVTVAVFAFLYSLAATVVYIFFQNKYRENNRGPLIQKVQSVGVKSRAQFIITMQEAQDPDSQCATEVREVEKDFIVTVVFSFLWLVGSSAWAKGLSDVKVATDPKEVLLLMSACKQPSNKCMAIHSPVMSSLNTSVVFGFLNFILWAGNIWFVFKETGWHSSGQRYLSDPMEKHSSSYNQGGYNQDSYGSSSGYSQQASLGPTSDEFGQQPTGPTSFTNQI

SEQ ID NO: 860400 - protein, 263 aa, Homo sapiens [sequence omitted]

SEQ ID NO: 860401 - protein, 266 aa, Homo sapiens
MLSEMTNSRLFAIFAFATCGGYSGGLRLSVDCVNKTESNLSIDIAFAYPFRLHQVTFEVPTCEGKERQKLALIGDSSSSAEFFVTVAVFAFLYSLAATVVYIFFQNKYRENNRGPLIDFIVTVVFSFLWLVGSSAWAKGLSDVKVATDPKEVLLLMSACKQPSNKCMAIHSPVMSSLNTSVVFGFLNFILWAGNIWFVFKETGWHSSGQRYLSDPMEKHSSSYNQGGYNQDSYGSSSGYSQQASLGPTSDEFGQQPTGPTSFTNQI

SEQ ID NO: 860402 - protein, 245 aa, Homo sapiens
MVIFAPLFAIFAFATCGGYSGGLRLSVDCVNKTESNLSIDIAFAYPFRLHQVTFEVPTCEGKERQKLALIGDSSSSAEFFVTVAVFAFLYSLAATVVYIFFQNKYRVWLVGSSAWAKGLSDVKVATDPKEVLLLMSACKQPSNKCMAIHSPVMSSLNTSVVFGFLNFILWAGNIWFVFKETGWHSSGQRYLSDPMEKHSSSYNQGGYNQDSYGSSSGYSQQASLGPTSDEFGQQPTGPTSFTNQI

SEQ ID NO: 860403 - protein, 225 aa, Homo sapiens
MPLPVALQTRLAKRGILKHLEPEPEEEIIAEDYDDDPVDYEATRLEGLPPSWYKVFDPSCGLPYYWNADTDLVSWLSPHDPNSVVTKSAKKLRSSNADAEEKLDRSHDKSDRGHDKSDRSHEKLDRGHDKSDRGHDKSDRDRERGYDKVDRERERDRERDRDRGYDKADREEGKERRHHRREELAPYPKSKKAVSRKDEELDPMDPSSYSGRPPGHVVNRTPQAE

SEQ ID NO: 860404 - protein, 225 aa, Homo sapiens; identical to SEQ ID NO: 860403

SEQ ID NO: 860405 - protein, 252 aa, Homo sapiens
MPLPVALQTRLAKRGILKHLEPEPEEEIIAEDYDDDPVDYEATRLEGLPPSWYKVFDPSCGLPYYWNADTDLVSWLSPHDPNSVVTKSAKKLRSSNADAEEKLDRSHDKSDRGHDKSDRSHEKLDRGHDKSDRGHDKSDRDRERGYDKVDRERERDRERDRDRGYDKADREEGKERRHHRREELAPYPKSKKAVSRKDEELDPMDPSSYSGRPPHGSQDSQGMRPDGLNTGVGLFREAIIPRRPGMGASNSG

SEQ ID NO: 860406 - protein, 225 aa, Homo sapiens; identical to SEQ ID NO: 860403

SEQ ID NO: 860407 - protein, 225 aa, Homo sapiens; identical to SEQ ID NO: 860403

SEQ ID NO: 860408 - protein, 224 aa, Homo sapiens
MPLPVALQTRLAKRGILKHLEPEPEEEIIAEDYDDDPVDYEATRLEGLPPSWYKVFDPSCGLPYYWNADTDLVSWLSPHDPNSVVTKSAKKLRSSNADAEEKLDRSHDKSDRGHDKSDRSHEKLDRGHDKSDRGHDKSDRDRERGYDKVDRERERDRERDRDRGYDKADREEGKERRHHRREELAPYPKSKKGKLGRMGLGETNKVQGALREEAFPQKDAWTWG

SEQ ID NO: 860409 - protein, 224 aa, Homo sapiens; identical to SEQ ID NO: 860408

SEQ ID NO: 860410 - protein, 209 aa, Homo sapiens
MPLPVALQTRLAKRGILKHLEPEPEEEIIAEDYDDDPVDYEATSGLPYYWNADTDLVSWLSPHDPNSVVTKSAKKLRSSNADAEEKLDRSHDKSDRGHDKSDRSHEKLDRGHDKSDRGHDKSDRDRERGYDKVDRERERDRERDRDRGYDKADREEGKERRHHRREELAPYPKSKKAVSRKDEELDPMDPSSYSGRPPGHVVNRTPQAE

SEQ ID NO: 860411 - protein, 145 aa, Homo sapiens
MPLPVALQTRLAKRGILKHLEPEPEEEIIAEDYDDDPVDYEATRLEGLPPSWYKVFDPSCGLPYYWNADTDLVSWLSPHDPNSVVTKSAKKLRSSNADAEEKLDRSHDKSDRGHDKSDRSHEKLDRGHDKSDRGHDKSDRDRERG

SEQ ID NO: 860412 - protein, 151 aa, Homo sapiens
MPLPVALQTRLAKRGILKHLEPEPEEEIIAEDYDDDPVDYEATRLEGLPPSWYKVFDPSCGLPYYWNADTDLVSWLSPHDPNSVVTKSAKKLRSSNADAEEKLDRSHDKSDRGHDKSDRSHEKLDRGHDKSDRGHDKSDRDRERGYSKPKG

SEQ ID NO: 860413 - protein, 260 aa, Homo sapiens
MPLPVALQTRLAKRGILKHLEPEPEEEIIAEDYDDDPVDYEATRLEGLPPSWYKVFDPSCGLPYYWNADTDLVSWLSPHDPNSVVTKSAKKLRSSNADAEEKLDRSHDKSDRGHDKSDRSHEKLDRGHDKSDRGHDKSDRDRERGYDKVDRERERDRERDRDRGYDKADREEGKERRHHRREELAPYPKSKKAKDEELDPMHLSFIIKTPPGHGSQDSQGMRPDGLNTEWASSERRHPKAARHGSLEQRVEWPAVKNGAA

SEQ ID NO: 860414 - protein, 130 aa, Homo sapiens
MPLPVALQTRLAKRGILKHLEPEPEEEIIAEDYDDDPVDYEATRLEGLPPSWYKVFDPSCGLPYYWNADTDLVSWLSPHDPNSVVTKSAKKLRSSNAAVSRKDEELDPMDPSSYSGRPPGHVVNRTPQAE

SEQ ID NO: 860415 - protein, 225 aa, Homo sapiens; identical to SEQ ID NO: 860403

SEQ ID NO: 860416 - protein, 262 aa, Homo sapiens
MPLPVALQTRLAKRGILKHLEPEPEEEIIAEDYDDDPVDYEATRLEGLPPSWYKVFDPSCGLPYYWNADTDLVSWLSPHDPNSVVTKSAKKLRSSNADAEEKLDRSHDKSDRGHDKSDRSHEKLDRGHDKSDRGHDKSDRDRERGYDKVDRERERDRERDRDRGYDKADREEGKERRHHRREELAPYPKSKKAVSRKDEELDPMDPSSYSGRPPHGSQDSQGMRPDGLNTEWASSERRHPKAARHGSLEQRVEWPAVKNGAA

SEQ ID NO: 860417 - protein, 224 aa, Homo sapiens; identical to SEQ ID NO: 860408

SEQ ID NO: 860418 - protein, 211 aa, Homo sapiens
MPLPVALQTRLAKRGILKHLEPEPEEEIIAEDYDDDPVDYEATRLEGLPPSWYKVFDPSCGLPYYWNADTDLVSWLSPHDPNSVVTKSAKKLRSSNADAEEKLDRSHDKSDRGHDKSDRSHEKLDRGHDKSDRGHDKSDRDRERGYDKVDRERERDRERDRDRGYDKADREEGKERRHHRREELAPYPKSKKGKLGRMGLGETNKVQGALR

SEQ ID NO: 860419 - protein, 130 aa, Homo sapiens; identical to SEQ ID NO: 860414

SEQ ID NO: 860420 - protein, 1065 aa, Homo sapiens
MKILILGIFLFLCSTPAWAKEKHYYIGIIETTWDYASDHGEKKLISVDTEHSNIYLQNGPDRIGRLYKKALYLQYTDETFRTTIEKPVWLGFLGPIIKAETGDKVYVHLKNLASRPYTFHSHGITYYKEHEGAIYPDNTTDFQRADDKVYPGEQYTYMLLATEEQSPGEGDGNCVTRIYHSHIDAPKDIASGLIGPLIICKKDSLDKEKEKHIDREFVVMFSVVDENFSWYLEDNIKTYCSEPEKVDKDNEDFQESNRMYSVNGYTFGSLPGLSMCAEDRVKWYLFGMGNEVDVHAAFFHGQALTNKNYRIDTINLFPATLFDAYMVAQNPGEWMLSCQNLNHLKAGLQAFFQVQECNKSSSKDNIRGKHVRHYYIAAEEIIWNYAPSGIDIFTKENLTAPGSDSAVFFEQGTTRIGGSYKKLVYREYTDASFTNRKERGPEEEHLGILGPVIWAEVGDTIRVTFHNKGAYPLSIEPIGVRFNKNNEGTYYSPNYNPQSRSVPPSASHVAPTETFTYEWTVPKEVGPTNADPVCLAKMYYSAVDPTKDIFTGLIGPMKICKKGSLHANGRQKDVDKEFYLFPTVFDENESLLLEDNIRMFTTAPDQVDKEDEDFQESNKMHSMNGFMYGNQPGLTMCKGDSVVWYLFSAGNEADVHGIYFSGNTYLWRGERRDTANLFPQTSLTLHMWPDTEGTFNVECLTTDHYTGGMKQKYTVNQCRRQSEDSTFYLGERTYYIAAVEVEWDYSPQREWEKELHHLQEQNVSNAFLDKGEFYIGSKYKKVVYRQYTDSTFRVPVERKAEEEHLGILGPQLHADVGDKVKIIFKNMATRPYSIHAHGVQTESSTVTPTLPGETLTYVWKIPERSGAGTEDSACIPWAYYSTVDQVKDLYSGLIGPLIVCRRPYLKVFNPRRKLEFALLFLVFDENESWYLDDNIKTYSDHPEKVNKDDEEFIESNKMHAINGRMFGNLQGLTMHVGDEVNWYLMGMGNEIDLHTVHFHGHSFQYKHRGVYSSDVFDIFPGTYQTLEMFPRTPGIWLLHCHVTDHIHAGMETTYTVLQNEDTKSG

SEQ ID NO: 860421 - protein, 120 aa, Homo sapiens
MKILILGIFLFLCSTPAWAKEKHYYIGIIETTWDYASDHGEKKLISVDTEHSNIYLQNGPDRIGRLYKKALYLQYTDETFRTTIEKPVWLGFLGPIIKAETGDKVYVHLKEHEGAIYPDN

SEQ ID NO: 860422 - protein, 1065 aa, Homo sapiens; identical to SEQ ID NO: 860420

SEQ ID NO: 860423 - protein, 1047 aa, Homo sapiens
MKILILGIFLFLCSTPAWAKEKHYYIGIIETTWDYASDHGEKKLISVDTEHSNIYLQNGPDRIGRLYKKALYLQYTDETFRTTIEKPVWLGFLGPIIKAETGDKVYVHLKNLASRPYTFHSHGITYYKEHEGAIYPDNTTDFQRADDKVYPGEQYTYMLLATEEQSPGEGDGNCVTRIYHSHIDAPKDIASGLIGPLIICKKDSLDKEKEKHIDREFVVMFSVVDENFSWYLEDNIKTYCSEPEKVDKDNEDFQESNRMYSVNGYTFGSLPGLSMCAEDRFHGQALTNKNYRIDTINLFPATLFDAYMVAQNPGEWMLSCQNLNHLKAGLQAFFQVQECNKSSSKDNIRGKHVRHYYIAAEEIIWNYAPSGIDIFTKENLTAPGSDSAVFFEQGTTRIGGSYKKLVYREYTDASFTNRKERGPEEEHLGILGPVIWAEVGDTIRVTFHNKGAYPLSIEPIGVRFNKNNEGTYYSPNYNPQSRSVPPSASHVAPTETFTYEWTVPKEVGPTNADPVCLAKMYYSAVDPTKDIFTGLIGPMKICKKGSLHANGRQKDVDKEFYLFPTVFDENESLLLEDNIRMFTTAPDQVDKEDEDFQESNKMHSMNGFMYGNQPGLTMCKGDSVVWYLFSAGNEADVHGIYFSGNTYLWRGERRDTANLFPQTSLTLHMWPDTEGTFNVECLTTDHYTGGMKQKYTVNQCRRQSEDSTFYLGERTYYIAAVEVEWDYSPQREWEKELHHLQEQNVSNAFLDKGEFYIGSKYKKVVYRQYTDSTFRVPVERKAEEEHLGILGPQLHADVGDKVKIIFKNMATRPYSIHAHGVQTESSTVTPTLPGETLTYVWKIPERSGAGTEDSACIPWAYYSTVDQVKDLYSGLIGPLIVCRRPYLKVFNPRRKLEFALLFLVFDENESWYLDDNIKTYSDHPEKVNKDDEEFIESNKMHAINGRMFGNLQGLTMHVGDEVNWYLMGMGNEIDLHTVHFHGHSFQYKHRGVYSSDVFDIFPGTYQTLEMFPRTPGIWLLHCHVTDHIHAGMETTYTVLQNEDTKSG

SEQ ID NO: 860424 - protein, 1047 aa, Homo sapiens
MKILILGIFLFLCSTPAWAKEKHYYIGIIETTWDYASDHGEKKLISVDTEHSNIYLQNGPDRIGRLYKKALYLQYTDETFRTTIEKPVWLGFLGPIIKAETGDKVYVHLKNLASRPYTFHSHGITYYKEHEGAIYPDNTTDFQRADDKVYPGEQYTYMLLATEEQSPGEGDGNCVTRIYHSHIDAPKDIASGLIGPLIICKKDSLDKEKEKHIDREFVVMFSVVDENFSWYLEDNIKTYCSEPEKVDKDNEDFQESNRMYSVNGYTFGSLPGLSMCAEDRVKWYLFGMGNEVDVHAAFFHGQALTNKNYRIDTINLFPATLFDAYMVAQNPGEWMLSCQNLNHLKAGLQAFFQVQECNKSSSKDNIRGKHVRHYYIAAEEIIWNYAPSGIDIFTKENLTAPGSDSAVFFEQGTTRIGGSYKKLVYREYTDASFTNRKERGPEEEHLGILGPVIWAEVGDTIRVTFHNKGAYPLSIEPIGVRFNKNNEGTYYSPNYNPQSRSVPPSASHVAPTETFTYEWTVPKEVGPTNADPVCLAKMYYSAVDPTKDIFTGLIGPMKICKKGSLHANGRQKDVDKEFYLFPTVFDENESLLLEDNIRMFTTAPDQVDKEDEDFQESNKMHSMNGFMYGNQPGLTMCKGDSVVWYLFSAGNEADVHGIYFSGNTYLWRGERRDTANLFPQTSLTLHMWPDTEGTFNVECLTTDHYTGGMKQKYTVNQCRRQSEDSTFYLGERTYYIAAVEVEWDYSPQREWEGEFYIGSKYKKVVYRQYTDSTFRVPVERKAEEEHLGILGPQLHADVGDKVKIIFKNMATRPYSIHAHGVQTESSTVTPTLPGETLTYVWKIPERSGAGTEDSACIPWAYYSTVDQVKDLYSGLIGPLIVCRRPYLKVFNPRRKLEFALLFLVFDENESWYLDDNIKTYSDHPEKVNKDDEEFIESNKMHAINGRMFGNLQGLTMHVGDEVNWYLMGMGNEIDLHTVHFHGHSFQYKHRGVYSSDVFDIFPGTYQTLEMFPRTPGIWLLHCHVTDHIHAGMETTYTVLQNEDTKSG

SEQ ID NO: 860425 - protein, 1065 aa, Homo sapiens; identical to SEQ ID NO: 860420

SEQ ID NO: 860426 - protein, 867 aa, Homo sapiens
MKILILGIFLFLCSTPAWAKEKHYYIGIIETTWDYASDHGEKKLISVDTEHSNIYLQNGPDRIGRLYKKALYLQYTDETFRTTIEKPVWLGFLGPIIKAETGDKVYVHLKNLASRPYTFHSHGITYYKEHEGAIYPDNTTDFQRADDKVYPGEQYTYMLLATEEQSPGEGDGNCVTRIYHSHIDAPKDIASGLIGPLIICKKDSLDKEKEKHIDREFVVMFSVVDENFSWYLEDNIKTYCSEPEKVDKDNEDFQESNRMYSVNGYTFGSLPGLSMCAEDRVKWYLFGMGNEVDVHAAFFHGQALTNKNYRIDTINLFPATLFDAYMVAQNPGEWMLSCQNLNHLKAGLQAFFQVQECNKSSSKDNIRGKHVRHYYIAAEEIIWNYAPSGIDIFTKENLTAPGSDSAVFFEQGTTRIGGSYKKLVYREYTDASFTNRKERGPEEEHLGILGPVIWAEVGDTIRVTFHNKGAYPLSIEPIGVRFNKNNEGTYYSPNYNPQSRSVPPSASHVAPTETFTYEWTVPKEVGPTNADPVCLAKMYYSAVDPTKDIFTGLIGPMKICKKGSLHANGRQKDVDKEFYLFPTVFDENESLLLEDNIRMFTTAPDQVDKEDEDFQESNKMHSMNGFMYGNQPGLTMCKGDSVVWYLFSAGNEADVHGIYFSGNTYLWRGERRDTANLFPQTSLTLHMWPDTEGTFNVECLTTDHYTGGMKQKYTVNQCRRQSEDSTFYLGERTYYIAAVEVEWDYSPQREWEKELHHLQEQNVSNAFLDKGEFYIGSKYKKVVYRQYTDSTFRVPVERKAEEEHLGILGPQLHADVGDKVKIIFKNMATRPYSIHAHGVQTESSTVTPTLPGFCLYSMGLLFNCGSS

SEQ ID NO: 860427 - protein, 1065 aa, Homo sapiens; identical to SEQ ID NO: 860420

SEQ ID NO: 860428 - protein, 217 aa, Homo sapiens
MNLGETLTYVWKIPERSGAGTEDSACIPWAYYSTVDQVKDLYSGLIGPLIVCRRPYLKVFNPRRKLEFALLFLVFDENESWYLDDNIKTYSDHPEKVNKDDEEFIESNKMHAINGRMFGNLQGLTMHVGDEVNWYLMGMGNEIDLHTVHFHGHSFQYKHRGVYSSDVFDIFPGTYQTLEMFPRTPGIWLLHCHVTDHIHAGMETTYTVLQNEDTKSG

SEQ ID NO: 860429 - protein, 1009 aa, Homo sapiens
MKILILGIFLFLCSTPAWAKEKHYYIGIIETTWDYASDHGEKKLISVDTEHSNIYLQNGPDRIGRLYKKALYLQYTDETFRTTIEKPVWLGFLGPIIKAETGDKVYVHLKNLASRPYTFHSHGITYYKEHEGAIYPDNTTDFQRADDKVYPGEQYTYMLLATEEQSPGEGDGNCVTRIYHSHIDAPKDIASGLIGPLIICKKDSLDKEKEKHIDREFVVMFSVVDENFSWYLEDNIKTYCSEPEKVDKDNEDFQESNRMYSVNGYTFGSLPGLSMCAEDRVKWYLFGMGNEVDVHAAFFHGQALTNKNYRIDTINLFPATLFDAYMVAQNPGEWMLSCQNLNHLKAGLQAFFQVQECNKSSSKDNIRGKHVRHYYIAAEEIIWNYAPSGIDIFTKENLTAPGSDSAVFFEQGTTRIGGSYKKLVYREYTDASFTNRKERGPEEEHLGILGPVIWAEVGDTIRVTFHNKGAYPLSIEPIGVRFNKNNEGTYYSPNYNPQSRSVPPSASHVAPTETFTYEWTVPKEVGPTNADPVCLAKMYYSAVDPTKDIFTGLIGPMKICKKGSLHANGRQKDVDKEFYLFPTVFDENESLLLEDNIRMFTTAPDQVDKEDEDFQESNKMHSMNGFMYGNQPGLTMCKGDSVVWYLFSAGNEADVHGIYFSGNTYLWRGERRDTANLFPQTSLTLHMWPDTEGTFNVECLTTDHYTGGMKQKYTVNQCRRQSEDSTFYLGERTYYIAAVEVEWDYSPQREWEKELHHLQEQNVSNAFLDKGEFYIGSKYKKVVYRQYTDSTFRVPVERKAEEEHLGILGPQLHADVGDKVKIIFKNMATRPYSIHAHGVQTESSTVTPTLPGETLTYVWKIPERSGAGTEDSACIPWAYYSTVDQVKDLYSGLIGPLIVCRRPYLKVFNPRRKLEFALLFLVFDENESWYLDDNIKTYSDHPEKVNKDDEEFIESNKMHAINGRMFGNLQGLTMHVGDEVNWYLMGMGNEIDLHTTHTLKMEKNEQFFW

SEQ ID NO: 860430 - protein, 1090 aa, Homo sapiens
MKILILGIFLFLCSTPAWAKEKHYYIGIIETTWDYASDHGEKKLISVDTEHSNIYLQNGPDRIGRLYKKALYLQYTDETFRTTIEKPVWLGFLGPIIKAETGDKVYVHLKNLASRPYTFHSHGITYYKEHEGAIYPDNTTDFQRADDKVYPGEQYTYMLLATEEQSPGEGDGNCVTRIYHSHIDAPKDIASGLIGPLIICKKDSLDKEKEKHIDREFVVMFSVVDENFSWYLEDNIKTYCSEPEKVDKDNEDFQESNRMYSVNGYTFGSLPGLSMCAEDRVKWYLFGMGNEVDVHAAFFHGQALTNKNYRIDTINLFPATLFDAYMVAQNPGEWMLSCQNLNHLKAGLQAFFQVQECNKSSSKDNIRGKHVRHYYIAAEEIIWNYAPSGIDIFTKENLTAPGSDSAVFFEQGTTRIGGSYKKLVYREYTDASFTNRKERGPEEEHLGILGPVIWAEVGDTIRVTFHNKGAYPLSIEPIGVRFNKNNEGTYYSPNYNPQSRSVPPSASHVAPTETFTYEWTVPKEVGPTNADPVCLAKMYYSAVDPTKDIFTGLIGPMKICKKGSLHANGRQKDVDKEFYLFPTVFDENESLLLEDNIRMFTTAPDQVDKEDEDFQESNKMHSMNGFMYGNQPGLTMCKGDSVVWYLFSAGNEADVHGIYFSGNTYLWRGERRDTANLFPQTSLTLHMWPDTEGTFNVECLTTDHYTGGMKQKYTVNQCRRQSEDSTFYLGERTYYIAAVEVEWDYSPQREWEKELHHLQEQNVSNAFLDKGEFYIGSKYKKVVYRQYTDSTFRVPVERKAEEEHLGILGPQLHADVGDKVKIIFKNMATRPYSIHAHGVQTESSTVTPTLPGETLTYVWKIPERSGAGTEDSACIPWAYYSTVDQVKDLYSGLIGPLIVCRRPYLKVFNPRRKLEFALLFLVFDENESWYLDDNIKTYSDHPEKVNKDDEEFIESNKMHAINGRMFGNLQGLTMHVGDEVNWYLMGMGNEIDLHTVHFHGHSFQYKHRGVYSSDVFDIFPGTYQTLEMFPRTPGIWLLHCHVTDHIHAGMETTYTVLQNEASSETHRRIWNVIYPITVSVIILFQISTKE

SEQ ID NO: 860431 - protein, 1009 aa, Homo sapiens; identical to SEQ ID NO: 860429

SEQ ID NO: 860432 - protein, 1072 aa, Homo sapiens
MKILILGIFLFLCSTPAWAKEKHYYIGIIETTWDYASDHGEKKLISVDTEHSNIYLQNGPDRIGRLYKKALYLQYTDETFRTTIEKPVWLGFLGPIIKAETGDKVYVHLKNLASRPYTFHSHGITYYKEHEGAIYPDNTTDFQRADDKVYPGEQYTYMLLATEEQSPGEGDGNCVTRIYHSHIDAPKDIASGLIGPLIICKKDSLDKEKEKHIDREFVVMFSVVDENFSWYLEDNIKTYCSEPEKVDKDNEDFQESNRMYSVNGYTFGSLPGLSMCAEDRVKWYLFGMGNEVDVHAAFFHGQALTNKNYRIDTINLFPATLFDAYMVAQNPGEWMLSCQNLNHLKAGLQAFFQVQECNKSSSKDNIRGKHVRHYYIAAEEIIWNYAPSGIDIFTKENLTAPGSDSAVFFEQGTTRIGGSYKKLVYREYTDASFTNRKERGPEEEHLGILGPVIWAEVGDTIRVTFHNKGAYPLSIEPIGVRFNKNNEGTYYSPNYNPQSRSVPPSASHVAPTETFTYEWTVPKEVGPTNADPVCLAKMYYSAVDPTKDIFTGLIGPMKICKKGSLHANGRQKDVDKEFYLFPTVFDENESLLLEDNIRMFTTAPDQVDKEDEDFQESNKMHSMNGFMYGNQPGLTMCKGDSVVWYLFSAGNEADVHGIYFSGNTYLWRGERRDTANLFPQTSLTLHMWPDTEGTFNVECLTTDHYTGGMKQKYTVNQCRRQSEDSTFYLGERTYYIAAVEVEWDYSPQREWEKELHHLQEQNVSNAFLDKGEFYIGSKYKKVVYRQYTDSTFRVPVERKAEEEHLGILGPQLHADVGDKVKIIFKNMATRPYSIHAHGVQTESSTVTPTLPGETLTYVWKIPERSGAGTEDSACIPWAYYSTVDQVKDLYSGLIGPLIVCRRPYLKVFNPRRKLEFALLFLVFDENESWYLDDNIKTYSDHPEKVNKDDEEFIESNKMHAINGRMFGNLQGLTMHVGDEVNWYLMGMGNEIDLHTVHFHGHSFQYKHRGVYSSDVFDIFPGTYQTLEMFPRTPGIWLLHCHVTDHIHAGMETTYTVLQNEGEYPGSNSRSHI

SEQ ID NO: 860433 - protein, 1021 aa, Homo sapiens
MKILILGIFLFLCSTPAWAKEKHYYIGIIETTWDYASDHGEKKLISVDTEHSNIYLQNGPDRIGRLYKKALYLQYTDETFRTTIEKPVWLGFLGPIIKAETGDKVYVHLKNLASRPYTFHSHGITYYKEHEGAIYPDNTTDFQRADDKVYPGEQYTYMLLATEEQSPGEGDGNCVTRIYHSHIDAPKDIASGLIGPLIICKKDSLDKEKEKHIDREFVVMFSVVDENFSWYLEDNIKTYCSEPEKVDKDNEDFQESNRMYSVNGYTFGSLPGLSMCAEDRVKWYLFGMGNEVDVHAAFFHGQALTNKNYRIDTINLFPATLFDAYMVAQNPGEWMLSCQNLNHLKAGLQAFFQVQECNKSSSKDNIRGKHVRHYYIAAEEIIWNYAPSGIDIFTKENLTAPGSDSAVFFEQGTTRIGGSYKKLVYREYTDASFTNRKERGPEEEHLGILGPVIWAEVGDTIRVTFHNKGAYPLSIEPIGVRFNKNNEGTYYSPNYNPQSRSVPPSASHVAPTETFTYEWTVPKEVGPTNADPVCLAKMYYSAVDPTKDIFTGLIGPMKICKKGSLHANGRQKDVDKEFYLFPTVFDENESLLLEDNIRMFTTAPDQVDKEDEDFQESNKMHSMNGFMYGNQPGLTMCKGDSVVWYLFSAGNEADVHGIYFSGNTYLWRGERRDTANLFPQTSLTLHMWPDTEGTFNVECLTTDHYTGGMKQKYTVNQCRRQSEDSTFYLGERTYYIAAVEVEWDYSPQREWEKELHHLQEQNVSNAFLDKGEFYIGSKYKKVVYRQYTDSTFRVPVERKAEEEHLGILGPQLHADVGDKVKIIFKNMATRPYSIHAHGVQTESSTVTPTLPGETLTYVWKIPERSGAGTEDSACIPWAYYSTVDQVKDLYSGLIGPLIVCRRPYLKVFNPRRKLEFALLFLVFDENESWYLDDNIKTYSDHPEKVNKDDEEFIESNKMHAINGRMFGNLQGLTMHVGDEVNWYLMGMGNEIDLHTVHFHGHSFQYKKCFQEHLEFGYSTAM

SEQ ID NO: 860434 - protein, 917 aa, Homo sapiens
MKILILGIFLFLCSTPAWAKEKHYYIGIIETTWDYASDHGEKKLISVDTEHSNIYLQNGPDRIGRLYKKALYLQYTDETFRTTIEKPVWLGFLGPIIKAETGDKVYVHLKNLASRPYTFHSHGITYYKEHEGAIYPDNTTDFQRADDKVYPGEQYTYMLLATEEQSPGEGDGNCVTRIYHSHIDAPKDIASGLIGPLIICKKDSLDKEKEKHIDREFVVMFSVVDENFSWYLEDNIKTYCSEPEKVDKDNEDFQESNRMYSVNGYTFGSLPGLSMCAEDRVKWYLFGMGNEVDVHAAFFHGQALTNKNYRIDTINLFPATLFDAYMVAQNPGEWMLSCQNLNHLKAGLQAFFQVQECNKSSSKDNIRGKHVRHYYIAAEEIIWNYAPSGIDIFTKENLTAPGSDSAVFFEQGTTRIGGSYKKLVYREYTDASFTNRKERGPEEEHLGILGPVIWAEVGDTIRVTFHNKGAYPLSIEPIGVRFNKNNEGTYYSPNYNPQSRSVPPSASHVAPTETFTYEWTVPKEVGPTNADPVCLAKMYYSAVDPTKDIFTGLIGPMKICKKGSLHANGRQKDVDKEFYLFPTVFDENESLLLEDNIRMFTTAPDQVDKEDEDFQESNKMHSMNGFMYGNQPGLTMCKGDSVVWYLFSAGNEADVHGIYFSGNTYLWRGERRDTANLFPQTSLTLHMWPDTEGTFNVECLTTDHYTGGMKQKYTVNQCRRQSEDSTFYLGERTYYIAAVEVEWDYSPQREWEKELHHLQEQNVSNAFLDKGEFYIGSKYKKVVYRQYTDSTFRVPVERKAEEEHLGILGPQLHADVGDKVKIIFKNMATRPYSIHAHGVQTESSTVTPTLPGETLTYVWKIPERSGAGTEDSACIPRLLFVEIFLVRSVSSRSLAIGALVSIDRYLLKLSHSCVPSL

SEQ ID NO: 860435 - protein, 762 aa, Homo sapiens [sequence omitted]

SEQ ID NO: 860436 - protein, 654 aa, Homo sapiens
MKILILGIFLFLCSTPAWAKEKHYYIGIIETTWDYASDHGEKKLISVDTEHSNIYLQNGPDRIGRLYKKALYLQYTDETFRTTIEKPVWLGFLGPIIKAETGDKVYVHLKNLASRPYTFHSHGITYYKEHEGAIYPDNTTDFQRADDKVYPGEQYTYMLLATEEQSPGEGDGNCVTRIYHSHIDAPKDIASGLIGPLIICKKDSLDKEKEKHIDREFVVMFSVVDENFSWYLEDNIKTYCSEPEKVDKDNEDFQESNRMYSVNGYTFGSLPGLSMCAEDRVKWYLFGMGNEVDVHAAFFHGQALTNKNYRIDTINLFPATLFDAYMVAQNPGEWMLSCQNLNHLKAGLQAFFQVQECNKSSSKDNIRGKHVRHYYIAAEEIIWNYAPSGIDIFTKENLTAPGSDSAVFFEQGTTRIGGSYKKLVYREYTDASFTNRKERGPEEEHLGILGPVIWAEVGDTIRVTFHNKGAYPLSIEPIGVRFNKNNEGTYYSPNYNPQSRSVPPSASHVAPTETFTYEWTVPKEVGPTNADPVCLAKMYYSAVDPTKDIFTGLIGPMKICKKGSLHANGRQKDVDKEFYLFPTVFDENESLLLEDNIRMFTTAPDQVDKEDEDFQESNKMHCTVSTASSTNLPSYFSTAYVMLLTKQNVKSFAH

SEQ ID NO: 860437 - protein, 272 aa, Homo sapiens
SALPGLQHLGILGPQLHADVGDKVKIIFKNMATRPYSIHAHGVQTESSTVTPTLPGETLTYVWKIPERSGAGTEDSACIPWAYYSTVDQVKDLYSGLIGPLIVCRRPYLKVFNPRRKLEFALLFLVFDENESWYLDDNIKTYSDHYTGGMKQKYTVNQCRRQSEDSTFYLGERTYYIAAVEVEWDYSPQREWEKELHHLQEQNVSNAFLDKGEFYIGSKYKKVVYRQYTDSTFRVPVERKAEEEHLGILGPQLHADVGDKVKIIFSSTVTPT

SEQ ID NO: 860438 - protein, 1065 aa, Homo sapiens; identical to SEQ ID NO: 860420

SEQ ID NO: 860439 - protein, 636 aa, Homo sapiens
MKILILGIFLFLCSTPAWAKEKHYYIGIIETTWDYASDHGEKKLISVDTEHSNIYLQNGPDRIGRLYKKALYLQYTDETFRTTIEKPVWLGFLGPIIKAETGDKVYVHLKNLASRPYTFHSHGITYYKEHEGAIYPDNTTDFQRADDKVYPGEQYTYMLLATEEQSPGEGDGNCVTRIYHSHIDAPKDIASGLIGPLIICKKDSLDKEKEKHIDREFVVMFSVVDENFSWYLEDNIKTYCSEPEKVDKDNEDFQESNRMYSVNGYTFGSLPGLSMCAEDRVKWYLFGMGNEVDVHAAFFHGQALTNKNYRIDTINLFPATLFDAYMVAQNPGEWMLSCQNLNHLKAGLQAFFQVQECNKSSSKDNIRGKHVRHYYIAAEEIIWNYAPSGIDIFTKENLTAPGSDSAVFFEQGTTRIGGSYKKLVYREYTDASFTNRKERGPEEEHLGILGPVIWAEVGDTIRVTFHNKGAYPLSIEPIGVRFNKNNEGTYYSPNYNPQSRSVPPSASHVAPTETFTYEWTVPKEVGPTNADPVCLAKMYYSAVDPTKDIFTGLIGPMKICKKGSLHANGRQKDVDKEFYLFPTVFDENESLLLEDNIRMFTTAPDQVDKEDEDFQESNKMHLQRRFGRVVLIQRRK

SEQ ID NO: 860440 - protein, 528 aa, Homo sapiens
MYYSAVDPTKDIFTGLIGPMKICKKGSLHANGRQKDVDKEFYLFPTVFDENESLLLEDNIRMFTTAPDQVDKEDEDFQESNKMHSMNGFMYGNQPGLTMCKGDSVVWYLFSAGNEADVHGIYFSGNTYLWRGERRDTANLFPQTSLTLHMWPDTEGTFNVECLTTDHYTGGMKQKYTVNQCRRQSEDSTFYLGERTYYIAAVEVEWDYSPQREWEKELHHLQEQNVSNAFLDKGEFYIGSKYKKVVYRQYTDSTFRVPVERKAEEEHLGILGPQLHADVGDKVKIIFKNMATRPYSIHAHGVQTESSTVTPTLPGETLTYVWKIPERSGAGTEDSACIPWAYYSTVDQVKDLYSGLIGPLIVCRRPYLKVFNPRRKLEFALLFLVFDENESWYLDDNIKTYSDHPEKVNKDDEEFIESNKMHAINGRMFGNLQGLTMHVGDEVNWYLMGMGNEIDLHTVHFHGHSFQYKHRGVYSSDVFDIFPGTYQTLEMFPRTPGIWLLHCHVTDHIHAGMETTYTVLQNEDTKSG

SEQ ID NO: 860441 - protein, 1065 aa, Homo sapiens; identical to SEQ ID NO: 860420

SEQ ID NO: 860442 - protein, 836 aa, Homo sapiens
MKILILGIFLFLCSTPAWAKEKHYYIGIIETTWDYASDHGEKKLISVDTEHSNIYLQNGPDRIGRLYKKALYLQYTDETFRTTIEKPVWLGFLGPIIKAETGDKVYVHLKNLASRPYTFHSHGITYYKEHEGAIYPDNTTDFQRADDKVYPGEQYTYMLLATEEQSPGEGDGNCVTRIYHSHIDAPKDIASGLIGPLIICKKDSLDKEKEKHIDREFVVMFSVVDENFSWYLEDNIKTYCSEPEKVDKDNEDFQESNRMYSVNGYTFGSLPGLSMCAEDRVKWYLFGMGNEVDVHAAFFHGQALTNKNYRIDTINLFPATLFDAYMVAQNPGEWMLSCQNLNHLKAGLQAFFQVQECNKSSSKDNIRGKHVRHYYIAAEEIIWNYAPSGIDIFTKENLTAPGSDSAVFFEQGTTRIGGSYKKLVYREYTDASFTNRKERGPEEEHLGILGPVIWAEVGDTIRVTFHNKGAYPLSIEPIGVRFNKNNEGTYYSPNYNPQSRSVPPSASHVAPTETFTYEWTVPKEVGPTNADPVCLAKMYYSAVDPTKDIFTGLIGPMKICKKGSLHANGRQKDVDKEFYLFPTVFDENESLLLEDNIRMFTTAPDQVDKEDEDFQESNKMHSMNGFMYGNQPGLTMCKGDSVVWYLFSAGNEADVHGIYFSGNTYLWRGERRDTANLFPQTSLTLHMWPDTEGTFNVECLTTDHYTGGMKQKYTVNQCRRQSEDSTFYLGERTYYIAAVEVEWDYSPQREWEKELHHLQEQNVSNAFLDKGEFYIGSKYKKVVYRQYTDSTFRVPVERKAEEEHLGILGPQLHADVGDKVKIIFKNMGLLFNCGSS

SEQ ID NO: 860443 - protein, 1009 aa, Homo sapiens; identical to SEQ ID NO: 860429

SEQ ID NO: 860444 - protein, 1065 aa, Homo sapiens; identical to SEQ ID NO: 860420

SEQ ID NO: 860445 - protein, 1090 aa, Homo sapiens; identical to SEQ ID NO: 860430

SEQ ID NO: 860446 - protein, 1017 aa, Homo sapiens
MKILILGIFLFLCSTPAWAKEKHYYIGIIETTWDYASDHGEKKLISVDTEHSNIYLQNGPDRIGRLYKKALYLQYTDETFRTTIEKPVWLGFLGPIIKAETGDKVYVHLKNLASRPYTFHSHGITYYKEHEGAIYPDNTTDFQRADDKVYPGEQYTYMLLATEEQSPGEGDGNCVTRIYHSHIDAPKDIASGLIGPLIICKKDSLDKEKEKHIDREFVVMFSVVDENFSWYLEDNIKTYCSEPEKVDKDNEDFQESNRMYSVNGYTFGSLPGLSMCAEDRVKWYLFGMGNEVDVHAAFFHGQALTNKNYRIDTINLFPATLFDAYMVAQNPGEWMLSCQNLNHLKAGLQAFFQVQECNKSSSKDNIRGKHVRHYYIAAEEIIWNYAPSGIDIFTKENLTAPGSDSAVFFEQGTTRIGGSYKKLVYREYTDASFTNRKERGPEEEHLGILGPVIWAEVGDTIRVTFHNKGAYPLSIEPIGVRFNKNNEGTYYSPNYNPQSRSVPPSASHVAPTETFTYEWTVPKEVGPTNADPVCLAKMYYSAVDPTKDIFTGLIGPMKICKKGSLHANGRQKDVDKEFYLFPTVFDENESLLLEDNIRMFTTAPDQVDKEDEDFQESNKMHSMNGFMYGNQPGLTMCKGDSVVWYLFSAGNEADVHGIYFSGNTYLWRGERRDTANLFPQTSLTLHMWPDTEGTFNVECLTTDHYTGGMKQKYTVNQCRRQSEDSTFYLGERTYYIAAVEVEWDYSPQREWEKELHHLQEQNVSNAFLDKGEFYIGSKYKKVVYRQYTDSTFRVPVERKAEEEHLGILGPQLHADVGDKVKIIFKNMATRPYSIHAHGVQTESSTVTPTLPGETLTYVWKIPERSGAGTEDSACIPWAYYSTVDQVKDLYSGLIGPLIVCRRPYLKVFNPRRKLEFALLFLVFDENESWYLDDNIKTYSDHPEKVNKDDEEFIESNKMHAINGRMFGNLQGLTMHVGDEVNWYLMGMGNEIDLHTVHFHGHSFQYKHLLRLTGEYGM

SEQ ID NO: 860447 - protein, 1068 aa, Homo sapiens
MKILILGIFLFLCSTPAWAKEKHYYIGIIETTWDYASDHGEKKLISVDTEHSNIYLQNGPDRIGRLYKKALYLQYTDETFRTTIEKPVWLGFLGPIIKAETGDKVYVHLKNLASRPYTFHSHGITYYKEHEGAIYPDNTTDFQRADDKVYPGEQYTYMLLATEEQSPGEGDGNCVTRIYHSHIDAPKDIASGLIGPLIICKKDSLDKEKEKHIDREFVVMFSVVDENFSWYLEDNIKTYCSEPEKVDKDNEDFQESNRMYSVNGYTFGSLPGLSMCAEDRVKWYLFGMGNEVDVHAAFFHGQALTNKNYRIDTINLFPATLFDAYMVAQNPGEWMLSCQNLNHLKAGLQAFFQVQECNKSSSKDNIRGKHVRHYYIAAEEIIWNYAPSGIDIFTKENLTAPGSDSAVFFEQGTTRIGGSYKKLVYREYTDASFTNRKERGPEEEHLGILGPVIWAEVGDTIRVTFHNKGAYPLSIEPIGVRFNKNNEGTYYSPNYNPQSRSVPPSASHVAPTETFTYEWTVPKEVGPTNADPVCLAKMYYSAVDPTKDIFTGLIGPMKICKKGSLHANGRQKDVDKEFYLFPTVFDENESLLLEDNIRMFTTAPDQVDKEDEDFQESNKMHSMNGFMYGNQPGLTMCKGDSVVWYLFSAGNEADVHGIYFSGNTYLWRGERRDTANLFPQTSLTLHMWPDTEGTFNVECLTTDHYTGGMKQKYTVNQCRRQSEDSTFYLGERTYYIAAVEVEWDYSPQREWEKELHHLQEQNVSNAFLDKGEFYIGSKYKKVVYRQYTDSTFRVPVERKAEEEHLGILGPQLHADVGDKVKIIFKNMATRPYSIHAHGVQTESSTVTPTLPGETLTYVWKIPERSGAGTEDSACIPWAYYSTVDQVKDLYSGLIGPLIVCRRPYLKVFNPRRKLEFALLFLVFDENESWYLDDNIKTYSDHYTGGMKQKYTVNQCRRQSEDSTFYLGERTYYIAAVEVEWDYSPQREWEKELHHLQEQNVSNAFLDKGEFYIGSKYKKVVYRQYTDSTFRVPVERKAEEEHLGILGPQLHADVGDKVKIIFSSTVTPT

SEQ ID NO: 860448 - protein, 762 aa, Homo sapiens [sequence omitted]

SEQ ID NO: 860449 - protein, 347 aa, Homo sapiens
  misc_feature (339)..(339): Xaa can be any naturally occurring amino acid
  misc_feature (343)..(343): Xaa can be any naturally occurring amino acid
MKILILGIFLFLCSTPAWAKEKHYYIGIIETTWDYASDHGEKKLISVDTEHSNIYLQNGPDRIGRLYKKALYLQYTDETFRTTIEKPVWLGFLGPIIKAETGDKVYVHLKNLASRPYTFHSHGITYYKEHEGAIYPDNTTDFQRADDKVYPGEQYTYMLLATEEQSPGEGDGNCVTRIYHSHIDAPKDIASGLIGPLIICKKDSLDKEKEKHIDREFVVMFSVVDENFSWYLEDNIKTYCSEPEKVDKDNEDFQESNRMYSVNGYTFGSLPGLSMCAEDRVKWYLFGMGNEVDVHAAFFHGQALTNKNYRIDTINLFPATLFDAYMVAQNPGKNGMPPXCSKXLNPS

SEQ ID NO: 860450 - protein, 4183 aa, Homo sapiens
MGWRAPGALLLALLLHGRLLAVTHGLRAYDGLSLPEDIETVTASQMRWTHSYLSDDEDMLADSISGDDLGSGDLGSGDFQMVYFRALVNFTRSIEYSPQLEDAGSREFREVSEAVVDTLESEYLKIPGDQVVSVVFIKELDGWVFVELDVGSEGNADGAQIQEMLLRVISSGSVASYVTSPQGFQFRRLGTVPQFPRACTEAEFACHSYNECVALEYRCDRRPDCRDMSDELNCEEPVLGISPTFSLLVETTSLPPRPETTIMRQPPVTHAPQPLLPGSVRPLPCGPQEAACRNGHCIPRDYLCDGQEDCEDGSDELDCGPPPPCEPNEFPCGNGHCALKLWRCDGDFDCEDRTDEANCPTKRPEEVCGPTQFRCVSTNMCIPASFHCDEESDCPDRSDEFGCMPPQVVTPPRESIQASRGQTVTFTCVAIGVPTPFIINWRLNWGHIPSHPRVTVTSEGGRGTLIIRDVKESDQGAYTCEAMNARGMVFGIPDGVLELVPQRGPCPDGHFYLEHSAACLPCFCFGITSVCQSTRRFRDQIRLRFDQPDDFKGVNVTMPAQPGTPPLSSTQLQIDPSLHEFQLVDLSRRFLVHDSFWALPEQFLGNKVDSYGGSLRYNVRYELARGMLEPVQRPDVVLVGAGYRLLSRGHTPTQPGALNQRQVQFSEEHWVHESGRPVQRAELLQVLQSLEAVLIQTVYNTKMASVGLSDIAMDTTVTHATSHGRAHSVEECRCPIGYSGLSCESCDAHFTRVPGGPYLGTCSGCSCNGHASSCDPVYGHCLNCQHNTEGPQCNKCKAGFFGDAMKATATSCRPCPCPYIDASRRFSDTCFLDTDGQATCDACAPGYTGRRCESCAPGYEGNPIQPGGKCRPVNQEIVRCDERGSMGTSGEACRCKNNVVGRLCNECADGSFHLSTRNPDGCLKCFCMGVSRHCTSSSWSRAQLHGASEEPGHFSLTNAASTHTTNEGIFSPTPGELGFSSFHRLLSGPYFWSLPSRFLGDKVTSYGGELRFTVTQRSQPGSTPLHGQPLVVLQGNNIILEHHVAQEPSPGQPSTFIVPFREQAWQRPDGQPATREHLLMALAGIDTLLIRASYAQQPAESRVSGISMDVAVPEETGQDPALEVEQCSCPPGYRGPSCQDCDTGYTRTPSGLYLGTCERCSCHGHSEACEPETGACQGCQHHTEGPRCEQCQPGYYGDAQRGTPQDCQLCPCYGDPAAGQAAHTCFLDTDGHPTCDACSPGHSGRHCERCAPGYYGNPSQGQPCQRDSQVPGPIGCNCDPQGSVSSQCDAAGQCQCKAQVEGLTCSHCRPHHFHLSASNPDGCLPCFCMGITQQCASSAYTRHLISTHFAPGDFQGFALVNPQRNSRLTGEFTVEPVPEGAQLSFGNFAQLGHESFYWQLPETYQGDKVAAYGGKLRYTLSYTAGPQGSPLSDPDVQITGNNIMLVASQPALQGPERRSYEIMFREEFWRRPDGQPATREHLLMALADLDELLIRATFSSVPLVASISAVSLEVAQPGPSNRPRALEVEECRCPPGYIGLSCQDCAPGYTRTGSGLYLGHCELCECNGHSDLCHPETGACSQCQHNAAGEFCELCAPGYYGDATAGTPEDCQPCACPLTNPENMFSRTCESLGAGGYRCTACEPGYTGQYCEQCGPGYVGNPSVQGGQCLPETNQAPLVVEVHPARSIVPQGGSHSLRCQVSGSPPHYFYWSREDGRPVPSGTQQRHQGSELHFPSVQPSDAGVYICTCRNLHQSNTSRAELLVTEAPSKPITVTVEEQRSQSVRPGADVTFICTAKSKSPAYTLVWTRLHNGKLPTRAMDFNGILTIRNVQLSDAGTYVCTGSNMFAMDQGTATLHVQASGTLSAPVVSIHPPQLTVQPGQLAEFRCSATGSPTPTLEWTGGPGGQLPAKAQIHGGILRLPAVEPTDQAQYLCRAHSSAGQQVARAVLHVHGGGGPRVQVSPERTQVHAGRTVRLYCRAAGVPSATITWRKEGGSLPPQARSERTDIATLLIPAITTADAGFYLCVATSPAGTAQARIQVVVLSASDASPPPVKIESSSPSVTEGQTLDLNCVVAGSAHAQVTWYRRGGSLPPHTQVHGSRLRLPQVSPADSGEYVCRVENGSGPKEASITVSVLHGTHSGPSYTPVPGSTRPIRIEPSSSHVAEGQTLDLNCVVPGQAHAQVTWHKRGGSLPARHQTHGSLLRLHQVTPADSGEYVCHVVGTSGPLEASVLVTIEASVIPGPIPPVRIESSSSTVAEGQTLDLSCVVAGQAHAQVTWYKRGGSLPARHQVRGSRLYIFQASPADAGQYVCRASNGMEASITVTVTGTQGANLAYPAGSTQPIRIEPSSSQVAEGQTLDLNCVVPGQSHAQVTWHKRGGSLPVRHQTHGSLLRLYQASPADSGEYVCRVLGSSVPLEASVLVTIEPAGSVPALGVTPTVRIESSSSQVAEGQTLDLNCLVAGQAHAQVTWHKRGGSLPARHQVHGSRLRLLQVTPADSGEYVCRVVGSSGTQEASVLVTIQQRLSGSHSQGVAYPVRIESSSASLANGHTLDLNCLVASQAPHTITWYKRGGSLPSRHQIVGSRLRIPQVTPADSGEYVCHVSNGAGSRETSLIVTIQGSGSSHVPSVSPPIRIESSSPTVVEGQTLDLNCVVARQPQAIITWYKRGGSLPSRHQTHGSHLRLHQMSVADSGEYVCRANNNIDALEASIVISVSPSAGSPSAPGSSMPIRIESSSSHVAEGETLDLNCVVPGQAHAQVTWHKRGGSLPSHHQTRGSRLRLHHVSPADSGEYVCRVMGSSGPLEASVLVTIEASGSSAVHVPAPGGAPPIRIEPSSSRVAEGQTLDLKCVVPGQAHAQVTWHKRGGNLPARHQVHGPLLRLNQVSPADSGEYSCQVTGSSGTLEASVLVTIEPSSPGPIPAPGLAQPIYIEASSSHVTEGQTLDLNCVVPGQAHAQVTWYKRGGSLPARHQTHGSQLRLHLVSPADSGEYVCRAASGPGPEQEASFTVTVPPSEGSSYRLRSPVISIDPPSSTVQQGQDASFKCLIHDGAAPISLEWKTRNQELEDNVHISPNGSIITIVGTRPSNHGTYRCVASNAYGVAQSVVNLSVHGPPTVSVLPEGPVWVKVGKAVTLECVSAGEPRSSARWTRISSTPAKLEQRTYGLMDSHAVLQISSAKPSDAGTYVCLAQNALGTAQKQVEVIVDTGAMAPGAPQVQAEEAELTVEAGHTATLRCSATGSPAPTIHWSKLRSPLPWQHRLEGDTLIIPRVAQQDSGQYICNATSPAGHAEATIILHVESPPYATTVPEHASVQAGETVQLQCLAHGTPPLTFQWSRVGSSLPGRATARNELLHFERAAPEDSGRYRCRVTNKVGSAEAFAQLLVQGPPGSLPATSIPAGSTPTVQVTPQLETKSIGASVEFHCAVPSDRGTQLRWFKEGGQLPPGHSVQDGVLRIQNLDQSCQGTYICQAHGPWGKAQASAQLVIQALPSVLINIRTSVQTVVVGHAVEFECLALGDPKPQVTWSKVGGHLRPGIVQSGGVVRIAHVELADAGQYRCTATNAAGTTQSHVLLLVQALPQISMPQEVRVPAGSAAVFPCIASGYPTPDISWSKLDGSLPPDSRLENNMLMLPSVRPQDAGTYVCTATNRQGKVKAFAHLQVPERVVPYFTQTPYSFLPLPTIKDAYRKFEIKITFRPDSADGMLLYNGQKRVPGSPTNLANRQPDFISFGLVGGRPEFRFDAGSGMATIRHPTPLALGHFHTVTLLRSLTQGSLIVGDLAPVNGTSQGKFQGLDLNEELYLGGYPDYGAIPKAGLSSGFIGCVRELRIQGEEIVFHDLNLTAHGISHCPTCRDRPCQNGGQCHDSESSSYVCVCPAGFTGSRCEHSQALHCHPEACGPDATCVNRPDGRGYTCRCHLGRSGLRCEEGVTVTTPSLSGAGSYLALPALTNTHHELRLDVEFKPLAPDGVLLFSGGKSGPVEDFVSLAMVGGHLEFRYELGSGLAVLRSAEPLALGRWHRVSAERLNKDGSLRVNGGRPVLRSSPGKSQGLNLHTLLYLGGVEPSVPLSPATNMSAHFRGCVGEVSVNGKRLDLTYSFLGSQASGNAMIAPHVSASLANMVPRACPLASMSSSACVEMDSKETCVSTRRTPASSVNPVCMGAPARAPAASASLASLAHAANKALDMA

SEQ ID NO: 860451 - protein, 4183 aa, Homo sapiens; identical to SEQ ID NO: 860450

SEQ ID NO: 860452 - protein, 4200 aa, Homo sapiens
MGWRAPGALLLALLLHGRLLAVTHGLRAYDGLSLPEDIETVTASQMRWTHSYLSDDEDMLADSISGDDLGSGDLGSGDFQMVYFRALVNFTRSIEYSPQLEDAGSREFREVSEAVVDTLESEYLKIPGDQVVSVVFIKELDGWVFVELDVGSEGNADGAQIQEMLLRVISSGSVASYVTSPQGFQFRRLGTAQTPPPPPAAVAVAVTPVPQFPRACTEAEFACHSYNECVALEYRCDRRPDCRDMSDELNCEEPVLGISPTFSLLVETTSLPPRPETTIMRQPPVTHAPQPLLPGSVRPLPCGPQEAACRNGHCIPRDYLCDGQEDCEDGSDELDCGPPPPCEPNEFPCGNGHCALKLWRCDGDFDCEDRTDEANCPTKRPEEVCGPTQFRCVSTNMCIPASFHCDEESDCPDRSDEFGCMPPQVVTPPRESIQASRGQTVTFTCVAIGVPTPFIINWRLNWGHIPSHPRVTVTSEGGRGTLIIRDVKESDQGAYTCEAMNARGMVFGIPDGVLELVPQRGPCPDGHFYLEHSAACLPCFCFGITSVCQSTRRFRDQIRLRFDQPDDFKGVNVTMPAQPGTPPLSSTQLQIDPSLHEFQLVDLSRRFLVHDSFWALPEQFLGNKVDSYGGSLRYNVRYELARGMLEPVQRPDVVLVGAGYRLLSRGHTPTQPGALNQRQVQFSEEHWVHESGRPVQRAELLQVLQSLEAVLIQTVYNTKMASVGLSDIAMDTTVTHATSHGRAHSVEECRCPIGYSGLSCESCDAHFTRVPGGPYLGTCSGCSCNGHASSCDPVYGHCLNCQHNTEGPQCNKCKAGFFGDAMKATATSCRPCPCPYIDASRRFSDTCFLDTDGQATCDACAPGYTGRRCESCAPGYEGNPIQPGGKCRPVNQEIVRCDERGSMGTSGEACRCKNNVVGRLCNECADGSFHLSTRNPDGCLKCFCMGVSRHCTSSSWSRAQLHGASEEPGHFSLTNAASTHTTNEGIFSPTPGELGFSSFHRLLSGPYFWSLPSRFLGDKVTSYGGELRFTVTQRSQPGSTPLHGQPLVVLQGNNIILEHHVAQEPSPGQPSTFIVPFREQAWQRPDGQPATREHLLMALAGIDTLLIRASYAQQPAESRVSGISMDVAVPEETGQDPALEVEQCSCPPGYRGPSCQDCDTGYTRTPSGLYLGTCERCSCHGHSEACEPETGACQGCQHHTEGPRCEQCQPGYYGDAQRGTPQDCQLCPCYGDPAAGQAAHTCFLDTDGHPTCDACSPGHSGRHCERCAPGYYGNPSQGQPCQRDSQVPGPIGCNCDPQGSVSSQCDAAGQCQCKAQVEGLTCSHCRPHHFHLSASNPDGCLPCFCMGITQQCASSAYTRHLISTHFAPGDFQGFALVNPQRNSRLTGEFTVEPVPEGAQLSFGNFAQLGHESFYWQLPETYQGDKVAAYGGKLRYTLSYTAGPQGSPLSDPDVQITGNNIMLVASQPALQGPERRSYEIMFREEFWRRPDGQPATREHLLMALADLDELLIRATFSSVPLVASISAVSLEVAQPGPSNRPRALEVEECRCPPGYIGLSCQDCAPGYTRTGSGLYLGHCELCECNGHSDLCHPETGACSQCQHNAAGEFCELCAPGYYGDATAGTPEDCQPCACPLTNPENMFSRTCESLGAGGYRCTACEPGYTGQYCEQCGPGYVGNPSVQGGQCLPETNQAPLVVEVHPARSIVPQGGSHSLRCQVSGSPPHYFYWSREDGRPVPSGTQQRHQGSELHFPSVQPSDAGVYICTCRNLHQSNTSRAELLVTEAPSKPITVTVEEQRSQSVRPGADVTFICTAKSKSPAYTLVWTRLHNGKLPTRAMDFNGILTIRNVQLSDAGTYVCTGSNMFAMDQGTATLHVQASGTLSAPVVSIHPPQLTVQPGQLAEFRCSATGSPTPTLEWTGGPGGQLPAKAQIHGGILRLPAVEPTDQAQYLCRAHSSAGQQVARAVLHVHGGGGPRVQVSPERTQVHAGRTVRLYCRAAGVPSATITWRKEGGSLPPQARSERTDIATLLIPAITTADAGFYLCVATSPAGTAQARIQVVVLSASDASPPPVKIESSSPSVTEGQTLDLNCVVAGSAHAQVTWYRRGGSLPPHTQVHGSRLRLPQVSPADSGEYVCRVENGSGPKEASITVSVLHGTHSGPSYTPVPGSTRPIRIEPSSSHVAEGQTLDLNCVVPGQAHAQVTWHKRGGSLPARHQTHGSLLRLHQVTPADSGEYVCHVVGTSGPLEASVLVTIEASVIPGPIPPVRIESSSSTVAEGQTLDLSCVVAGQAHAQVTWYKRGGSLPARHQVRGSRLYIFQASPADAGQYVCRASNGMEASITVTVTGTQGANLAYPAGSTQPIRIEPSSSQVAEGQTLDLNCVVPGQSHAQVTWHKRGGSLPVRHQTHGSLLRLYQASPADSGEYVCRVLGSSVPLEASVLVTIEPAGSVPALGVTPTVRIESSSSQVAEGQTLDLNCLVAGQAHAQVTWHKRGGSLPARHQVHGSRLRLLQVTPADSGEYVCRVVGSSGTQEASVLVTIQQRLSGSHSQGVAYPVRIESSSASLANGHTLDLNCLVASQAPHTITWYKRGGSLPSRHQIVGSRLRIPQVTPADSGEYVCHVSNGAGSRETSLIVTIQGSGSSHVPSVSPPIRIESSSPTVVEGQTLDLNCVVARQPQAIITWYKRGGSLPSRHQTHGSHLRLHQMSVADSGEYVCRANNNIDALEASIVISVSPSAGSPSAPGSSMPIRIESSSSHVAEGETLDLNCVVPGQAHAQVTWHKRGGSLPSHHQTRGSRLRLHHVSPADSGEYVCRVMGSSGPLEASVLVTIEASGSSAVHVPAPGGAPPIRIEPSSSRVAEGQTLDLKCVVPGQAHAQVTWHKRGGNLPARHQVHGPLLRLNQVSPADSGEYSCQVTGSSGTLEASVLVTIEPSSPGPIPAPGLAQPIYIEASSSHVTEGQTLDLNCVVPGQAHAQVTWYKRGGSLPARHQTHGSQLRLHLVSPADSGEYVCRAASGPGPEQEASFTVTVPPSEGSSYRLRSPVISIDPPSSTVQQGQDASFKCLIHDGAAPISLEWKTRNQELEDNVHISPNGSIITIVGTRPSNHGTYRCVASNAYGVAQSVVNLSVHGPPTVSVLPEGPVWVKVGKAVTLECVSAGEPRSSARWTRISSTPAKLEQRTYGLMDSHAVLQISSAKPSDAGTYVCLAQNALGTAQKQVEVIVDTGAMAPGAPQVQAEEAELTVEAGHTATLRCSATGSPAPTIHWSKLRSPLPWQHRLEGDTLIIPRVAQQDSGQYICNATSPAGHAEATIILHVESPPYATTVPEHASVQAGETVQLQCLAHGTPPLTFQWSRVGSSLPGRATARNELLHFERAAPEDSGRYRCRVTNKVGSAEAFAQLLVQGPPGSLPATSIPAGSTPTVQVTPQLETKSIGASVEFHCAVPSDRGTQLRWFKEGGQLPPGHSVQDGVLRIQNLDQSCQGTYICQAHGPWGKAQASAQLVIQALPSVLINIRTSVQTVVVGHAVEFECLALGDPKPQVTWSKVGGHLRPGIVQSGGVVRIAHVELADAGQYRCTATNAAGTTQSHVLLLVQALPQISMPQEVRVPAGSAAVFPCIASGYPTPDISWSKLDGSLPPDSRLENNMLMLPSVRPQDAGTYVCTATNRQGKVKAFAHLQVPERVVPYFTQTPYSFLPLPTIKDAYRKFEIKITFRPDSADGMLLYNGQKRVPGSPTNLANRQPDFISFGLVGGRPEFRFDAGSGMATIRHPTPLALGHFHTVTLLRSLTQGSLIVGDLAPVNGTSQGKFQGLDLNEELYLGGYPDYGAIPKAGLSSGFIGCVRELRIQGEEIVFHDLNLTAHGISHCPTCRDRPCQNGGQCHDSESSSYVCVCPAGFTGSRCEHSQALHCHPEACGPDATCVNRPDGRGYTCRCHLGRSGLRCEEGVTVTTPSLSGAGSYLALPALTNTHHELRLDVEFKPLAPDGVLLFSGGKSGPVEDFVSLAMVGGHLEFRYELGSGLAVLRSAEPLALGRWHRVSAERLNKDGSLRVNGGRPVLRSSPGKSQGLNLHTLLYLGGVEPSVPLSPATNMSAHFRGCVGEVSVNGKRLDLTYSFLGSQASGNAMIAPHVSASLANMVPRACPLASMSSSACVEMDSKETCVSTRRTPASSVNPVCMGAPARAPAASASLASLAHAANKALDMA

SEQ ID NO: 860453 - protein, 4324 aa, Homo sapiens
LSVWDRGRGDFQMVYFRALVNFTRSIEYSPQLEDAGSREFREVSEAVVDTLESEYLKIPGDQVVSVVFIKELDGWVFVELDVGSEGNADGAQIQEMLLRVISSGSVASYVTSPQGFQFRRLGTVPQFPRACTEAEFACHSYNECVALEYRCDRRPDCRDMSDELNCEEPVLGISPTFSLLVETTSLPPRPETTIMRQPPVTHAPQPLLPGSVRPLPCGPQEAACRNGHCIPRDYLCDGQEDCEDGSDELDCGPPPPCEPNEFPCGNGHCALKLWRCDGDFDCEDRTDEANCPTKRPEEVCGPTQFRCVSTNMCIPASFHCDEESDCPDRSDEFGCMPPQVVTPPRESIQASRGQTVTFTCVAIGVPTPFIINWRLNWGHIPSHPRVTVTSEGGRGTLIIRDVKESDQGAYTCEAMNARGMVFGIPDGVLELVPQRGPCPDGHFYLEHSAACLPCFCFGITSVCQSTRRFRDQIRLRFDQPDDFKGVNVTMPAQPGTPPLSSTQLQIDPSLHEFQLVDLSRRFLVHDSFWALPEQFLGNKVDSYGGSLRYNVRYELARGMLEPVQRPDVVLVGAGYRLLSRGHTPTQPGALNQRQVQFSEEHWVHESGRPVQRAELLQVLQSLEAVLIQTVYNTKMASVGLSDIAMDTTVTHATSHGRAHSVEECRCPIGYSGLSCESCDAHFTRVPGGPYLGTCSGCSCNGHASSCDPVYGHCLNCQHNTEGPQCNKCKAGFFGDAMKATATSCRPCPCPYIDASRRFSDTCFLDTDGQATCDACAPGYTGRRCESCAPGYEGNPIQPGGKCRPVNQEIVRCDERGSMGTSGEACRCKNNVVGRLCNECADGSFHLSTRNPDGCLKCFCMGVSRHCTSSSWSRAQLHGASEEPGHFSLTNAASTHTTNEGIFSPTPGELGFSSFHRLLSGPYFWSLPSRFLGDKVTSYGGELRFTVTQRSQPGSTPLHGQPLVVLQGNNIILEHHVAQEPSPGQPSTFIVPFREQAWQRPDGQPATREHLLMALAGIDTLLIRASYAQQPAESRVSGISMDVAVPEETGQDPALEVEQCSCPPGYRGPSCQDCDTGYTRTPSGLYLGTCERCSCHGHSEACEPETGACQGCQHHTEGPRCEQCQPGYYGDAQRGTPQDCQLCPCYGDPAAGQAAHTCFLDTDGHPTCDACSPGHSGRHCERCAPGYYGNPSQGQPCQRDSQVPGPIGCNCDPQGSVSSQCDAAGQCQCKAQVEGLTCSHCRPHHFHLSASNPDGCLPCFCMGITQQCASSAYTRHLISTHFAPGDFQGFALVNPQRNSRLTGEFTVEPVPEGAQLSFGNFAQLGHESFYWQLPETYQGDKVAAYGGKLRYTLSYTAGPQGSPLSDPDVQITGNNIMLVASQPALQGPERRSYEIMFREEFWRRPDGQPATREHLLMALADLDELLIRATFSSVPLVASISAVSLEVAQPGPSNRPRALEVEECRCPPGYIGLSCQDCAPGYTRTGSGLYLGHCELCECNGHSDLCHPETGACSQCQHNAAGEFCELCAPGYYGDATAGTPEDCQPCACPLTNPENMFSRTCESLGAGGYRCTACEPGYTGQYCEQCGPGYVGNPSVQGGQCLPETNQAPLVVEVHPARSIVPQGGSHSLRCQVSGSPPHYFYWSREDGRPVPSGTQQRHQGSELHFPSVQPSDAGVYICTCRNLHQSNTSRAELLVTEAPSKPITVTVEEQRSQSVRPGADVTFICTAKSKSPAYTLVWTRLHNGKLPTRAMDFNGILTIRNVQLSDAGTYVCTGSNMFAMDQGTATLHVQASGTLSAPVVSIHPPQLTVQPGQLAEFRCSATGSPTPTLEWTGGPGGQLPAKAQIHGGILRLPAVEPTDQAQYLCRAHSSAGQQVARAVLHVHGGGGPRVQVSPERTQVHAGRTVRLYCRAAGVPSATITWRKEGGSLPPQARSERTDIATLLIPAITTADAGFYLCVATSPAGTAQARIQVVVLSASDASPPPVKIESSSPSVTEGQTLDLNCVVAGSAHAQVTWYRRGGSLPPHTQVHGSRLRLPQVSPADSGEYVCRVENGSGPKEASITVSVLHGTHSGPSYTPVPGSTRPIRIEPSSSHVAEGQTLDLNCVVPGQAHAQVTWHKRGGSLPARHQTHGSLLRLHQVTPADSGEYVCHVVGTSGPLEASVLVTIEASVIPGPIPPVRIESSSSTVAEGQTLDLSCVVAGQAHAQVTWYKRGGSLPARHQVRGSRLYIFQASPADAGQYVCRASNGMEASITVTVTGTQGANLAYPAGSTQPIRIEPSSSQVAEGQTLDLNCVVPGQSHAQVTWHKRGGSLPVRHQTHGSLLRLYQASPADSGEYVCRVLGSSVPLEASVLVTIEPAGSVPALGVTPTVRIESSSSQVAEGQTLDLNCLVAGQAHAQVTWHKRGGSLPARHQVHGSRLRLLQVTPADSGEYVCRVVGSSGTQEASVLVTIQQRLSGSHSQGVAYPVRIESSSASLANGHTLDLNCLVASQAPHTITWYKRGGSLPSRHQIVGSRLRIPQVTPADSGEYVCHVSNGAGSRETSLIVTIQGSGSSHVPSVSPPIRIESSSPTVVEGQTLDLNCVVARQPQAIITWYKRGGSLPSRHQTHGSHLRLHQMSVADSGEYVCRANNNIDALEASIVISVSPSAGSPSAPGSSMPIRIESSSSHVAEGETLDLNCVVPGQAHAQVTWHKRGGSLPSHHQTRGSRLRLHHVSPADSGEYVCRVMGSSGPLEASVLVTIEASGSSAVHVPAPGGAPPIRIEPSSSRVAEGQTLDLKCVVPGQAHAQVTWHKRGGNLPARHQVHGPLLRLNQVSPADSGEYSCQVTGSSGTLEASVLVTIEPSSPGPIPAPGLAQPIYIEASSSHVTEGQTLDLNCVVPGQAHAQVTWYKRGGSLPARHQTHGSQLRLHLVSPADSGEYVCRAASGPGPEQEASFTVTVPPSEGSSYRLRSPVISIDPPSSTVQQGQDASFKCLIHDGAAPISLEWKTRNQELEDNVHISPNGSIITIVGTRPSNHGTYRCVASNAYGVAQSVVNLSVHGPPTVSVLPEGPVWVKVGKAVTLECVSAGEPRSSARWTRISSTPAKLEQRTYGLMDSHAVLQISSAKPSDAGTYVCLAQNALGTAQKQVEVIVDTGAMAPGAPQVQAEEAELTVEAGHTATLRCSATGSPAPTIHWSKLRSPLPWQHRLEGDTLIIPRVAQQDSGQYICNATSPAGHAEATIILHVESPPYATTVPEHASVQAGETVQLQCLAHGTPPLTFQWSRVGSSLPGRATARNELLHFERAAPEDSGRYRCRVTNKVGSAEAFAQLLVQGPPGSLPATSIPAGSTPTVQVTPQLETKSIGASVEFHCAVPSDRGTQLRWFKEGGQLPPGHSVQDGVLRIQNLDQSCQGTYICQAHGPWGKAQASAQLVIQALPSVLINIRTSVQTVVVGHAVEFECLALGDPKPQVTWSKVGGHLRPGIVQSGGVVRIAHVELADAGQYRCTATNAAGTTQSHVLLLVQALPQISMPQEVRVPAGSAAVFPCIASGYPTPDISWSKLDGSLPPDSRLENNMLMLPSVRPQDAGTYVCTATNRQGKVKAFAHLQVPERVVPYFTQTPYSFLPLPTIKDAYRKFEIKITFRPDSADGMLLYNGQKRVPGSPTNLANRQPDFISFGLVGGRPEFRFDAGSGMATIRHPTPLALGHFHTVTLLRSLTQGSLIVGDLAPVNGTSQGKFQGLDLNEELYLGGYPDYGAIPKAGLSSGFIGCVRELRIQGEEIVFHDLNLTAHGISHCPTCRDRPCQNGGQCHDSESSSYVCVCPAGFTGSRCEHSQALHCHPEACGPDATCVNRPDGRGYTCRCHLGRSGLRCEEGVTVTTPSLSGAGSYLALPALTNTHHELRLDVEFKPLAPDGVLLFSGGKSGPVEDFVSLAMVGGHLEFRYELGSGLAVLRSAEPLALGRWHRVSAERLNKDGSLRVNGGRPVLRSSPGKSQGLNLHTLLYLGGVEPSVPLSPATNMSAHFRGCVGEVSVNGKRLDLTYSFLGSQGIGQCYDSSPCERQPCQHGATCMPAGEYEFQCLCRDGFKGDLCEHEENPCQLREPCLHGGTCQGTRCLCLPGFSGPRCQQGSGHGIAESDWHLEGSGGNDAPGQYGAYFHDDGFLAFPGHVFSRSLPEVPETIELEVRTSTASGLLLWQGVEVGEAGQGKDFISLGLQDGHLVFRYQLGSGEARLVSEDPINDGEWHRVTALREGRRGSIQVDGEELVSGRSPGPNVAVNAKGSVYIGGAPDVATLTGGRFSSGITGCVKNLVLHSARPGAPPPQPLDLQHRAQAGANTRPCPS

SEQ ID NO: 860454 - protein, 3815 aa, Homo sapiens
MGQGTRDNDHSNSFQPYPALNIHSASDRTFWCNGNVACLHSSNKIATKRFNEASTIKKLNSGRPVQRAELLQVLQSLEAVLIQTVYNTKMASVGLSDIAMDTTVTHATSHGRAHSVEECRCLSRQELGTTETLARIEEKRQGLTVLQRLFWSCPHRCPIGYSGLSCESCDAHFTRVPGGPYLGTCSGCSCNGHASSCDPVYGHCLNCQHNTEGPQCNKCKAGFFGDAMKATATSCRPCPCPYIDASRRFSDTCFLDTDGQATCDACAPGYTGRRCESCAPGYEGNPIQPGGKCRPVNQEIVRCDERGSMGTSGEACRCKNNVVGRLCNECADGSFHLSTRNPDGCLKCFCMGVSRHCTSSSWSRAQLHGASEEPGHFSLTNAASTHTTNEGIFSPTPGELGFSSFHRLLSGPYFWSLPSRFLGDKVTSYGGELRFTVTQRSQPGSTPLHGQPLVVLQGNNIILEHHVAQEPSPGQPSTFIVPFREQAWQRPDGQPATREHLLMALAGIDTLLIRASYAQQPAESRVSGISMDVAVPEETGQDPALEVEQCSCPPGYRGPSCQDCDTGYTRTPSGLYLGTCERCSCHGHSEACEPETGACQGCQHHTEGPRCEQCQPGYYGDAQRGTPQDCQLCPCYGDPAAGQAAHTCFLDTDGHPTCDACSPGHSGRHCERCAPGYYGNPSQGQPCQRDSQVPGPIGCNCDPQGSVSSQCDAAGQCQCKAQVEGLTCSHCRPHHFHLSASNPDGCLPCFCMGITQQCASSAYTRHLISTHFAPGDFQGFALVNPQRNSRLTGEFTVEPVPEGAQLSFGNFAQLGHESFYWQLPETYQGDKVAAYGGKLRYTLSYTAGPQGSPLSDPDVQITGNNIMLVASQPALQGPERRSYEIMFREEFWRRPDGQPATREHLLMALADLDELLIRATFSSVPLVASISAVSLEVAQPGPSNRPRALEVEECRCPPGYIGLSCQDCAPGYTRTGSGLYLGHCELCECNGHSDLCHPETGACSQCQHNAAGEFCELCAPGYYGDATAGTPEDCQPCACPLTNPENMFSRTCESLGAGGYRCTACEPGYTGQYCEQCGPGYVGNPSVQGGQCLPETNQAPLVVEVHPARSIVPQGGSHSLRCQVSGSPPHYFYWSREDGRPVPSGTQQRHQGSELHFPSVQPSDAGVYICTCRNLHQSNTSRAELLVTEAPSKPITVTVEEQRSQSVRPGADVTFICTAKSKSPAYTLVWTRLHNGKLPTRAMDFNGILTIRNVQLSDAGTYVCTGSNMFAMDQGTATLHVQASGTLSAPVVSIHPPQLTVQPGQLAEFRCSATGSPTPTLEWTGGPGGQLPAKAQIHGGILRLPAVEPTDQAQYLCRAHSSAGQQVARAVLHVHGGGGPRVQVSPERTQVHAGRTVRLYCRAAGVPSATITWRKEGGSLPPQARSERTDIATLLIPAITTADAGFYLCVATSPAGTAQARIQVVVLSASDASPPPVKIESSSPSVTEGQTLDLNCVVAGSAHAQVTWYRRGGSLPPHTQVHGSRLRLPQVSPADSGEYVCRVENGSGPKEASITVSVLHGTHSGPSYTPVPGSTRPIRIEPSSSHVAEGQTLDLNCVVPGQAHAQVTWHKRGGSLPARHQTHGSLLRLHQVTPADSGEYVCHVVGTSGPLEASVLVTIEASVIPGPIPPVRIESSSSTVAEGQTLDLSCVVAGQAHAQVTWYKRGGSLPARHQVRGSRLYIFQASPADAGQYVCRASNGMEASITVTVTGTQGANLAYPAGSTQPIRIEPSSSQVAEGQTLDLNCVVPGQSHAQVTWHKRGGSLPVRHQTHGSLLRLYQASPADSGEYVCRVLGSSVPLEASVLVTIEPAGSVPALGVTPTVRIESSSSQVAEGQTLDLNCLVAGQAHAQVTWHKRGGSLPARHQVHGSRLRLLQVTPADSGEYVCRVVGSSGTQEASVLVTIQQRLSGSHSQGVAYPVRIESSSASLANGHTLDLNCLVASQAPHTITWYKRGGSLPSRHQIVGSRLRIPQVTPADSGEYVCHVSNGAGSRETSLIVTIQGSGSSHVPSVSPPIRIESSSPTVVEGQTLDLNCVVARQPQAIITWYKRGGSLPSRHQTHGSHLRLHQMSVADSGEYVCRANNNIDALEASIVISVSPSAGSPSAPGSSMPIRIESSSSHVAEGETLDLNCVVPGQAHAQVTWHKRGGSLPSHHQTRGSRLRLHHVSPADSGEYVCRVMGSSGPLEASVLVTIEASGSSAVHVPAPGGAPPIRIEPSSSRVAEGQTLDLKCVVPGQAHAQVTWHKRGGNLPARHQVHGPLLRLNQVSPADSGEYSCQVTGSSGTLEASVLVTIEPSSPGPIPAPGLAQPIYIEASSSHVTEGQTLDLNCVVPGQAHAQVTWYKRGGSLPARHQTHGSQLRLHLVSPADSGEYVCRAASGPGPEQEASFTVTVPPSEGSSYRLRSPVISIDPPSSTVQQGQDASFKCLIHDGAAPISLEWKTRNQELEDNVHISPNGSIITIVGTRPSNHGTYRCVASNAYGVAQSVVNLSVHGPPTVSVLPEGPVWVKVGKAVTLECVSAGEPRSSARWTRISSTPAKLEQRTYGLMDSHAVLQISSAKPSDAGTYVCLAQNALGTAQKQVEVIVDTGAMAPGAPQVQAEEAELTVEAGHTATLRCSATGSPAPTIHWSKLRSPLPWQHRLEGDTLIIPRVAQQDSGQYICNATSPAGHAEATIILHVESPPYATTVPEHASVQAGETVQLQCLAHGTPPLTFQWSRVGSSLPGRATARNELLHFERAAPEDSGRYRCRVTNKVGSAEAFAQLLVQGPPGSLPATSIPAGSTPTVQVTPQLETKSIGASVEFHCAVPSDRGTQLRWFKEGGQLPPGHSVQDGVLRIQNLDQSCQGTYICQAHGPWGKAQASAQLVIQALPSVLINIRTSVQTVVVGHAVEFECLALGDPKPQVTWSKVGGHLRPGIVQSGGVVRIAHVELADAGQYRCTATNAAGTTQSHVLLLVQALPQISMPQEVRVPAGSAAVFPCIASGYPTPDISWSKLDGSLPPDSRLENNMLMLPSVRPQDAGTYVCTATNRQGKVKAFAHLQVPERVVPYFTQTPYSFLPLPTIKDAYRKFEIKITFRPDSADGMLLYNGQKRVPGSPTNLANRQPDFISFGLVGGRPEFRFDAGSGMATIRHPTPLALGHFHTVTLLRSLTQGSLIVGDLAPVNGTSQGKFQGLDLNEELYLGGYPDYGAIPKAGLSSGFIGCVRELRIQGEEIVFHDLNLTAHGISHCPTCRDRPCQNGGQCHDSESSSYVCVCPAGFTGSRCEHSQALHCHPEACGPDATCVNRPDGRGYTCRCHLGRSGLRCEEGVTVTTPSLSGAGSYLALPALTNTHHELRLDVEFKPLAPDGVLLFSGGKSGPVEDFVSLAMVGGHLEFRYELGSGLAVLRSAEPLALGRWHRVSAERLNKDGSLRVNGGRPVLRSSPGKSQGLNLHTLLYLGGVEPSVPLSPATNMSAHFRGCVGEVSVNGKRLDLTYSFLGSQGIGQCYDSSPCERQPCQHGATCMPAGEYEFQCLCRDGFKGDLCEHEENPCQLREPCLHGGTCQGTRCLCLPGFSGPRCQQGSGHGIAESDWHLEGSGGNDAPGQYGAYFHDDGFLAFPGHVFSRSLPEVPETIELEVRTSTASGLLLWQGVEVGEAGQGKDFISLGLQDGHLVFRYQLGSGEARLVSEDPINDGEWHRVTALREGRRGSIQVDGEELVSGRSPGPNVAVNAKGSVYIGGAPDVATLTGGRFSSGITGCVKNLVLHSARPGAPPPQPLDLQHRAQAGANTRPCPS

SEQ ID NO: 860455 - protein, 3325 aa, Homo sapiens
TGLSGGLIRPCQWRTPGVPGTEPALLFTLGLVTPRVSGISMDVAVPEETGQDPALEVEQCSCPPGYRGPSCQDCDTGYTRTPSGLYLGTCERCSCHGHSEACEPETGACQGCQHHTEGPRCEQCQPGYYGDAQRGTPQDCQLCPCYGDPAAGQAAHTCFLDTDGHPTCDACSPGHSGRHCERCAPGYYGNPSQGQPCQRDSQVPGPIGCNCDPQGSVSSQCDAAGQCQCKAQVEGLTCSHCRPHHFHLSASNPDGCLPCFCMGITQQCASSAYTRHLISTHFAPGDFQGFALVNPQRNSRLTGEFTVEPVPEGAQLSFGNFAQLGHESFYWQLPETYQGDKVAAYGGKLRYTLSYTAGPQGSPLSDPDVQITGNNIMLVASQPALQGPERRSYEIMFREEFWRRPDGQPATREHLLMALADLDELLIRATFSSVPLVASISAVSLEVAQPGPSNRPRALEVEECRCPPGYIGLSCQDCAPGYTRTGSGLYLGHCELCECNGHSDLCHPETGACSQCQHNAAGEFCELCAPGYYGDATAGTPEDCQPCACPLTNPENMFSRTCESLGAGGYRCTACEPGYTGQYCEQCGPGYVGNPSVQGGQCLPETNQAPLVVEVHPARSIVPQGGSHSLRCQVSGSPPHYFYWSREDGRPVPSGTQQRHQGSELHFPSVQPSDAGVYICTCRNLHQSNTSRAELLVTEAPSKPITVTVEEQRSQSVRPGADVTFICTAKSKSPAYTLVWTRLHNGKLPTRAMDFNGILTIRNVQLSDAGTYVCTGSNMFAMDQGTATLHVQASGTLSAPVVSIHPPQLTVQPGQLAEFRCSATGSPTPTLEWTGGPGGQLPAKAQIHGGILRLPAVEPTDQAQYLCRAHSSAGQQVARAVLHVHGGGGPRVQVSPERTQVHAGRTVRLYCRAAGVPSATITWRKEGGSLPPQARSERTDIATLLIPAITTADAGFYLCVATSPAGTAQARIQVVVLSASDASPPPVKIESSSPSVTEGQTLDLNCVVAGSAHAQVTWYRRGGSLPPHTQVHGSRLRLPQVSPADSGEYVCRVENGSGPKEASITVSVLHGTHSGPSYTPVPGSTRPIRIEPSSSHVAEGQTLDLNCVVPGQAHAQVTWHKRGGSLPARHQTHGSLLRLHQVTPADSGEYVCHVVGTSGPLEASVLVTIEASVIPGPIPPVRIESSSSTVAEGQTLDLSCVVAGQAHAQVTWYKRGGSLPARHQVRGSRLYIFQASPADAGQYVCRASNGMEASITVTVTGTQGANLAYPAGSTQPIRIEPSSSQVAEGQTLDLNCVVPGQSHAQVTWHKRGGSLPVRHQTHGSLLRLYQASPADSGEYVCRVLGSSVPLEASVLVTIEPAGSVPALGVTPTVRIESSSSQVAEGQTLDLNCLVAGQAHAQVTWHKRGGSLPARHQVHGSRLRLLQVTPADSGEYVCRVVGSSGTQEASVLVTIQQRLSGSHSQGVAYPVRIESSSASLANGHTLDLNCLVASQAPHTITWYKRGGSLPSRHQIVGSRLRIPQVTPADSGEYVCHVSNGAGSRETSLIVTIQGSGSSHVPSVSPPIRIESSSPTVVEGQTLDLNCVVARQPQAIITWYKRGGSLPSRHQTHGSHLRLHQMSVADSGEYVCRANNNIDALEASIVISVSPSAGSPSAPGSSMPIRIESSSSHVAEGETLDLNCVVPGQAHAQVTWHKRGGSLPSHHQTRGSRLRLHHVSPADSGEYVCRVMGSSGPLEASVLVTIEASGSSAVHVPAPGGAPPIRIEPSSSRVAEGQTLDLKCVVPGQAHAQVTWHKRGGNLPARHQVHGPLLRLNQVSPADSGEYSCQVTGSSGTLEASVLVTIEPSSPGPIPAPGLAQPIYIEASSSHVTEGQTLDLNCVVPGQAHAQVTWYKRGGSLPARHQTHGSQLRLHLVSPADSGEYVCRAASGPGPEQEASFTVTVPPSEGSSYRLRSPVISIDPPSSTVQQGQDASFKCLIHDGAAPISLEWKTRNQELEDNVHISPNGSIITIVGTRPSNHGTYRCVASNAYGVAQSVVNLSVHGPPTVSVLPEGPVWVKVGKAVTLECVSAGEPRSSARWTRISSTPAKLEQRTYGLMDSHAVLQISSAKPSDAGTYVCLAQNALGTAQKQVEVIVDTGAMAPGAPQVQAEEAELTVEAGHTATLRCSATGSPAPTIHWSKLRSPLPWQHRLEGDTLIIPRVAQQDSGQYICNATSPAGHAEATIILHVESPPYATTVPEHASVQAGETVQLQCLAHGTPPLTFQWSRVGSSLPGRATARNELLHFERAAPEDSGRYRCRVTNKVGSAEAFAQLLVQGPPGSLPATSIPAGSTPTVQVTPQLETKSIGASVEFHCAVPSDRGTQLRWFKEGGQLPPGHSVQDGVLRIQNLDQSCQGTYICQAHGPWGKAQASAQLVIQALPSVLINIRTSVQTVVVGHAVEFECLALGDPKPQVTWSKVGGHLRPGIVQSGGVVRIAHVELADAGQYRCTATNAAGTTQSHVLLLVQALPQISMPQEVRVPAGSAAVFPCIASGYPTPDISWSKLDGSLPPDSRLENNMLMLPSVRPQDAGTYVCTATNRQGKVKAFAHLQVPERVVPYFTQTPYSFLPLPTIKDAYRKFEIKITFRPDSADGMLLYNGQKRVPGSPTNLANRQPDFISFGLVGGRPEFRFDAGSGMATIRHPTPLALGHFHTVTLLRSLTQGSLIVGDLAPVNGTSQGKFQGLDLNEELYLGGYPDYGAIPKAGLSSGFIGCVRELRIQGEEIVFHDLNLTAHGISHCPTCRDRPCQNGGQCHDSESSSYVCVCPAGFTGSRCEHSQALHCHPEACGPDATCVNRPDGRGYTCRCHLGRSGLRCEEGVTVTTPSLSGAGSYLALPALTNTHHELRLDVEFKPLAPDGVLLFSGGKSGPVEDFVSLAMVGGHLEFRYELGSGLAVLRSAEPLALGRWHRVSAERLNKDGSLRVNGGRPVLRSSPGKSQGLNLHTLLYLGGVEPSVPLSPATNMSAHFRGCVGEVSVNGKRLDLTYSFLGSQGIGQCYDSSPCERQPCQHGATCMPAGEYEFQCLCRDGFKGDLCEHEENPCQLREPCLHGGTCQGTRCLCLPGFSGPRCQQGSGHGIAESDWHLEGSGGNDAPGQYGAYFHDDGFLAFPGHVFSRSLPEVPETIELEVRTSTASGLLLWQGVEVGEAGQGKDFISLGLQDGHLVFRYQLGSGEARLVSEDPINDGEWHRVTALREGRRGSIQVDGEELVSGRSPGPNVAVNAKGSVYIGGAPDVATLTGGRFSSGITGCVKNLVLHSARPGAPPPQPLDLQHRAQAGANTRPCPS

SEQ ID NO: 860456 - protein, 4272 aa, Homo sapiens
MGWRAPGALLLALLLHGRLLAVTHGLRAYDGLSLPEDIETVTASQMRWTHSYLSDDEDMLADSISGDDLGSGDLGSGDFQMVYFRALVNFTRSIEYSPQLEDAGSREFREVSEAVVDTLESEYLKIPGDQVVSVVFIKELDGWVFVELDVGSEGNADGAQIQEMLLRVISSGSVASYVTSPQGFQFRRLGTVPQFPRACTEAEFACHSYNECVALEYRCDRRPDCRDMSDELNCEEPVLGISPTFSLLVETTSLPPRPETTIMRQPPVTHAPQPLLPGSVRPLPCGPQEAACRNGHCIPRDYLCDGQEDCEDGSDELDCGPPPPCEPNEFPCGNGHCALKLWRCDGDFDCEDRTDEANCPTKRPEEVCGPTQFRCVSTNMCIPASFHCDEESDCPDRSDEFGCMPPQVVTPPRESIQASRGQTVTFTCVAIGVPTPFIINWRLNWGHIPSHPRVTVTSEGGRGTLIIRDVKESDQGAYTCEAMNARGMVFGIPDGVLELVPQRGPCPDGHFYLEHSAACLPCFCFGITSVCQSTRRFRDQIRLRFDQPDDFKGVNVTMPAQPGTPPLSSTQLQIDPSLHEFQLVDLSRRFLVHDSFWALPEQFLGNKVDSYGGSLRYNVRYELARGMLEPVQRPDVVLVGAGYRLLSRGHTPTQPGALNQRQVQFSEEHWVHESGRPVQRAELLQVLQSLEAVLIQTVYNTKMASVGLSDIAMDTTVTHATSHGRAHSVEECRCPIGYSGLSCESCDAHFTRVPGGPYLGTCSGCSCNGHASSCDPVYGHCLNCQHNTEGPQCNKCKAGFFGDAMKATATSCRPCPCPYIDASRRFSDTCFLDTDGQATCDACAPGYTGRRCESCAPGYEGNPIQPGGKCRPVNQEIVRCDERGSMGTSGEACRCKNNVVGRLCNECADGSFHLSTRNPDGCLKCFCMGVSRHCTSSSWSRAQLHGASEEPGHFSLTNAASTHTTNEGIFSPTPGELGFSSFHRLLSGPYFWSLPSRFLGDKVTSYGGELRFTVTQRSQPGSTPLHGQPLVVLQGNNIILEHHVAQEPSPGQPSTFIVPFREQAWQRPDGQPATREHLLMALAGIDTLLIRASYAQQPAESRVSGISMDVAVPEETGQDPALEVEQCSCPPGYRGPSCQDCDTGYTRTPSGLYLGTCERCSCHGHSEACEPETGACQGCQHHTEGPRCEQCQPGYYGDAQRGTPQDCQLCPCYGDPAAGQAAHTCFLDTDGHPTCDACSPGHSGRHCERCAPGYYGNPSQGQPCQRDSQVPGPIGCNCDPQGSVSSQCDAAGQCQCKAQVEGLTCSHCRPHHFHLSASNPDGCLPCFCMGITQQCASSAYTRHLISTHFAPGDFQGFALVNPQRNSRLTGEFTVEPVPEGAQLSFGNFAQLGHESFYWQLPETYQGDKVAAYGGKLRYTLSYTAGPQGSPLSDPDVQITGNNIMLVASQPALQGPERRSYEIMFREEFWRRPDGQPATREHLLMALADLDELLIRATFSSVPLVASISAVSLEVAQPGPSNRPRALEVEECRCPPGYIGLSCQDCAPGYTRTGSGLYLGHCELCECNGHSDLCHPETGACSQCQHNAAGEFCELCAPGYYGDATAGTPEDCQPCACPLTNPENMFSRTCESLGAGGYRCTACEPGYTGQYCEQCGPGYVGNPSVQGGQCLPETNQAPLVVEVHPARSIVPQGGSHSLRCQVSGSPPHYFYWSREDGRPVPSGTQQRHQGSELHFPSVQPSDAGVYICTCRNLHQSNTSRAELLVTEAPSKPITVTVEEQRSQSVRPGADVTFICTAKSKSPAYTLVWTRLHNGKLPTRAMDFNGILTIRNVQLSDAGTYVCTGSNMFAMDQGTATLHVQASGTLSAPVVSIHPPQLTVQPGQLAEFRCSATGSPTPTLEWTGGPGGQLPAKAQIHGGILRLPAVEPTDQAQYLCRAHSSAGQQVARAVLHVHGGGGPRVQVSPERTQVHAGRTVRLYCRAAGVPSATITWRKEGGSLPPQARSERTDIATLLIPAITTADAGFYLCVATSPAGTAQARIQVVVLSASDASPPPVKIESSSPSVTEGQTLDLNCVVAGSAHAQVTWYRRGGSLPPHTQVHGSRLRLPQVSPADSGEYVCRVENGSGPKEASITVSVLHGTHSGPSYTPVPGSTRPIRIEPSSSHVAEGQTLDLNCVVPGQAHAQVTWHKRGGSLPARHQTHGSLLRLHQVTPADSGEYVCHVVGTSGPLEASVLVTIEASVIPGPIPPVRIESSSSTVAEGQTLDLSCVVAGQAHAQVTWYKRGGSLPARHQVRGSRLYIFQASPADAGQYVCRASNGMEASITVTVTGTQGANLAYPAGSTQPIRIEPSSSQVAEGQTLDLNCVVPGQSHAQVTWHKRGGSLPVRHQTHGSLLRLYQASPADSGEYVCRVLGSSVPLEASVLVTIEPAGSVPALGVTPTVRIESSSSQVAEGQTLDLNCLVAGQAHAQVTWHKRGGSLPARHQVHGSRLRLLQVTPADSGEYVCRVVGSSGTQEASVLVTIQQRLSGSHSQGVAYPVRIESSSASLANGHTLDLNCLVASQAPHTITWYKRGGSLPSRHQIVGSRLRIPQVTPADSGEYVCHVSNGAGSRETSLIVTIQGSGSSHVPSVSPPIRIESSSPTVVEGQTLDLNCVVARQPQAIITWYKRGGSLPSRHQTHGSHLRLHQMSVADSGEYVCRANNNIDALEASIVISVSPSAGSPSAPGSSMPIRIESSSSHVAEGETLDLNCVVPGQAHAQVTWHKRGGSLPSHHQTRGSRLRLHHVSPADSGEYVCRVMGSSGPLEASVLVTIEASGSSAVHVPAPGGAPPIRIEPSSSRVAEGQTLDLKCVVPGQAHAQVTWHKRGGNLPARHQVHGPLLRLNQVSPADSGEYSCQVTGSSGTLEASVLVTIEPSSPGPIPAPGLAQPIYIEASSSHVTEGQTLDLNCVVPGQAHAQVTWYKRGGSLPARHQTHGSQLRLHLVSPADSGEYVCRAASGPGPEQEASFTVTVPPSEGSSYRLRSPVISIDPPSSTVQQGQDASFKCLIHDGAAPISLEWKTRNQELEDNVHISPNGSIITIVGTRPSNHGTYRCVASNAYGVAQSVVNLSVHGPPTVSVLPEGPVWVKVGKAVTLECVSAGEPRSSARWTRISSTPAKLEQRTYGLMDSHAVLQISSAKPSDAGTYVCLAQNALGTAQKQVEVIVDTGAMAPGAPQVQAEEAELTVEAGHTATLRCSATGSPAPTIHWSKLRSPLPWQHRLEGDTLIIPRVAQQDSGQYICNATSPAGHAEATIILHVESPPYATTVPEHASVQAGETVQLQCLAHGTPPLTFQWSRVGSSLPGRATARNELLHFERAAPEDSGRYRCRVTNKVGSAEAFAQLLVQGPPGSLPATSIPAGSTPTVQVTPQLETKSIGASVEFHCAVPSDRGTQLRWFKEGGQLPPGHSVQDGVLRIQNLDQSCQGTYICQAHGPWGKAQASAQLVIQALPSVLINIRTSVQTVVVGHAVEFECLALGDPKPQVTWSKVGGHLRPGIVQSGGVVRIAHVELADAGQYRCTATNAAGTTQSHVLLLVQALPQISMPQEVRVPAGSAAVFPCIASGYPTPDISWSKLDGSLPPDSRLENNMLMLPSVRPQDAGTYVCTATNRQGKVKAFAHLQVPERVVPYFTQTPYSFLPLPTIKDAYRKFEIKITFRPDSADGMLLYNGQKRVPGSPTNLANRQPDFISFGLVGGRPEFRFDAGSGMATIRHPTPLALGHFHTVTLLRSLTQGSLIVGDLAPVNGTSQGKFQGLDLNEELYLGGYPDYGAIPKAGLSSGFIGCVRELRIQGEEIVFHDLNLTAHGISHCPTCRDRPCQNGGQCHDSESSSYVCVCPAGFTGSRCEHSQALHCHPEACGPDATCVNRPDGRGYTCRCHLGRSGLRCEEGVTVTTPSLSGAGSYLALPALTNTHHELRLDVEFKPLAPDGVLLFSGGKSGPVEDFVSLAMVGGHLEFRYELGSGLAVLRSAEPLALGRWHRVSAERLNKDGSLRVNGGRPVLRSSPGKSQGLNLHTLLYLGGVEPSVPLSPATNMSAHFRGCVGEVSVNGKRLDLTYSFLGSQGIGQCYDSSPCERQPCQHGATCMPAGEYEFQCLCRDGFKGDLCEHEENPCQLREPCLHGGTCQGTRCLCLPGFSGPRCQQGSGHGIAESDWHLEGSGGNDAPGQYGAYFHDDGFLAFPGHVFSRSLPEVPETIELEVRTSTASGLLLWQGVEVGEAGQGKDFISAGANTRPCPS

SEQ ID NO: 860457 - protein, 1058 aa, Homo sapiens
ELRILTSCDVPVAPLLAAFVESSMRFGQKLSRCQHYVSCKDLQNLIHVPAGPPGSLPATSIPAGSTPTVQVTPQLETKSIGASVEFHCAVPSDRGTQLRWFKEGGQLPPGHSVQDGVLRIQNLDQSCQGTYICQAHGPWGKAQASAQLVIQALPSVLINIRTSVQTVVVGHAVEFECLALGDPKPQVTWSKVGGHLRPGIVQSGGVVRIAHVELADAGQYRCTATNAAGTTQSHVLLLVQALPQISMPQEVRVPAGSAAVFPCIASGYPTPDISWSKLDGSLPPDSRLENNMLMLPSVRPQDAGTYVCTATNRQGKVKAFAHLQVPERVVPYFTQTPYSFLPLPTIKDAYRKFEIKITFRPDSADGMLLYNGQKRVPGSPTNLANRQPDFISFGLVGGRPEFRFDAGSGMATIRHPTPLALGHFHTVTLLRSLTQGSLIVGDLAPVNGTSQGKFQGLDLNEELYLGGYPDYGAIPKAGLSSGFIGCVRELRIQGEEIVFHDLNLTAHGISHCPTCRDRPCQNGGQCHDSESSSYVCVCPAGFTGSRCEHSQALHCHPEACGPDATCVNRPDGRGYTCRCHLGRSGLRCEEGVTVTTPSLSGAGSYLALPALTNTHHELRLDVEFKPLAPDGVLLFSGGKSGPVEDFVSLAMVGGHLEFRYELGSGLAVLRSAEPLALGRWHRVSAERLNKDGSLRVNGGRPVLRSSPGKSQGLNLHTLLYLGGVEPSVPLSPATNMSAHFRGCVGEVSVNGKRLDLTYSFLGSQGIGQCYDSSPCERQPCQHGATCMPAGEYEFQCLCRDGFKGDLCEHEENPCQLREPCLHGGTCQGTRCLCLPGFSGPRCQQGSGHGIAESDWHLEGSGGNDAPGQYGAYFHDDGFLAFPGHVFSRSLPEVPETIELEVRTSTASGLLLWQGVEVGEAGQGKDFISLGLQDGHLVFRYQLGSGEARLVSEDPINDGEWHRVTALREGRRGSIQVDGEELVSGRSPGPNVAVNAKGSVYIGGAPDVATLTGGRFSSGITGCVKNLVLHSARPGAPPPQPLDLQHRAQAGANTRPCPS

SEQ ID NO: 860458 - protein, 4183 aa, Homo sapiens; identical to SEQ ID NO: 860450

SEQ ID NO: 860459 - protein, 311 aa, Homo sapiens
NSHPSTLNNARYEAWVKSAEATGYSSPCERQPCQHGATCMPAGEYEFQCLCRDGFKGDLCEHEENPCQLREPCLHGGTCQGTRCLCLPGFSGPRCQQGSGHGIAESDWHLEGSGGNDAPGQYGAYFHDDGFLAFPGHVFSRSLPEVPETIELEVRTSTASGLLLWQGVEVGEAGQGKDFISLGLQDGHLVFRYQLGSGEARLVSEDPINDGEWHRVTALREGRRGSIQVDGEELVSGRSPGPNVAVNAKGSVYIGGAPDVATLTGGRFSSGITGCVKNLVLHSARPGAPPPQPLDLQHRAQAGANTRPCPS

SEQ ID NO: 860460 - protein, 4183 aa, Homo sapiens; identical to SEQ ID NO: 860450

SEQ ID NO: 860461 - protein, 233 aa, Homo sapiens
  misc_feature (9)..(9): Xaa can be any naturally occurring amino acid
MVEAGVNRXRLVLWPRCQQGSGHGIAESDWHLEGSGGNDAPGQYGAYFHDDGFLAFPGHVFSRSLPEVPETIELEVRTSTASGLLLWQGVEVGEAGQGKDFISLGLQDGHLVFRYQLGSGEARLVSEDPINDGEWHRVTALREGRRGSIQVDGEELVSGRSPGPNVAVNAKGSVYIGGAPDVATLTGGRFSSGITGCVKNLVLHSARPGAPPPQPLDLQHRAQAGANTRPCPS

SEQ ID NO: 860462 - protein, 207 aa, Homo sapiens [sequence omitted]

SEQ ID NO: 860463 - protein, 3704 aa, Homo sapiens
MGWRAPGALLLALLLHGRLLAVTHGLRAYDGLSLPEDIETVTASQMRWTHSYLSDDEDMLADSISGDDLGSGDLGSGDFQMVYFRALVNFTRSIEYSPQLEDAGSREFREVSEAVVDTLESEYLKIPGDQVVSVVFIKELDGWVFVELDVGSEGNADGAQIQEMLLRVISSGSVASYVTSPQGFQFRRLGTVPQFPRACTEAEFACHSYNECVALEYRCDRRPDCRDMSDELNCEEPVLGISPTFSLLVETTSLPPRPETTIMRQPPVTHAPQPLLPGSVRPLPCGPQEAACRNGHCIPRDYLCDGQEDCEDGSDELDCGPPPPCEPNEFPCGNGHCALKLWRCDGDFDCEDRTDEANCPTKRPEEVCGPTQFRCVSTNMCIPASFHCDEESDCPDRSDEFGCMPPQVVTPPRESIQASRGQTVTFTCVAIGVPTPFIINWRLNWGHIPSHPRVTVTSEGGRGTLIIRDVKESDQGAYTCEAMNARGMVFGIPDGVLELVPQRGPCPDGHFYLEHSAACLPCFCFGITSVCQSTRRFRDQIRLRFDQPDDFKGVNVTMPAQPGTPPLSSTQLQIDPSLHEFQLVDLSRRFLVHDSFWALPEQFLGNKVDSYGGSLRYNVRYELARGMLEPVQRPDVVLVGAGYRLLSRGHTPTQPGALNQRQVQFSEEHWVHESGRPVQRAELLQVLQSLEAVLIQTVYNTKMASVGLSDIAMDTTVTHATSHGRAHSVEECRCPIGYSGLSCESCDAHFTRVPGGPYLGTCSGCSCNGHASSCDPVYGHCLNCQHNTEGPQCNKCKAGFFGDAMKATATSCRPCPCPYIDASRRFSDTCFLDTDGQATCDACAPGYTGRRCESCAPGYEGNPIQPGGKCRPVNQEIVRCDERGSMGTSGEACRCKNNVVGRLCNECADGSFHLSTRNPDGCLKCFCMGVSRHCTSSSWSRAQLHGASEEPGHFSLTNAASTHTTNEGIFSPTPGELGFSSFHRLLSGPYFWSLPSRFLGDKVTSYGGELRFTVTQRSQPGSTPLHGQPLVVLQGNNIILEHHVAQEPSPGQPSTFIVPFREQAWQRPDGQPATREHLLMALAGIDTLLIRASYAQQPAESRVSGISMDVAVPEETGQDPALEVEQCSCPPGYRGPSCQDCDTGYTRTPSGLYLGTCERCSCHGHSEACEPETGACQGCQHHTEGPRCEQCQPGYYGDAQRGTPQDCQLCPCYGDPAAGQAAHTCFLDTDGHPTCDACSPGHSGRHCERCAPGYYGNPSQGQPCQRDSQVPGPIGCNCDPQGSVSSQCDAAGQCQCKAQVEGLTCSHCRPHHFHLSASNPDGCLPCFCMGITQQCASSAYTRHLISTHFAPGDFQGFALVNPQRNSRLTGEFTVEPVPEGAQLSFGNFAQLGHESFYWQLPETYQGDKVAAYGGKLRYTLSYTAGPQGSPLSDPDVQITGNNIMLVASQPALQGPERRSYEIMFREEFWRRPDGQPATREHLLMALADLDELLIRATFSSVPLVASISAVSLEVAQPGPSNRPRALEVEECRCPPGYIGLSCQDCAPGYTRTGSGLYLGHCELCECNGHSDLCHPETGACSQCQHNAAGEFCELCAPGYYGDATAGTPEDCQPCACPLTNPENMFSRTCESLGAGGYRCTACEPGYTGQYCEQCGPGYVGNPSVQGGQCLPETNQAPLVVEVHPARSIVPQGGSHSLRCQVSGSPPHYFYWSREDGRPVPSGTQQRHQGSELHFPSVQPSDAGVYICTCRNLHQSNTSRAELLVTEAPSKPITVTVEEQRSQSVRPGADVTFICTAKSKSPAYTLVWTRLHNGKLPTRAMDFNGILTIRNVQLSDAGTYVCTGSNMFAMDQGTATLHVQASGTLSAPVVSIHPPQLTVQPGQLAEFRCSATGSPTPTLEWTGGPGGQLPAKAQIHGGILRLPAVEPTDQAQYLCRAHSSAGQQVARAVLHVHGGGGPRVQVSPERTQVHAGRTVRLYCRAAGVPSATITWRKEGGSLPPQARSERTDIATLLIPAITTADAGFYLCVATSPAGTAQARIQVVVLSASDASPPPVKIESSSPSVTEGQTLDLNCVVAGSAHAQVTWYRRGGSLPPHTQVHGSRLRLPQVSPADSGEYVCRVENGSGPKEASITVSVLHGTHSGPSYTPVPGSTRPIRIEPSSSHVAEGQTLDLNCVVPGQAHAQVTWHKRGGSLPARHQTHGSLLRLHQVTPADSGEYVCHVVGTSGPLEASVLVTIEASVIPGPIPPVRIESSSSTVAEGQTLDLSCVVAGQAHAQVTWYKRGGSLPARHQVRGSRLYIFQASPADAGQYVCRASNGMEASITVTVTGTQGANLAYPAGSTQPIRIEPSSSQVAEGQTLDLNCVVPGQSHAQVTWHKRGGSLPVRHQTHGSLLRLYQASPADSGEYVCRVLGSSVPLEASVLVTIEPAGSVPALGVTPTVRIESSSSQVAEGQTLDLNCLVAGQAHAQVTWHKRGGSLPARHQVHGSRLRLLQVTPADSGEYVCRVVGSSGTQEASVLVTIQQRLSGSHSQGVAYPVRIESSSASLANGHTLDLNCLVASQAPHTITWYKRGGSLPSRHQIVGSRLRIPQVTPADSGEYVCHVSNGAGSRETSLIVTIQGSGSSHVPSVSPPIRIESSSPTVVEGQTLDLNCVVARQPQAIITWYKRGGSLPSRHQTHGSHLRLHQMSVADSGEYVCRANNNIDALEASIVISVSPSAGSPSAPGSSMPIRIESSSSHVAEGETLDLNCVVPGQAHAQVTWHKRGGSLPSHHQTRGSRLRLHHVSPADSGEYVCRVMGSSGPLEASVLVTIEASGSSAVHVPAPGGAPPIRIEPSSSRVAEGQTLDLKCVVPGQAHAQVTWHKRGGNLPARHQVHGPLLRLNQVSPADSGEYSCQVTGSSGTLEASVLVTIEPSSPGPIPAPGLAQPIYIEASSSHVTEGQTLDLNCVVPGQAHAQVTWYKRGGSLPARHQTHGSQLRLHLVSPADSGEYVCRAASGPGPEQEASFTVTVPPSEGSSYRLRSPVISIDPPSSTVQQGQDASFKCLIHDGAAPISLEWKTRNQELEDNVHISPNGSIITIVGTRPSNHGTYRCVASNAYGVAQSVVNLSVHGPPTVSVLPEGPVWVKVGKAVTLECVSAGEPRSSARWTRISSTPAKLEQRTYGLMDSHAVLQISSAKPSDAGTYVCLAQNALGTAQKQVEVIVDTGAMAPGAPQVQAEEAELTVEAGHTATLRCSATGSPAPTIHWSKLRSPLPWQHRLEGDTLIIPRVAQQDSGQYICNATSPAGHAEATIILHVESPPYATTVPEHASVQAGETVQLQCLAHGTPPLTFQWSRVGSSLPGRATARNELLHFERAAPEDSGRYRCRVTNKVGSAEAFAQLLVQGPPGSLPATSIPAGSTPTVQVTPQLETKSIGASVEFHCAVPSDRGTQLRWFKEGGQLPPGHSVQDGVLRIQNLDQSCQGTYICQAHGPWGKAQASAQLVIQALPSVLINIRTSVQTVVVGHAVEFECLALGDPKPQVTWSKVGGHLRPGIVQSGGVVRIAHVELADAGQYRCTATNAAGTTQSHVLLLVQALPQISMPQEVRVPAGSAAVFPCIASGYPTPDISWSKLDGSLPPDSRLENNMLMLPSVRPQDAGTYVCTATNRQGKVKAFAHLQVPERVVPYFTQTPYSFLPLPTIKDAYRKFEIKITFRPDSADGEQEG

SEQ ID NO: 860464 - protein, 3449 aa, Homo sapiens
MGWRAPGALLLALLLHGRLLAVTHGLRAYDGLSLPEDIETVTASQMRWTHSYLSDDEDMLADSISGDDLGSGDLGSGDFQMVYFRALVNFTRSIEYSPQLEDAGSREFREVSEAVVDTLESEYLKIPGDQVVSVVFIKELDGWVFVELDVGSEGNADGAQIQEMLLRVISSGSVASYVTSPQGFQFRRLGTVPQFPRACTEAEFACHSYNECVALEYRCDRRPDCRDMSDELNCEEPVLGISPTFSLLVETTSLPPRPETTIMRQPPVTHAPQPLLPGSVRPLPCGPQEAACRNGHCIPRDYLCDGQEDCEDGSDELDCGPPPPCEPNEFPCGNGHCALKLWRCDGDFDCEDRTDEANCPTKRPEEVCGPTQFRCVSTNMCIPASFHCDEESDCPDRSDEFGCMPPQVVTPPRESIQASRGQTVTFTCVAIGVPTPFIINWRLNWGHIPSHPRVTVTSEGGRGTLIIRDVKESDQGAYTCEAMNARGMVFGIPDGVLELVPQRGPCPDGHFYLEHSAACLPCFCFGITSVCQSTRRFRDQIRLRFDQPDDFKGVNVTMPAQPGTPPLSSTQLQIDPSLHEFQLVDLSRRFLVHDSFWALPEQFLGNKVDSYGGSLRYNVRYELARGMLEPVQRPDVVLVGAGYRLLSRGHTPTQPGALNQRQVQFSEEHWVHESGRPVQRAELLQVLQSLEAVLIQTVYNTKMASVGLSDIAMDTTVTHATSHGRAHSVEECRCPIGYSGLSCESCDAHFTRVPGGPYLGTCSGCSCNGHASSCDPVYGHCLNCQHNTEGPQCNKCKAGFFGDAMKATATSCRPCPCPYIDASRRFSDTCFLDTDGQATCDACAPGYTGRRCESCAPGYEGNPIQPGGKCRPVNQEIVRCDERGSMGTSGEACRCKNNVVGRLCNECADGSFHLSTRNPDGCLKCFCMGVSRHCTSSSWSRAQLHGASEEPGHFSLTNAASTHTTNEGIFSPTPGELGFSSFHRLLSGPYFWSLPSRFLGDKVTSYGGELRFTVTQRSQPGSTPLHGQPLVVLQGNNIILEHHVAQEPSPGQPSTFIVPFREQAWQRPDGQPATREHLLMALAGIDTLLIRASYAQQPAESRVSGISMDVAVPEETGQDPALEVEQCSCPPGYRGPSCQDCDTGYTRTPSGLYLGTCERCSCHGHSEACEPETGACQGCQHHTEGPRCEQCQPGYYGDAQRGTPQDCQLCPCYGDPAAGQAAHTCFLDTDGHPTCDACSPGHSGRHCERCAPGYYGNPSQGQPCQRDSQVPGPIGCNCDPQGSVSSQCDAAGQCQCKAQVEGLTCSHCRPHHFHLSASNPDGCLPCFCMGITQQCASSAYTRHLISTHFAPGDFQGFALVNPQRNSRLTGEFTVEPVPEGAQLSFGNFAQLGHESFYWQLPETYQGDKVAAYGGKLRYTLSYTAGPQGSPLSDPDVQITGNNIMLVASQPALQGPERRSYEIMFREEFWRRPDGQPATREHLLMALADLDELLIRATFSSVPLVASISAVSLEVAQPGPSNRPRALEVEECRCPPGYIGLSCQDCAPGYTRTGSGLYLGHCELCECNGHSDLCHPETGACSQCQHNAAGEFCELCAPGYYGDATAGTPEDCQPCACPLTNPENMFSRTCESLGAGGYRCTACEPGYTGQYCEQCGPGYVGNPSVQGGQCLPETNQAPLVVEVHPARSIVPQGGSHSLRCQVSGSPPHYFYWSREDGRPVPSGTQQRHQGSELHFPSVQPSDAGVYICTCRNLHQSNTSRAELLVTEAPSKPITVTVEEQRSQSVRPGADVTFICTAKSKSPAYTLVWTRLHNGKLPTRAMDFNGILTIRNVQLSDAGTYVCTGSNMFAMDQGTATLHVQASGTLSAPVVSIHPPQLTVQPGQLAEFRCSATGSPTPTLEWTGGPGGQLPAKAQIHGGILRLPAVEPTDQAQYLCRAHSSAGQQVARAVLHVHGGGGPRVQVSPERTQVHAGRTVRLYCRAAGVPSATITWRKEGGSLPPQARSERTDIATLLIPAITTADAGFYLCVATSPAGTAQARIQVVVLSASDASPPPVKIESSSPSVTEGQTLDLNCVVAGSAHAQVTWYRRGGSLPPHTQVHGSRLRLPQVSPADSGEYVCRVENGSGPKEASITVSVLHGTHSGPSYTPVPGSTRPIRIEPSSSHVAEGQTLDLNCVVPGQAHAQVTWHKRGGSLPARHQTHGSLLRLHQVTPADSGEYVCHVVGTSGPLEASVLVTIEASVIPGPIPPVRIESSSSTVAEGQTLDLSCVVAGQAHAQVTWYKRGGSLPARHQVRGSRLYIFQASPADAGQYVCRASNGMEASITVTVTGTQGANLAYPAGSTQPIRIEPSSSQVAEGQTLDLNCVVPGQSHAQVTWHKRGGSLPVRHQTHGSLLRLYQASPADSGEYVCRVLGSSVPLEASVLVTIEPAGSVPALGVTPTVRIESSSSQVAEGQTLDLNCLVAGQAHAQVTWHKRGGSLPARHQVHGSRLRLLQVTPADSGEYVCRVVGSSGTQEASVLVTIQQRLSGSHSQGVAYPVRIESSSASLANGHTLDLNCLVASQAPHTITWYKRGGSLPSRHQIVGSRLRIPQVTPADSGEYVCHVSNGAGSRETSLIVTIQGSGSSHVPSVSPPIRIESSSPTVVEGQTLDLNCVVARQPQAIITWYKRGGSLPSRHQTHGSHLRLHQMSVADSGEYVCRANNNIDALEASIVISVSPSAGSPSAPGSSMPIRIESSSSHVAEGETLDLNCVVPGQAHAQVTWHKRGGSLPSHHQTRGSRLRLHHVSPADSGEYVCRVMGSSGPLEASVLVTIEASGSSAVHVPAPGGAPPIRIEPSSSRVAEGQTLDLKCVVPGQAHAQVTWHKRGGNLPARHQVHGPLLRLNQVSPADSGEYSCQVTGSSGTLEASVLVTIEPSSPGPIPAPGLAQPIYIEASSSHVTEGQTLDLNCVVPGQAHAQVTWYKRGGSLPARHQTHGSQLRLHLVSPADSGEYVCRAASGPGPEQEASFTVTVPPSEGSSYRLRSPVISIDPPSSTVQQGQDASFKCLIHDGAAPISLEWKTRNQELEDNVHISPNGSIITIVGTRPSNHGTYRCVASNAYGVAQSVVNLSVHGPPTVSVLPEGPVWVKVGKAVTLECVSAGEPRSSARWTRISSTPAKLEQRTYGLMDSHAVLQISSAKPSDAGTYVCLAQNALGTAQKQVEVIVDTGAMAPGAPQVQAEEAELTVEAGHTATLRCSATGSPAPTIHWSKLRSPLPWQHRLEGDTLIIPRVAQQDSGQYICNATSPAGHAEATIILHVESPPYATTVPEHASVQAGETVQLQCLAHGTPPLTFQWSRVGSSLPGRATARNELLHFERAAPEDSGRYRCRVTNKVGSAEAFAQLLVQGPPGSLPATSIPAGSTPTVQVTPQLETKSIGASVEFHCAVPSDRGTQLRWFKEGGQLPPGREWMS

SEQ ID NO: 860465 - protein, 3432 aa, Homo sapiens
MGWRAPGALLLALLLHGRLLAVTHGLRAYDGLSLPEDIETVTASQMRWTHSYLSDDEDMLADSISGDDLGSGDLGSGDFQMVYFRALVNFTRSIEYSPQLEDAGSREFREVSEAVVDTLESEYLKIPGDQVVSVVFIKELDGWVFVELDVGSEGNADGAQIQEMLLRVISSGSVASYVTSPQGFQFRRLGTVPQFPRACTEAEFACHSYNECVALEYRCDRRPDCRDMSDELNCEEPVLGISPTFSLLVETTSLPPRPETTIMRQPPVTHAPQPLLPGSVRPLPCGPQEAACRNGHCIPRDYLCDGQEDCEDGSDELDCGPPPPCEPNEFPCGNGHCALKLWRCDGDFDCEDRTDEANCPTKRPEEVCGPTQFRCVSTNMCIPASFHCDEESDCPDRSDEFGCMPPQVVTPPRESIQASRGQTVTFTCVAIGVPTPFIINWRLNWGHIPSHPRVTVTSEGGRGTLIIRDVKESDQGAYTCEAMNARGMVFGIPDGVLELVPQRGPCPDGHFYLEHSAACLPCFCFGITSVCQSTRRFRDQIRLRFDQPDDFKGVNVTMPAQPGTPPLSSTQLQIDPSLHEFQLVDLSRRFLVHDSFWALPEQFLGNKVDSYGGSLRYNVRYELARGMLEPVQRPDVVLVGAGYRLLSRGHTPTQPGALNQRQVQFSEEHWVHESGRPVQRAELLQVLQSLEAVLIQTVYNTKMASVGLSDIAMDTTVTHATSHGRAHSVEECRCPIGYSGLSCESCDAHFTRVPGGPYLGTCSGCSCNGHASSCDPVYGHCLNCQHNTEGPQCNKCKAGFFGDAMKATATSCRPCPCPYIDASRRFSDTCFLDTDGQATCDACAPGYTGRRCESCAPGYEGNPIQPGGKCRPVNQEIVRCDERGSMGTSGEACRCKNNVVGRLCNECADGSFHLSTRNPDGCLKCFCMGVSRHCTSSSWSRAQLHGASEEPGHFSLTNAASTHTTNEGIFSPTPGELGFSSFHRLLSGPYFWSLPSRFLGDKVTSYGGELRFTVTQRSQPGSTPLHGQPLVVLQGNNIILEHHVAQEPSPGQPSTFIVPFREQAWQRPDGQPATREHLLMALAGIDTLLIRASYAQQPAESRVSGISMDVAVPEETGQDPALEVEQCSCPPGYRGPSCQDCDTGYTRTPSGLYLGTCERCSCHGHSEACEPETGACQGCQHHTEGPRCEQCQPGYYGDAQRGTPQDCQLCPCYGDPAAGQAAHTCFLDTDGHPTCDACSPGHSGRHCERCAPGYYGNPSQGQPCQRDSQVPGPIGCNCDPQGSVSSQCDAAGQCQCKAQVEGLTCSHCRPHHFHLSASNPDGCLPCFCMGITQQCASSAYTRHLISTHFAPGDFQGFALVNPQRNSRLTGEFTVEPVPEGAQLSFGNFAQLGHESFYWQLPETYQGDKVAAYGGKLRYTLSYTAGPQGSPLSDPDVQITGNNIMLVASQPALQGPERRSYEIMFREEFWRRPDGQPATREHLLMALADLDELLIRATFSSVPLVASISAVSLEVAQPGPSNRPRALEVEECRCPPGYIGLSCQDCAPGYTRTGSGLYLGHCELCECNGHSDLCHPETGACSQCQHNAAGEFCELCAPGYYGDATAGTPEDCQPCACPLTNPENMFSRTCESLGAGGYRCTACEPGYTGQYCEQCGPGYVGNPSVQGGQCLPETNQAPLVVEVHPARSIVPQGGSHSLRCQVSGSPPHYFYWSREDGRPVPSGTQQRHQGSELHFPSVQPSDAGVYICTCRNLHQSNTSRAELLVTEAPSKPITVTVEEQRSQSVRPGADVTFICTAKSKSPAYTLVWTRLHNGKLPTRAMDFNGILTIRNVQLSDAGTYVCTGSNMFAMDQGTATLHVQASGTLSAPVVSIHPPQLTVQPGQLAEFRCSATGSPTPTLEWTGGPGGQLPAKAQIHGGILRLPAVEPTDQAQYLCRAHSSAGQQVARAVLHVHGGGGPRVQVSPERTQVHAGRTVRLYCRAAGVPSATITWRKEGGSLPPQARSERTDIATLLIPAITTADAGFYLCVATSPAGTAQARIQVVVLSASDASPPPVKIESSSPSVTEGQTLDLNCVVAGSAHAQVTWYRRGGSLPPHTQVHGSRLRLPQVSPADSGEYVCRVENGSGPKEASITVSVLHGTHSGPSYTPVPGSTRPIRIEPSSSHVAEGQTLDLNCVVPGQAHAQVTWHKRGGSLPARHQTHGSLLRLHQVTPADSGEYVCHVVGTSGPLEASVLVTIEASVIPGPIPPVRIESSSSTVAEGQTLDLSCVVAGQAHAQVTWYKRGGSLPARHQVRGSRLYIFQASPADAGQYVCRASNGMEASITVTVTGTQGANLAYPAGSTQPIRIEPSSSQVAEGQTLDLNCVVPGQSHAQVTWHKRGGSLPVRHQTHGSLLRLYQASPADSGEYVCRVLGSSVPLEASVLVTIEPAGSVPALGVTPTVRIESSSSQVAEGQTLDLNCLVAGQAHAQVTWHKRGGSLPARHQVHGSRLRLLQVTPADSGEYVCRVVGSSGTQEASVLVTIQQRLSGSHSQGVAYPVRIESSSASLANGHTLDLNCLVASQAPHTITWYKRGGSLPSRHQIVGSRLRIPQVTPADSGEYVCHVSNGAGSRETSLIVTIQGSGSSHVPSVSPPIRIESSSPTVVEGQTLDLNCVVARQPQAIITWYKRGGSLPSRHQTHGSHLRLHQMSVADSGEYVCRANNNIDALEASIVISVSPSAGSPSAPGSSMPIRIESSSSHVAEGETLDLNCVVPGQAHAQVTWHKRGGSLPSHHQTRGSRLRLHHVSPADSGEYVCRVMGSSGPLEASVLVTIEASGSSAVHVPAPGGAPPIRIEPSSSRVAEGQTLDLKCVVPGQAHAQVTWHKRGGNLPARHQVHGPLLRLNQVSPADSGEYSCQVTGSSGTLEASVLVTIEPSSPGPIPAPGLAQPIYIEASSSHVTEGQTLDLNCVVPGQAHAQVTWYKRGGSLPARHQTHGSQLRLHLVSPADSGEYVCRAASGPGPEQEASFTVTVPPSEGSSYRLRSPVISIDPPSSTVQQGQDASFKCLIHDGAAPISLEWKTRNQELEDNVHISPNGSIITIVGTRPSNHGTYRCVASNAYGVAQSVVNLSVHGPPTVSVLPEGPVWVKVGKAVTLECVSAGEPRSSARWTRISSTPAKLEQRTYGLMDSHAVLQISSAKPSDAGTYVCLAQNALGTAQKQVEVIVDTGAMAPGAPQVQAEEAELTVEAGHTATLRCSATGSPAPTIHWSKLRSPLPWQHRLEGDTLIIPRVAQQDSGQYICNATSPAGHAEATIILHVESPPYATTVPEHASVQAGETVQLQCLAHGTPPLTFQWSRVGSSLPGRATARNELLHFERAAPEDSGRYRCRVTNKVGSAEAFAQLLVQESRTWTRAAKGRIYARPMDLGGRPRPVPSWLSKVGGWLQASAKSREQR

SEQ ID NO: 860466 - protein, 1422 aa, Homo sapiens
MGWRAPGALLLALLLHGRLLAVTHGLRAYDGLSLPEDIETVTASQMRWTHSYLSDDEDMLADSISGDDLGSGDLGSGDFQMVYFRALVNFTRSIEYSPQLEDAGSREFREVSEAVVDTLESEYLKIPGDQVVSVVFIKELDGWVFVELDVGSEGNADGAQIQEMLLRVISSGSVASYVTSPQGFQFRRLGTVPQFPRACTEAEFACHSYNECVALEYRCDRRPDCRDMSDELNCEEPVLGISPTFSLLVETTSLPPRPETTIMRQPPVTHAPQPLLPGSVRPLPCGPQEAACRNGHCIPRDYLCDGQEDCEDGSDELDCGPPPPCEPNEFPCGNGHCALKLWRCDGDFDCEDRTDEANCPTKRPEEVCGPTQFRCVSTNMCIPASFHCDEESDCPDRSDEFGCMPPQVVTPPRESIQASRGQTVTFTCVAIGVPTPFIINWRLNWGHIPSHPRVTVTSEGGRGTLIIRDVKESDQGAYTCEAMNARGMVFGIPDGVLELVPQRGPCPDGHFYLEHSAACLPCFCFGITSVCQSTRRFRDQIRLRFDQPDDFKGVNVTMPAQPGTPPLSSTQLQIDPSLHEFQLVDLSRRFLVHDSFWALPEQFLGNKVDSYGGSLRYNVRYELARGMLEPVQRPDVVLVGAGYRLLSRGHTPTQPGALNQRQVQFSEEHWVHESGRPVQRAELLQVLQSLEAVLIQTVYNTKMASVGLSDIAMDTTVTHATSHGRAHSVEECRCPIGYSGLSCESCDAHFTRVPGGPYLGTCSGCSCNGHASSCDPVYGHCLNCQHNTEGPQCNKCKAGFFGDAMKATATSCRPCPCPYIDASRRFSDTCFLDTDGQATCDACAPGYTGRRCESCAPGYEGNPIQPGGKCRPVNQEIVRCDERGSMGTSGEACRCKNNVVGRLCNECADGSFHLSTRNPDGCLKCFCMGVSRHCTSSSWSRAQLHGASEEPGHFSLTNAASTHTTNEGIFSPTPGELGFSSFHRLLSGPYFWSLPSRFLGDKVTSYGGELRFTVTQRSQPGSTPLHGQPLVVLQGNNIILEHHVAQEPSPGQPSTFIVPFREQAWQRPDGQPATREHLLMALAGIDTLLIRASYAQQPAESRVSGISMDVAVPEETGQDPALEVEQCSCPPGYRGPSCQDCDTGYTRTPSGLYLGTCERCSCHGHSEACEPETGACQGCQHHTEGPRCEQCQPGYYGDAQRGTPQDCQLCPCYGDPAAGQAAHTCFLDTDGHPTCDACSPGHSGRHCERCAPGYYGNPSQGQPCQRDSQVPGPIGCNCDPQGSVSSQCDAAGQCQCKAQVEGLTCSHCRPHHFHLSASNPDGCLPCFCMGITQQCASSAYTRHLISTHFAPGDFQGFALVNPQRNSRLTGEFTVEPVPEGAQLSFGNFAQLGHESFYWQLPETYQGDKVGPSQAPGSAVTQT

SEQ ID NO: 860467 - protein, 852 aa, Homo sapiens
MGWRAPGALLLALLLHGRLLAVTHGLRAYDGLSLPEDIETVTASQMRWTHSYLSDDEDMLADSISGDDLGSGDLGSGDFQMVYFRALVNFTRSIEYSPQLEDAGSREFREVSEAVVDTLESEYLKIPGDQVVSVVFIKELDGWVFVELDVGSEGNADGAQIQEMLLRVISSGSVASYVTSPQGFQFRRLGTVPQFPRACTEAEFACHSYNECVALEYRCDRRPDCRDMSDELNCEEPVLGISPTFSLLVETTSLPPRPETTIMRQPPVTHAPQPLLPGSVRPLPCGPQEAACRNGHCIPRDYLCDGQEDCEDGSDELDCGPPPPCEPNEFPCGNGHCALKLWRCDGDFDCEDRTDEANCPTKRPEEVCGPTQFRCVSTNMCIPASFHCDEESDCPDRSDEFGCMPPQVVTPPRESIQASRGQTVTFTCVAIGVPTPFIINWRLNWGHIPSHPRVTVTSEGGRGTLIIRDVKESDQGAYTCEAMNARGMVFGIPDGVLELVPQRGPCPDGHFYLEHSAACLPCFCFGITSVCQSTRRFRDQIRLRFDQPDDFKGVNVTMPAQPGTPPLSSTQLQIDPSLHEFQLVDLSRRFLVHDSFWALPEQFLGNKVDSYGGSLRYNVRYELARGMLEPVQRPDVVLVGAGYRLLSRGHTPTQPGALNQRQVQFSEEHWVHESGRPVQRAELLQVLQSLEAVLIQTVYNTKMASVGLSDIAMDTTVTHATSHGRAHSVEECRCPIGYSGLSCESCDAHFTRVPGGPYLGTCSGCSCNGHASSCDPVYGHCLNCQHNTEGPQCNKCKAGFFGDAMKATATSCRPCPCPYIDASRRFSDTCFLDTDSIQRLRAYQRPRAFKAS

SEQ ID NO: 860468 - protein, 224 aa, Homo sapiens
MGWRAPGALLLALLLHGRLLAVTHGLRAYDGLSLPEDIETVTASQMRWTHSYLSDDEDMLADSISGDDLGSGDLGSGDFQMVYFRALVNFTRSIEYSPQLEDAGSREFREVSEAVVDTLESEYLKIPGDQVVSVVFIKELDGWVFVELDVGSEGNADGAQIQEMLLRVISSGSVASYVTSPQGFQFRRLGTGEPILVSGIASSRLVGSPFSVSAIGSQLGLAHH

SEQ ID NO: 860469 - protein, 102 aa, Homo sapiens
MFSALLLGAALQNGGQCHDSESSSYVCVCPAGFTGSRCEHSQALHCHPGTHPDRQSVSPQGLPLPFAASPYPPPSQPLGHFHTPHSHLSTLHSSHVPIPHLC

SEQ ID NO: 860470 - protein, 115 aa, Homo sapiens
RSEASQCPQDVAQAWPRANAQCWKVGLRHRWEVGPWSRGPRPGPSVLVHLQLDGSLPPDSRLENNMLMLPSVRPQDAGTYVCTATNRQGKVKAFAHLQVPGKTPPLRIGSALPTP

SEQ ID NO: 860471 - protein, 139 aa, Homo sapiens
CIDHASSCDPVVWPLARIAARSSNVPQDSPCTPVLCGVAMKATATSCRPCPCPYIDASRRFSDTCFLDTDGQATCDACAPGYTGRRCESCAPGYEGNPIQPGGKCRPVNQEIVRCDERGSMGTSGEACRCKATRLKLRL

SEQ ID NO: 860472 - protein, 4183 aa, Homo sapiens; identical to SEQ ID NO: 860450

SEQ ID NO: 860473 - protein, 3512 aa, Homo sapiens
RVMRSGDGDSERLRCKNNVVGRLCNECADGSFHLSTRNPDGCLKCFCMGVSRHCTSSSWSRAQLHGASEEPGHFSLTNAASTHTTNEGIFSPTPGELGFSSFHRLLSGPYFWSLPSRFLGDKVTSYGGELRFTVTQRSQPGSTPLHGQPLVVLQGNNIILEHHVAQEPSPGQPSTFIVPFREQAWQRPDGQPATREHLLMALAGIDTLLIRASYAQQPAESRVSGISMDVAVPEETGQDPALEVEQCSCPPGYRGPSCQDCDTGYTRTPSGLYLGTCERCSCHGHSEACEPETGACQGCQHHTEGPRCEQCQPGYYGDAQRGTPQDCQLCPCYGDPAAGQAAHTCFLDTDGHPTCDACSPGHSGRHCERCAPGYYGNPSQGQPCQRDSQVPGPIGCNCDPQGSVSSQCDAAGQCQCKAQVEGLTCSHCRPHHFHLSASNPDGCLPCFCMGITQQCASSAYTRHLISTHFAPGDFQGFALVNPQRNSRLTGEFTVEPVPEGAQLSFGNFAQLGHESFYWQLPETYQGDKVAAYGGKLRYTLSYTAGPQGSPLSDPDVQITGNNIMLVASQPALQGPERRSYEIMFREEFWRRPDGQPATREHLLMALADLDELLIRATFSSVPLVASISAVSLEVAQPGPSNRPRALEVEECRCPPGYIGLSCQDCAPGYTRTGSGLYLGHCELCECNGHSDLCHPETGACSQCQHNAAGEFCELCAPGYYGDATAGTPEDCQPCACPLTNPENMFSRTCESLGAGGYRCTACEPGYTGQYCEQCGPGYVGNPSVQGGQCLPETNQAPLVVEVHPARSIVPQGGSHSLRCQVSGSPPHYFYWSREDGRPVPSGTQQRHQGSELHFPSVQPSDAGVYICTCRNLHQSNTSRAELLVTEAPSKPITVTVEEQRSQSVRPGADVTFICTAKSKSPAYTLVWTRLHNGKLPTRAMDFNGILTIRNVQLSDAGTYVCTGSNMFAMDQGTATLHVQASGTLSAPVVSIHPPQLTVQPGQLAEFRCSATGSPTPTLEWTGGPGGQLPAKAQIHGGILRLPAVEPTDQAQYLCRAHSSAGQQVARAVLHVHGGGGPRVQVSPERTQVHAGRTVRLYCRAAGVPSATITWRKEGGSLPPQARSERTDIATLLIPAITTADAGFYLCVATSPAGTAQARIQVVVLSASDASPPPVKIESSSPSVTEGQTLDLNCVVAGSAHAQVTWYRRGGSLPPHTQVHGSRLRLPQVSPADSGEYVCRVENGSGPKEASITVSVLHGTHSGPSYTPVPGSTRPIRIEPSSSHVAEGQTLDLNCVVPGQAHAQVTWHKRGGSLPARHQTHGSLLRLHQVTPADSGEYVCHVVGTSGPLEASVLVTIEASVIPGPIPPVRIESSSSTVAEGQTLDLSCVVAGQAHAQVTWYKRGGSLPARHQVRGSRLYIFQASPADAGQYVCRASNGMEASITVTVTGTQGANLAYPAGSTQPIRIEPSSSQVAEGQTLDLNCVVPGQSHAQVTWHKRGGSLPVRHQTHGSLLRLYQASPADSGEYVCRVLGSSVPLEASVLVTIEPAGSVPALGVTPTVRIESSSSQVAEGQTLDLNCLVAGQAHAQVTWHKRGGSLPARHQVHGSRLRLLQVTPADSGEYVCRVVGSSGTQEASVLVTIQQRLSGSHSQGVAYPVRIESSSASLANGHTLDLNCLVASQAPHTITWYKRGGSLPSRHQIVGSRLRIPQVTPADSGEYVCHVSNGAGSRETSLIVTIQGSGSSHVPSVSPPIRIESSSPTVVEGQTLDLNCVVARQPQAIITWYKRGGSLPSRHQTHGSHLRLHQMSVADSGEYVCRANNNIDALEASIVISVSPSAGSPSAPGSSMPIRIESSSSHVAEGETLDLNCVVPGQAHAQVTWHKRGGSLPSHHQTRGSRLRLHHVSPADSGEYVCRVMGSSGPLEASVLVTIEASGSSAVHVPAPGGAPPIRIEPSSSRVAEGQTLDLKCVVPGQAHAQVTWHKRGGNLPARHQVHGPLLRLNQVSPADSGEYSCQVTGSSGTLEASVLVTIEPSSPGPIPAPGLAQPIYIEASSSHVTEGQTLDLNCVVPGQAHAQVTWYKRGGSLPARHQTHGSQLRLHLVSPADSGEYVCRAASGPGPEQEASFTVTVPPSEGSSYRLRSPVISIDPPSSTVQQGQDASFKCLIHDGAAPISLEWKTRNQELEDNVHISPNGSIITIVGTRPSNHGTYRCVASNAYGVAQSVVNLSVHGPPTVSVLPEGPVWVKVGKAVTLECVSAGEPRSSARWTRISSTPAKLEQRTYGLMDSHAVLQISSAKPSDAGTYVCLAQNALGTAQKQVEVIVDTGAMAPGAPQVQAEEAELTVEAGHTATLRCSATGSPAPTIHWSKLRSPLPWQHRLEGDTLIIPRVAQQDSGQYICNATSPAGHAEATIILHVESPPYATTVPEHASVQAGETVQLQCLAHGTPPLTFQWSRVGSSLPGRATARNELLHFERAAPEDSGRYRCRVTNKVGSAEAFAQLLVQGPPGSLPATSIPAGSTPTVQVTPQLETKSIGASVEFHCAVPSDRGTQLRWFKEGGQLPPGHSVQDGVLRIQNLDQSCQGTYICQAHGPWGKAQASAQLVIQALPSVLINIRTSVQTVVVGHAVEFECLALGDPKPQVTWSKVGGHLRPGIVQSGGVVRIAHVELADAGQYRCTATNAAGTTQSHVLLLVQALPQISMPQEVRVPAGSAAVFPCIASGYPTPDISWSKLDGSLPPDSRLENNMLMLPSVRPQDAGTYVCTATNRQGKVKAFAHLQVPERVVPYFTQTPYSFLPLPTIKDAYRKFEIKITFRPDSADGMLLYNGQKRVPGSPTNLANRQPDFISFGLVGGRPEFRFDAGSGMATIRHPTPLALGHFHTVTLLRSLTQGSLIVGDLAPVNGTSQGKFQGLDLNEELYLGGYPDYGAIPKAGLSSGFIGCVRELRIQGEEIVFHDLNLTAHGISHCPTCRDRPCQNGGQCHDSESSSYVCVCPAGFTGSRCEHSQALHCHPEACGPDATCVNRPDGRGYTCRCHLGRSGLRCEEGVTVTTPSLSGAGSYLALPALTNTHHELRLDVEFKPLAPDGVLLFSGGKSGPVEDFVSLAMVGGHLEFRYELGSGLAVLRSAEPLALGRWHRVSAERLNKDGSLRVNGGRPVLRSSPGKSQGLNLHTLLYLGGVEPSVPLSPATNMSAHFRGCVGEVSVNGKRLDLTYSFLGSQGIGQCYDSSPCERQPCQHGATCMPAGEYEFQCLCRDGFKGDLCEHEENPCQLREPCLHGGTCQGTRCLCLPGFSGPRCQQGSGHGIAESDWHLEGSGGNDAPGQYGAYFHDDGFLAFPGHVFSRSLPEVPETIELEVRTSTASGLLLWQGVEVGEAGQGKDFISLGLQDGHLVFRYQLGSGEARLVSEDPINDGEWHRVTALREGRRGSIQVDGEELVSGRSPGPNVAVNAKGSVYIGGAPDVATLTGGRFSSGITGCVKNLVLHSARPGAPPPQPLDLQHRAQAGANTRPCPS

SEQ ID NO: 860474 - protein, 3193 aa, Homo sapiens
YPVTPTRELRCAPATETCCRQAAHTCFLDTDGHPTCDACSPGHSGRHCERCAPGYYGNPSQGQPCQRDSQVPGPIGCNCDPQGSVSSQCDAAGQCQCKAQVEGLTCSHCRPHHFHLSASNPDGCLPCFCMGITQQCASSAYTRHLISTHFAPGDFQGFALVNPQRNSRLTGEFTVEPVPEGAQLSFGNFAQLGHESFYWQLPETYQGDKVAAYGGKLRYTLSYTAGPQGSPLSDPDVQITGNNIMLVASQPALQGPERRSYEIMFREEFWRRPDGQPATREHLLMALADLDELLIRATFSSVPLVASISAVSLEVAQPGPSNRPRALEVEECRCPPGYIGLSCQDCAPGYTRTGSGLYLGHCELCECNGHSDLCHPETGACSQCQHNAAGEFCELCAPGYYGDATAGTPEDCQPCACPLTNPENMFSRTCESLGAGGYRCTACEPGYTGQYCEQCGPGYVGNPSVQGGQCLPETNQAPLVVEVHPARSIVPQGGSHSLRCQVSGSPPHYFYWSREDGRPVPSGTQQRHQGSELHFPSVQPSDAGVYICTCRNLHQSNTSRAELLVTEAPSKPITVTVEEQRSQSVRPGADVTFICTAKSKSPAYTLVWTRLHNGKLPTRAMDFNGILTIRNVQLSDAGTYVCTGSNMFAMDQGTATLHVQASGTLSAPVVSIHPPQLTVQPGQLAEFRCSATGSPTPTLEWTGGPGGQLPAKAQIHGGILRLPAVEPTDQAQYLCRAHSSAGQQVARAVLHVHGGGGPRVQVSPERTQVHAGRTVRLYCRAAGVPSATITWRKEGGSLPPQARSERTDIATLLIPAITTADAGFYLCVATSPAGTAQARIQVVVLSASDASPPPVKIESSSPSVTEGQTLDLNCVVAGSAHAQVTWYRRGGSLPPHTQVHGSRLRLPQVSPADSGEYVCRVENGSGPKEASITVSVLHGTHSGPSYTPVPGSTRPIRIEPSSSHVAEGQTLDLNCVVPGQAHAQVTWHKRGGSLPARHQTHGSLLRLHQVTPADSGEYVCHVVGTSGPLEASVLVTIEASVIPGPIPPVRIESSSSTVAEGQTLDLSCVVAGQAHAQVTWYKRGGSLPARHQVRGSRLYIFQASPADAGQYVCRASNGMEASITVTVTGTQGANLAYPAGSTQPIRIEPSSSQVAEGQTLDLNCVVPGQSHAQVTWHKRGGSLPVRHQTHGSLLRLYQASPADSGEYVCRVLGSSVPLEASVLVTIEPAGSVPALGVTPTVRIESSSSQVAEGQTLDLNCLVAGQAHAQVTWHKRGGSLPARHQVHGSRLRLLQVTPADSGEYVCRVVGSSGTQEASVLVTIQQRLSGSHSQGVAYPVRIESSSASLANGHTLDLNCLVASQAPHTITWYKRGGSLPSRHQIVGSRLRIPQVTPADSGEYVCHVSNGAGSRETSLIVTIQGSGSSHVPSVSPPIRIESSSPTVVEGQTLDLNCVVARQPQAIITWYKRGGSLPSRHQTHGSHLRLHQMSVADSGEYVCRANNNIDALEASIVISVSPSAGSPSAPGSSMPIRIESSSSHVAEGETLDLNCVVPGQAHAQVTWHKRGGSLPSHHQTRGSRLRLHHVSPADSGEYVCRVMGSSGPLEASVLVTIEASGSSAVHVPAPGGAPPIRIEPSSSRVAEGQTLDLKCVVPGQAHAQVTWHKRGGNLPARHQVHGPLLRLNQVSPADSGEYSCQVTGSSGTLEASVLVTIEPSSPGPIPAPGLAQPIYIEASSSHVTEGQTLDLNCVVPGQAHAQVTWYKRGGSLPARHQTHGSQLRLHLVSPADSGEYVCRAASGPGPEQEASFTVTVPPSEGSSYRLRSPVISIDPPSSTVQQGQDASFKCLIHDGAAPISLEWKTRNQELEDNVHISPNGSIITIVGTRPSNHGTYRCVASNAYGVAQSVVNLSVHGPPTVSVLPEGPVWVKVGKAVTLECVSAGEPRSSARWTRISSTPAKLEQRTYGLMDSHAVLQISSAKPSDAGTYVCLAQNALGTAQKQVEVIVDTGAMAPGAPQVQAEEAELTVEAGHTATLRCSATGSPAPTIHWSKLRSPLPWQHRLEGDTLIIPRVAQQDSGQYICNATSPAGHAEATIILHVESPPYATTVPEHASVQAGETVQLQCLAHGTPPLTFQWSRVGSSLPGRATARNELLHFERAAPEDSGRYRCRVTNKVGSAEAFAQLLVQGPPGSLPATSIPAGSTPTVQVTPQLETKSIGASVEFHCAVPSDRGTQLRWFKEGGQLPPGHSVQDGVLRIQNLDQSCQGTYICQAHGPWGKAQASAQLVIQALPSVLINIRTSVQTVVVGHAVEFECLALGDPKPQVTWSKVGGHLRPGIVQSGGVVRIAHVELADAGQYRCTATNAAGTTQSHVLLLVQALPQISMPQEVRVPAGSAAVFPCIASGYPTPDISWSKLDGSLPPDSRLENNMLMLPSVRPQDAGTYVCTATNRQGKVKAFAHLQVPERVVPYFTQTPYSFLPLPTIKDAYRKFEIKITFRPDSADGMLLYNGQKRVPGSPTNLANRQPDFISFGLVGGRPEFRFDAGSGMATIRHPTPLALGHFHTVTLLRSLTQGSLIVGDLAPVNGTSQGKFQGLDLNEELYLGGYPDYGAIPKAGLSSGFIGCVRELRIQGEEIVFHDLNLTAHGISHCPTCRDRPCQNGGQCHDSESSSYVCVCPAGFTGSRCEHSQALHCHPEACGPDATCVNRPDGRGYTCRCHLGRSGLRCEEGVTVTTPSLSGAGSYLALPALTNTHHELRLDVEFKPLAPDGVLLFSGGKSGPVEDFVSLAMVGGHLEFRYELGSGLAVLRSAEPLALGRWHRVSAERLNKDGSLRVNGGRPVLRSSPGKSQGLNLHTLLYLGGVEPSVPLSPATNMSAHFRGCVGEVSVNGKRLDLTYSFLGSQGIGQCYDSSPCERQPCQHGATCMPAGEYEFQCLCRDGFKGDLCEHEENPCQLREPCLHGGTCQGTRCLCLPGFSGPRCQQGSGHGIAESDWHLEGSGGNDAPGQYGAYFHDDGFLAFPGHVFSRSLPEVPETIELEVRTSTASGLLLWQGVEVGEAGQGKDFISLGLQDGHLVFRYQLGSGEARLVSEDPINDGEWHRVTALREGRRGSIQVDGEELVSGRSPGPNVAVNAKGSVYIGGAPDVATLTGGRFSSGITGCVKNLVLHSARPGAPPPQPLDLQHRAQAGANTRPCPS

SEQ ID NO: 860475 - protein, 2511 aa, Homo sapiens
MVELLLLPGRKTPLPPLEWTGGPGGQLPAKAQIHGGILRLPAVEPTDQAQYLCRAHSSAGQQVARAVLHVHGGGGPRVQVSPERTQVHAGRTVRLYCRAAGVPSATITWRKEGGSLPPQARSERTDIATLLIPAITTADAGFYLCVATSPAGTAQARIQVVVLSASDASPPPVKIESSSPSVTEGQTLDLNCVVAGSAHAQVTWYRRGGSLPPHTQVHGSRLRLPQVSPADSGEYVCRVENGSGPKEASITVSVLHGTHSGPSYTPVPGSTRPIRIEPSSSHVAEGQTLDLNCVVPGQAHAQVTWHKRGGSLPARHQTHGSLLRLHQVTPADSGEYVCHVVGTSGPLEASVLVTIEASVIPGPIPPVRIESSSSTVAEGQTLDLSCVVAGQAHAQVTWYKRGGSLPARHQVRGSRLYIFQASPADAGQYVCRASNGMEASITVTVTGTQGANLAYPAGSTQPIRIEPSSSQVAEGQTLDLNCVVPGQSHAQVTWHKRGGSLPVRHQTHGSLLRLYQASPADSGEYVCRVLGSSVPLEASVLVTIEPAGSVPALGVTPTVRIESSSSQVAEGQTLDLNCLVAGQAHAQVTWHKRGGSLPARHQVHGSRLRLLQVTPADSGEYVCRVVGSSGTQEASVLVTIQQRLSGSHSQGVAYPVRIESSSASLANGHTLDLNCLVASQAPHTITWYKRGGSLPSRHQIVGSRLRIPQVTPADSGEYVCHVSNGAGSRETSLIVTIQGSGSSHVPSVSPPIRIESSSPTVVEGQTLDLNCVVARQPQAIITWYKRGGSLPSRHQTHGSHLRLHQMSVADSGEYVCRANNNIDALEASIVISVSPSAGSPSAPGSSMPIRIESSSSHVAEGETLDLNCVVPGQAHAQVTWHKRGGSLPSHHQTRGSRLRLHHVSPADSGEYVCRVMGSSGPLEASVLVTIEASGSSAVHVPAPGGAPPIRIEPSSSRVAEGQTLDLKCVVPGQAHAQVTWHKRGGNLPARHQVHGPLLRLNQVSPADSGEYSCQVTGSSGTLEASVLVTIEPSSPGPIPAPGLAQPIYIEASSSHVTEGQTLDLNCVVPGQAHAQVTWYKRGGSLPARHQTHGSQLRLHLVSPADSGEYVCRAASGPGPEQEASFTVTVPPSEGSSYRLRSPVISIDPPSSTVQQGQDASFKCLIHDGAAPISLEWKTRNQELEDNVHISPNGSIITIVGTRPSNHGTYRCVASNAYGVAQSVVNLSVHGPPTVSVLPEGPVWVKVGKAVTLECVSAGEPRSSARWTRISSTPAKLEQRTYGLMDSHAVLQISSAKPSDAGTYVCLAQNALGTAQKQVEVIVDTGAMAPGAPQVQAEEAELTVEAGHTATLRCSATGSPAPTIHWSKLRSPLPWQHRLEGDTLIIPRVAQQDSGQYICNATSPAGHAEATIILHVESPPYATTVPEHASVQAGETVQLQCLAHGTPPLTFQWSRVGSSLPGRATARNELLHFERAAPEDSGRYRCRVTNKVGSAEAFAQLLVQGPPGSLPATSIPAGSTPTVQVTPQLETKSIGASVEFHCAVPSDRGTQLRWFKEGGQLPPGHSVQDGVLRIQNLDQSCQGTYICQAHGPWGKAQASAQLVIQALPSVLINIRTSVQTVVVGHAVEFECLALGDPKPQVTWSKVGGHLRPGIVQSGGVVRIAHVELADAGQYRCTATNAAGTTQSHVLLLVQALPQISMPQEVRVPAGSAAVFPCIASGYPTPDISWSKLDGSLPPDSRLENNMLMLPSVRPQDAGTYVCTATNRQGKVKAFAHLQVPERVVPYFTQTPYSFLPLPTIKDAYRKFEIKITFRPDSADGMLLYNGQKRVPGSPTNLANRQPDFISFGLVGGRPEFRFDAGSGMATIRHPTPLALGHFHTVTLLRSLTQGSLIVGDLAPVNGTSQGKFQGLDLNEELYLGGYPDYGAIPKAGLSSGFIGCVRELRIQGEEIVFHDLNLTAHGISHCPTCRDRPCQNGGQCHDSESSSYVCVCPAGFTGSRCEHSQALHCHPEACGPDATCVNRPDGRGYTCRCHLGRSGLRCEEGVTVTTPSLSGAGSYLALPALTNTHHELRLDVEFKPLAPDGVLLFSGGKSGPVEDFVSLAMVGGHLEFRYELGSGLAVLRSAEPLALGRWHRVSAERLNKDGSLRVNGGRPVLRSSPGKSQGLNLHTLLYLGGVEPSVPLSPATNMSAHFRGCVGEVSVNGKRLDLTYSFLGSQGIGQCYDSSPCERQPCQHGATCMPAGEYEFQCLCRDGFKGDLCEHEENPCQLREPCLHGGTCQGTRCLCLPGFSGPRCQQGSGHGIAESDWHLEGSGGNDAPGQYGAYFHDDGFLAFPGHVFSRSLPEVPETIELEVRTSTASGLLLWQGVEVGEAGQGKDFISLGLQDGHLVFRYQLGSGEARLVSEDPINDGEWHRVTALREGRRGSIQVDGEELVSGRSPGPNVAVNAKGSVYIGGAPDVATLTGGRFSSGITGCVKNLVLHSARPGAPPPQPLDLQHRAQAGANTRPCPS

SEQ ID NO: 860476 - protein, 2458 aa, Homo sapiens
DLLIGESGEQVAGSAPRAWGGGPRVQVSPERTQVHAGRTVRLYCRAAGVPSATITWRKEGGSLPPQARSERTDIATLLIPAITTADAGFYLCVATSPAGTAQARIQVVVLSASDASPPPVKIESSSPSVTEGQTLDLNCVVAGSAHAQVTWYRRGGSLPPHTQVHGSRLRLPQVSPADSGEYVCRVENGSGPKEASITVSVLHGTHSGPSYTPVPGSTRPIRIEPSSSHVAEGQTLDLNCVVPGQAHAQVTWHKRGGSLPARHQTHGSLLRLHQVTPADSGEYVCHVVGTSGPLEASVLVTIEASVIPGPIPPVRIESSSSTVAEGQTLDLSCVVAGQAHAQVTWYKRGGSLPARHQVRGSRLYIFQASPADAGQYVCRASNGMEASITVTVTGTQGANLAYPAGSTQPIRIEPSSSQVAEGQTLDLNCVVPGQSHAQVTWHKRGGSLPVRHQTHGSLLRLYQASPADSGEYVCRVLGSSVPLEASVLVTIEPAGSVPALGVTPTVRIESSSSQVAEGQTLDLNCLVAGQAHAQVTWHKRGGSLPARHQVHGSRLRLLQVTPADSGEYVCRVVGSSGTQEASVLVTIQQRLSGSHSQGVAYPVRIESSSASLANGHTLDLNCLVASQAPHTITWYKRGGSLPSRHQIVGSRLRIPQVTPADSGEYVCHVSNGAGSRETSLIVTIQGSGSSHVPSVSPPIRIESSSPTVVEGQTLDLNCVVARQPQAIITWYKRGGSLPSRHQTHGSHLRLHQMSVADSGEYVCRANNNIDALEASIVISVSPSAGSPSAPGSSMPIRIESSSSHVAEGETLDLNCVVPGQAHAQVTWHKRGGSLPSHHQTRGSRLRLHHVSPADSGEYVCRVMGSSGPLEASVLVTIEASGSSAVHVPAPGGAPPIRIEPSSSRVAEGQTLDLKCVVPGQAHAQVTWHKRGGNLPARHQVHGPLLRLNQVSPADSGEYSCQVTGSSGTLEASVLVTIEPSSPGPIPAPGLAQPIYIEASSSHVTEGQTLDLNCVVPGQAHAQVTWYKRGGSLPARHQTHGSQLRLHLVSPADSGEYVCRAASGPGPEQEASFTVTVPPSEGSSYRLRSPVISIDPPSSTVQQGQDASFKCLIHDGAAPISLEWKTRNQELEDNVHISPNGSIITIVGTRPSNHGTYRCVASNAYGVAQSVVNLSVHGPPTVSVLPEGPVWVKVGKAVTLECVSAGEPRSSARWTRISSTPAKLEQRTYGLMDSHAVLQISSAKPSDAGTYVCLAQNALGTAQKQVEVIVDTGAMAPGAPQVQAEEAELTVEAGHTATLRCSATGSPAPTIHWSKLRSPLPWQHRLEGDTLIIPRVAQQDSGQYICNATSPAGHAEATIILHVESPPYATTVPEHASVQAGETVQLQCLAHGTPPLTFQWSRVGSSLPGRATARNELLHFERAAPEDSGRYRCRVTNKVGSAEAFAQLLVQGPPGSLPATSIPAGSTPTVQVTPQLETKSIGASVEFHCAVPSDRGTQLRWFKEGGQLPPGHSVQDGVLRIQNLDQSCQGTYICQAHGPWGKAQASAQLVIQALPSVLINIRTSVQTVVVGHAVEFECLALGDPKPQVTWSKVGGHLRPGIVQSGGVVRIAHVELADAGQYRCTATNAAGTTQSHVLLLVQALPQISMPQEVRVPAGSAAVFPCIASGYPTPDISWSKLDGSLPPDSRLENNMLMLPSVRPQDAGTYVCTATNRQGKVKAFAHLQVPERVVPYFTQTPYSFLPLPTIKDAYRKFEIKITFRPDSADGMLLYNGQKRVPGSPTNLANRQPDFISFGLVGGRPEFRFDAGSGMATIRHPTPLALGHFHTVTLLRSLTQGSLIVGDLAPVNGTSQGKFQGLDLNEELYLGGYPDYGAIPKAGLSSGFIGCVRELRIQGEEIVFHDLNLTAHGISHCPTCRDRPCQNGGQCHDSESSSYVCVCPAGFTGSRCEHSQALHCHPEACGPDATCVNRPDGRGYTCRCHLGRSGLRCEEGVTVTTPSLSGAGSYLALPALTNTHHELRLDVEFKPLAPDGVLLFSGGKSGPVEDFVSLAMVGGHLEFRYELGSGLAVLRSAEPLALGRWHRVSAERLNKDGSLRVNGGRPVLRSSPGKSQGLNLHTLLYLGGVEPSVPLSPATNMSAHFRGCVGEVSVNGKRLDLTYSFLGSQGIGQCYDSSPCERQPCQHGATCMPAGEYEFQCLCRDGFKGDLCEHEENPCQLREPCLHGGTCQGTRCLCLPGFSGPRCQQGSGHGIAESDWHLEGSGGNDAPGQYGAYFHDDGFLAFPGHVFSRSLPEVPETIELEVRTSTASGLLLWQGVEVGEAGQGKDFISLGLQDGHLVFRYQLGSGEARLVSEDPINDGEWHRVTALREGRRGSIQVDGEELVSGRSPGPNVAVNAKGSVYIGGAPDVATLTGGRFSSGITGCVKNLVLHSARPGAPPPQPLDLQHRAQAGANTRPCPS

SEQ ID NO: 860477 - protein, 2847 aa, Homo sapiens
MGETQGPGPQFSVLCPSSVHLCNNSIQKHLEYSCHRHPLLPPEPQISDLCAPGYYGDATAGTPEDCQPCACPLTNPENMFSRTCESLGAGGYRCTACEPGYTGQYCEQCGPGYVGNPSVQGGQCLPETNQAPLVVEVHPARSIVPQGGSHSLRCQVSGSPPHYFYWSREDGRPVPSGTQQRHQGSELHFPSVQPSDAGVYICTCRNLHQSNTSRAELLVTEAPSKPITVTVEEQRSQSVRPGADVTFICTAKSKSPAYTLVWTRLHNGKLPTRAMDFNGILTIRNVQLSDAGTYVCTGSNMFAMDQGTATLHVQASGTLSAPVVSIHPPQLTVQPGQLAEFRCSATGSPTPTLEWTGGPGGQLPAKAQIHGGILRLPAVEPTDQAQYLCRAHSSAGQQVARAVLHVHGGGGPRVQVSPERTQVHAGRTVRLYCRAAGVPSATITWRKEGGSLPPQARSERTDIATLLIPAITTADAGFYLCVATSPAGTAQARIQVVVLSASDASPPPVKIESSSPSVTEGQTLDLNCVVAGSAHAQVTWYRRGGSLPPHTQVHGSRLRLPQVSPADSGEYVCRVENGSGPKEASITVSVLHGTHSGPSYTPVPGSTRPIRIEPSSSHVAEGQTLDLNCVVPGQAHAQVTWHKRGGSLPARHQTHGSLLRLHQVTPADSGEYVCHVVGTSGPLEASVLVTIEASVIPGPIPPVRIESSSSTVAEGQTLDLSCVVAGQAHAQVTWYKRGGSLPARHQVRGSRLYIFQASPADAGQYVCRASNGMEASITVTVTGTQGANLAYPAGSTQPIRIEPSSSQVAEGQTLDLNCVVPGQSHAQVTWHKRGGSLPVRHQTHGSLLRLYQASPADSGEYVCRVLGSSVPLEASVLVTIEPAGSVPALGVTPTVRIESSSSQVAEGQTLDLNCLVAGQAHAQVTWHKRGGSLPARHQVHGSRLRLLQVTPADSGEYVCRVVGSSGTQEASVLVTIQQRLSGSHSQGVAYPVRIESSSASLANGHTLDLNCLVASQAPHTITWYKRGGSLPSRHQIVGSRLRIPQVTPADSGEYVCHVSNGAGSRETSLIVTIQGSGSSHVPSVSPPIRIESSSPTVVEGQTLDLNCVVARQPQAIITWYKRGGSLPSRHQTHGSHLRLHQMSVADSGEYVCRANNNIDALEASIVISVSPSAGSPSAPGSSMPIRIESSSSHVAEGETLDLNCVVPGQAHAQVTWHKRGGSLPSHHQTRGSRLRLHHVSPADSGEYVCRVMGSSGPLEASVLVTIEASGSSAVHVPAPGGAPPIRIEPSSSRVAEGQTLDLKCVVPGQAHAQVTWHKRGGNLPARHQVHGPLLRLNQVSPADSGEYSCQVTGSSGTLEASVLVTIEPSSPGPIPAPGLAQPIYIEASSSHVTEGQTLDLNCVVPGQAHAQVTWYKRGGSLPARHQTHGSQLRLHLVSPADSGEYVCRAASGPGPEQEASFTVTVPPSEGSSYRLRSPVISIDPPSSTVQQGQDASFKCLIHDGAAPISLEWKTRNQELEDNVHISPNGSIITIVGTRPSNHGTYRCVASNAYGVAQSVVNLSVHGPPTVSVLPEGPVWVKVGKAVTLECVSAGEPRSSARWTRISSTPAKLEQRTYGLMDSHAVLQISSAKPSDAGTYVCLAQNALGTAQKQVEVIVDTGAMAPGAPQVQAEEAELTVEAGHTATLRCSATGSPAPTIHWSKLRSPLPWQHRLEGDTLIIPRVAQQDSGQYICNATSPAGHAEATIILHVESPPYATTVPEHASVQAGETVQLQCLAHGTPPLTFQWSRVGSSLPGRATARNELLHFERAAPEDSGRYRCRVTNKVGSAEAFAQLLVQGPPGSLPATSIPAGSTPTVQVTPQLETKSIGASVEFHCAVPSDRGTQLRWFKEGGQLPPGHSVQDGVLRIQNLDQSCQGTYICQAHGPWGKAQASAQLVIQALPSVLINIRTSVQTVVVGHAVEFECLALGDPKPQVTWSKVGGHLRPGIVQSGGVVRIAHVELADAGQYRCTATNAAGTTQSHVLLLVQALPQISMPQEVRVPAGSAAVFPCIASGYPTPDISWSKLDGSLPPDSRLENNMLMLPSVRPQDAGTYVCTATNRQGKVKAFAHLQVPERVVPYFTQTPYSFLPLPTIKDAYRKFEIKITFRPDSADGMLLYNGQKRVPGSPTNLANRQPDFISFGLVGGRPEFRFDAGSGMATIRHPTPLALGHFHTVTLLRSLTQGSLIVGDLAPVNGTSQGKFQGLDLNEELYLGGYPDYGAIPKAGLSSGFIGCVRELRIQGEEIVFHDLNLTAHGISHCPTCRDRPCQNGGQCHDSESSSYVCVCPAGFTGSRCEHSQALHCHPEACGPDATCVNRPDGRGYTCRCHLGRSGLRCEEGVTVTTPSLSGAGSYLALPALTNTHHELRLDVEFKPLAPDGVLLFSGGKSGPVEDFVSLAMVGGHLEFRYELGSGLAVLRSAEPLALGRWHRVSAERLNKDGSLRVNGGRPVLRSSPGKSQGLNLHTLLYLGGVEPSVPLSPATNMSAHFRGCVGEVSVNGKRLDLTYSFLGSQGIGQCYDSSPCERQPCQHGATCMPAGEYEFQCLCRDGFKGDLCEHEENPCQLREPCLHGGTCQGTRCLCLPGFSGPRCQQGSGHGIAESDWHLEGSGGNDAPGQYGAYFHDDGFLAFPGHVFSRSLPEVPETIELEVRTSTASGLLLWQGVEVGEAGQGKDFISLGLQDGHLVFRYQLGSGEARLVSEDPINDGEWHRVTALREGRRGSIQVDGEELVSGRSPGPNVAVNAKGSVYIGGAPDVATLTGGRFSSGITGCVKNLVLHSARPGAPPPQPLDLQHRAQAGANTRPCPS

SEQ ID NO: 860478 - protein, 932 aa, Homo sapiens
NSHPSTLNNARYEAWVKSAEATGYQALPSVLINIRTSVQTVVVGHAVEFECLALGDPKPQVTWSKVGGHLRPGIVQSGGVVRIAHVELADAGQYRCTATNAAGTTQSHVLLLVQALPQISMPQEVRVPAGSAAVFPCIASGYPTPDISWSKLDGSLPPDSRLENNMLMLPSVRPQDAGTYVCTATNRQGKVKAFAHLQVPERVVPYFTQTPYSFLPLPTIKDAYRKFEIKITFRPDSADGMLLYNGQKRVPGSPTNLANRQPDFISFGLVGGRPEFRFDAGSGMATIRHPTPLALGHFHTVTLLRSLTQGSLIVGDLAPVNGTSQGKFQGLDLNEELYLGGYPDYGAIPKAGLSSGFIGCVRELRIQGEEIVFHDLNLTAHGISHCPTCRDRPCQNGGQCHDSESSSYVCVCPAGFTGSRCEHSQALHCHPEACGPDATCVNRPDGRGYTCRCHLGRSGLRCEEGVTVTTPSLSGAGSYLALPALTNTHHELRLDVEFKPLAPDGVLLFSGGKSGPVEDFVSLAMVGGHLEFRYELGSGLAVLRSAEPLALGRWHRVSAERLNKDGSLRVNGGRPVLRSSPGKSQGLNLHTLLYLGGVEPSVPLSPATNMSAHFRGCVGEVSVNGKRLDLTYSFLGSQGIGQCYDSSPCERQPCQHGATCMPAGEYEFQCLCRDGFKGDLCEHEENPCQLREPCLHGGTCQGTRCLCLPGFSGPRCQQGSGHGIAESDWHLEGSGGNDAPGQYGAYFHDDGFLAFPGHVFSRSLPEVPETIELEVRTSTASGLLLWQGVEVGEAGQGKDFISLGLQDGHLVFRYQLGSGEARLVSEDPINDGEWHRVTALREGRRGSIQVDGEELVSGRSPGPNVAVNAKGSVYIGGAPDVATLTGGRFSSGITGCVKNLVLHSARPGAPPPQPLDLQHRAQAGANTRPCPS

SEQ ID NO: 860479 - protein, 4183 aa, Homo sapiens; identical to SEQ ID NO: 860450

SEQ ID NO: 860480 - protein, 408 aa, Homo sapiens
MVGGHLEFRYELGSGLAVLRSAEPLALGRWHRVSAERLNKDGSLRVNGGRPVLRSSPGKSQGLNLHTLLYLGGVEPSVPLSPATNMSAHFRGCVGEVSVNGKRLDLTYSFLGSQGIGQCYDSSPCERQPCQHGATCMPAGEYEFQCLCRDGFKGDLCEHEENPCQLREPCLHGGTCQGTRCLCLPGFSGPRCQQGSGHGIAESDWHLEGSGGNDAPGQYGAYFHDDGFLAFPGHVFSRSLPEVPETIELEVRTSTASGLLLWQGVEVGEAGQGKDFISLGLQDGHLVFRYQLGSGEARLVSEDPINDGEWHRVTALREGRRGSIQVDGEELVSGRSPGPNVAVNAKGSVYIGGAPDVATLTGGRFSSGITGCVKNLVLHSARPGAPPPQPLDLQHRAQAGANTRPCPS

SEQ ID NO: 860481 - protein, 4183 aa, Homo sapiens; identical to SEQ ID NO: 860450

SEQ ID NO: 860482 - protein, 4183 aa, Homo sapiens; identical to SEQ ID NO: 860450

SEQ ID NO: 860483 - protein, 207 aa, Homo sapiens [sequence omitted]

SEQ ID NO: 860484 - protein, 3494 aa, Homo sapiens
MGWRAPGALLLALLLHGRLLAVTHGLRAYDGLSLPEDIETVTASQMRWTHSYLSDDEDMLADSISGDDLGSGDLGSGDFQMVYFRALVNFTRSIEYSPQLEDAGSREFREVSEAVVDTLESEYLKIPGDQVVSVVFIKELDGWVFVELDVGSEGNADGAQIQEMLLRVISSGSVASYVTSPQGFQFRRLGTVPQFPRACTEAEFACHSYNECVALEYRCDRRPDCRDMSDELNCEEPVLGISPTFSLLVETTSLPPRPETTIMRQPPVTHAPQPLLPGSVRPLPCGPQEAACRNGHCIPRDYLCDGQEDCEDGSDELDCGPPPPCEPNEFPCGNGHCALKLWRCDGDFDCEDRTDEANCPTKRPEEVCGPTQFRCVSTNMCIPASFHCDEESDCPDRSDEFGCMPPQVVTPPRESIQASRGQTVTFTCVAIGVPTPFIINWRLNWGHIPSHPRVTVTSEGGRGTLIIRDVKESDQGAYTCEAMNARGMVFGIPDGVLELVPQRGPCPDGHFYLEHSAACLPCFCFGITSVCQSTRRFRDQIRLRFDQPDDFKGVNVTMPAQPGTPPLSSTQLQIDPSLHEFQLVDLSRRFLVHDSFWALPEQFLGNKVDSYGGSLRYNVRYELARGMLEPVQRPDVVLVGAGYRLLSRGHTPTQPGALNQRQVQFSEEHWVHESGRPVQRAELLQVLQSLEAVLIQTVYNTKMASVGLSDIAMDTTVTHATSHGRAHSVEECRCPIGYSGLSCESCDAHFTRVPGGPYLGTCSGCSCNGHASSCDPVYGHCLNCQHNTEGPQCNKCKAGFFGDAMKATATSCRPCPCPYIDASRRFSDTCFLDTDGQATCDACAPGYTGRRCESCAPGYEGNPIQPGGKCRPVNQEIVRCDERGSMGTSGEACRCKNNVVGRLCNECADGSFHLSTRNPDGCLKCFCMGVSRHCTSSSWSRAQLHGASEEPGHFSLTNAASTHTTNEGIFSPTPGELGFSSFHRLLSGPYFWSLPSRFLGDKVTSYGGELRFTVTQRSQPGSTPLHGQPLVVLQGNNIILEHHVAQEPSPGQPSTFIVPFREQAWQRPDGQPATREHLLMALAGIDTLLIRASYAQQPAESRVSGISMDVAVPEETGQDPALEVEQCSCPPGYRGPSCQDCDTGYTRTPSGLYLGTCERCSCHGHSEACEPETGACQGCQHHTEGPRCEQCQPGYYGDAQRGTPQDCQLCPCYGDPAAGQAAHTCFLDTDGHPTCDACSPGHSGRHCERCAPGYYGNPSQGQPCQRDSQVPGPIGCNCDPQGSVSSQCDAAGQCQCKAQVEGLTCSHCRPHHFHLSASNPDGCLPCFCMGITQQCASSAYTRHLISTHFAPGDFQGFALVNPQRNSRLTGEFTVEPVPEGAQLSFGNFAQLGHESFYWQLPETYQGDKVAAYGGKLRYTLSYTAGPQGSPLSDPDVQITGNNIMLVASQPALQGPERRSYEIMFREEFWRRPDGQPATREHLLMALADLDELLIRATFSSVPLVASISAVSLEVAQPGPSNRPRALEVEECRCPPGYIGLSCQDCAPGYTRTGSGLYLGHCELCECNGHSDLCHPETGACSQCQHNAAGEFCELCAPGYYGDATAGTPEDCQPCACPLTNPENMFSRTCESLGAGGYRCTACEPGYTGQYCEQCGPGYVGNPSVQGGQCLPETNQAPLVVEVHPARSIVPQGGSHSLRCQVSGSPPHYFYWSREDGRPVPSGTQQRHQGSELHFPSVQPSDAGVYICTCRNLHQSNTSRAELLVTEAPSKPITVTVEEQRSQSVRPGADVTFICTAKSKSPAYTLVWTRLHNGKLPTRAMDFNGILTIRNVQLSDAGTYVCTGSNMFAMDQGTATLHVQASGTLSAPVVSIHPPQLTVQPGQLAEFRCSATGSPTPTLEWTGGPGGQLPAKAQIHGGILRLPAVEPTDQAQYLCRAHSSAGQQVARAVLHVHGGGGPRVQVSPERTQVHAGRTVRLYCRAAGVPSATITWRKEGGSLPPQARSERTDIATLLIPAITTADAGFYLCVATSPAGTAQARIQVVVLSASDASPPPVKIESSSPSVTEGQTLDLNCVVAGSAHAQVTWYRRGGSLPPHTQVHGSRLRLPQVSPADSGEYVCRVENGSGPKEASITVSVLHGTHSGPSYTPVPGSTRPIRIEPSSSHVAEGQTLDLNCVVPGQAHAQVTWHKRGGSLPARHQTHGSLLRLHQVTPADSGEYVCHVVGTSGPLEASVLVTIEASVIPGPIPPVRIESSSSTVAEGQTLDLSCVVAGQAHAQVTWYKRGGSLPARHQVRGSRLYIFQASPADAGQYVCRASNGMEASITVTVTGTQGANLAYPAGSTQPIRIEPSSSQVAEGQTLDLNCVVPGQSHAQVTWHKRGGSLPVRHQTHGSLLRLYQASPADSGEYVCRVLGSSVPLEASVLVTIEPAGSVPALGVTPTVRIESSSSQVAEGQTLDLNCLVAGQAHAQVTWHKRGGSLPARHQVHGSRLRLLQVTPADSGEYVCRVVGSSGTQEASVLVTIQQRLSGSHSQGVAYPVRIESSSASLANGHTLDLNCLVASQAPHTITWYKRGGSLPSRHQIVGSRLRIPQVTPADSGEYVCHVSNGAGSRETSLIVTIQGSGSSHVPSVSPPIRIESSSPTVVEGQTLDLNCVVARQPQAIITWYKRGGSLPSRHQTHGSHLRLHQMSVADSGEYVCRANNNIDALEASIVISVSPSAGSPSAPGSSMPIRIESSSSHVAEGETLDLNCVVPGQAHAQVTWHKRGGSLPSHHQTRGSRLRLHHVSPADSGEYVCRVMGSSGPLEASVLVTIEASGSSAVHVPAPGGAPPIRIEPSSSRVAEGQTLDLKCVVPGQAHAQVTWHKRGGNLPARHQVHGPLLRLNQVSPADSGEYSCQVTGSSGTLEASVLVTIEPSSPGPIPAPGLAQPIYIEASSSHVTEGQTLDLNCVVPGQAHAQVTWYKRGGSLPARHQTHGSQLRLHLVSPADSGEYVCRAASGPGPEQEASFTVTVPPSEGSSYRLRSPVISIDPPSSTVQQGQDASFKCLIHDGAAPISLEWKTRNQELEDNVHISPNGSIITIVGTRPSNHGTYRCVASNAYGVAQSVVNLSVHGPPTVSVLPEGPVWVKVGKAVTLECVSAGEPRSSARWTRISSTPAKLEQRTYGLMDSHAVLQISSAKPSDAGTYVCLAQNALGTAQKQVEVIVDTGAMAPGAPQVQAEEAELTVEAGHTATLRCSATGSPAPTIHWSKLRSPLPWQHRLEGDTLIIPRVAQQDSGQYICNATSPAGHAEATIILHVESPPYATTVPEHASVQAGETVQLQCLAHGTPPLTFQWSRVGSSLPGRATARNELLHFERAAPEDSGRYRCRVTNKVGSAEAFAQLLVQGPPGSLPATSIPAGSTPTVQVTPQLETKSIGASVEFHCAVPSDRGTQLRWFKEGGQLPPGHSVQDGVLRIQNLDQSCQGTYICQAHGPWGKAQASAQLVIQGRRVASGLC

SEQ ID NO: 860485 - protein, 1853 aa, Homo sapiens
MGWRAPGALLLALLLHGRLLAVTHGLRAYDGLSLPEDIETVTASQMRWTHSYLSDDEDMLADSISGDDLGSGDLGSGDFQMVYFRALVNFTRSIEYSPQLEDAGSREFREVSEAVVDTLESEYLKIPGDQVVSVVFIKELDGWVFVELDVGSEGNADGAQIQEMLLRVISSGSVASYVTSPQGFQFRRLGTVPQFPRACTEAEFACHSYNECVALEYRCDRRPDCRDMSDELNCEEPVLGISPTFSLLVETTSLPPRPETTIMRQPPVTHAPQPLLPGSVRPLPCGPQEAACRNGHCIPRDYLCDGQEDCEDGSDELDCGPPPPCEPNEFPCGNGHCALKLWRCDGDFDCEDRTDEANCPTKRPEEVCGPTQFRCVSTNMCIPASFHCDEESDCPDRSDEFGCMPPQVVTPPRESIQASRGQTVTFTCVAIGVPTPFIINWRLNWGHIPSHPRVTVTSEGGRGTLIIRDVKESDQGAYTCEAMNARGMVFGIPDGVLELVPQRGPCPDGHFYLEHSAACLPCFCFGITSVCQSTRRFRDQIRLRFDQPDDFKGVNVTMPAQPGTPPLSSTQLQIDPSLHEFQLVDLSRRFLVHDSFWALPEQFLGNKVDSYGGSLRYNVRYELARGMLEPVQRPDVVLVGAGYRLLSRGHTPTQPGALNQRQVQFSEEHWVHESGRPVQRAELLQVLQSLEAVLIQTVYNTKMASVGLSDIAMDTTVTHATSHGRAHSVEECRCPIGYSGLSCESCDAHFTRVPGGPYLGTCSGCSCNGHASSCDPVYGHCLNCQHNTEGPQCNKCKAGFFGDAMKATATSCRPCPCPYIDASRRFSDTCFLDTDGQATCDACAPGYTGRRCESCAPGYEGNPIQPGGKCRPVNQEIVRCDERGSMGTSGEACRCKNNVVGRLCNECADGSFHLSTRNPDGCLKCFCMGVSRHCTSSSWSRAQLHGASEEPGHFSLTNAASTHTTNEGIFSPTPGELGFSSFHRLLSGPYFWSLPSRFLGDKVTSYGGELRFTVTQRSQPGSTPLHGQPLVVLQGNNIILEHHVAQEPSPGQPSTFIVPFREQAWQRPDGQPATREHLLMALAGIDTLLIRASYAQQPAESRVSGISMDVAVPEETGQDPALEVEQCSCPPGYRGPSCQDCDTGYTRTPSGLYLGTCERCSCHGHSEACEPETGACQGCQHHTEGPRCEQCQPGYYGDAQRGTPQDCQLCPCYGDPAAGQAAHTCFLDTDGHPTCDACSPGHSGRHCERCAPGYYGNPSQGQPCQRDSQVPGPIGCNCDPQGSVSSQCDAAGQCQCKAQVEGLTCSHCRPHHFHLSASNPDGCLPCFCMGITQQCASSAYTRHLISTHFAPGDFQGFALVNPQRNSRLTGEFTVEPVPEGAQLSFGNFAQLGHESFYWQLPETYQGDKVAAYGGKLRYTLSYTAGPQGSPLSDPDVQITGNNIMLVASQPALQGPERRSYEIMFREEFWRRPDGQPATREHLLMALADLDELLIRATFSSVPLVASISAVSLEVAQPGPSNRPRALEVEECRCPPGYIGLSCQDCAPGYTRTGSGLYLGHCELCECNGHSDLCHPETGACSQCQHNAAGEFCELCAPGYYGDATAGTPEDCQPCACPLTNPENMFSRTCESLGAGGYRCTACEPGYTGQYCEQCGPGYVGNPSVQGGQCLPETNQAPLVVEVHPARSIVPQGGSHSLRCQVSGSPPHYFYWSREDGRPVPSGTQQRHQGSELHFPSVQPSDAGVYICTCRNLHQSNTSRAELLVTEAPSKPITVTVEEQRSQSVRPGADVTFICTAKSKSPAYTLVWTRLHNGKLPTRAMDFNGILTIRNVQLSDAGEMDPLLHSRPTGQPTL

SEQ ID NO: 860486 - protein, 1345 aa, Homo sapiens
MGWRAPGALLLALLLHGRLLAVTHGLRAYDGLSLPEDIETVTASQMRWTHSYLSDDEDMLADSISGDDLGSGDLGSGDFQMVYFRALVNFTRSIEYSPQLEDAGSREFREVSEAVVDTLESEYLKIPGDQVVSVVFIKELDGWVFVELDVGSEGNADGAQIQEMLLRVISSGSVASYVTSPQGFQFRRLGTVPQFPRACTEAEFACHSYNECVALEYRCDRRPDCRDMSDELNCEEPVLGISPTFSLLVETTSLPPRPETTIMRQPPVTHAPQPLLPGSVRPLPCGPQEAACRNGHCIPRDYLCDGQEDCEDGSDELDCGPPPPCEPNEFPCGNGHCALKLWRCDGDFDCEDRTDEANCPTKRPEEVCGPTQFRCVSTNMCIPASFHCDEESDCPDRSDEFGCMPPQVVTPPRESIQASRGQTVTFTCVAIGVPTPFIINWRLNWGHIPSHPRVTVTSEGGRGTLIIRDVKESDQGAYTCEAMNARGMVFGIPDGVLELVPQRGPCPDGHFYLEHSAACLPCFCFGITSVCQSTRRFRDQIRLRFDQPDDFKGVNVTMPAQPGTPPLSSTQLQIDPSLHEFQLVDLSRRFLVHDSFWALPEQFLGNKVDSYGGSLRYNVRYELARGMLEPVQRPDVVLVGAGYRLLSRGHTPTQPGALNQRQVQFSEEHWVHESGRPVQRAELLQVLQSLEAVLIQTVYNTKMASVGLSDIAMDTTVTHATSHGRAHSVEECRCPIGYSGLSCESCDAHFTRVPGGPYLGTCSGCSCNGHASSCDPVYGHCLNCQHNTEGPQCNKCKAGFFGDAMKATATSCRPCPCPYIDASRRFSDTCFLDTDGQATCDACAPGYTGRRCESCAPGYEGNPIQPGGKCRPVNQEIVRCDERGSMGTSGEACRCKNNVVGRLCNECADGSFHLSTRNPDGCLKCFCMGVSRHCTSSSWSRAQLHGASEEPGHFSLTNAASTHTTNEGIFSPTPGELGFSSFHRLLSGPYFWSLPSRFLGDKVTSYGGELRFTVTQRSQPGSTPLHGQPLVVLQGNNIILEHHVAQEPSPGQPSTFIVPFREQAWQRPDGQPATREHLLMALAGIDTLLIRASYAQQPAESRVSGISMDVAVPEETGQDPALEVEQCSCPPGYRGPSCQDCDTGYTRTPSGLYLGTCERCSCHGHSEACEPETGACQGCQHHTEGPRCEQCQPGYYGDAQRGTPQDCQLCPCYGDPAAGQAAHTCFLDTDGHPTCDACSPGHSGRHCERCAPGYYGNPSQGQPCQRDSQVPGPIGCNCDPQGSVSSQCDAAGQCQCKVSPNPCPCGACSAPLPRPCGEIRQHLVEAETWAWGAGHGGQGRGCPGL

SEQ ID NO: 860487 - protein, 903 aa, Homo sapiens
MGWRAPGALLLALLLHGRLLAVTHGLRAYDGLSLPEDIETVTASQMRWTHSYLSDDEDMLADSISGDDLGSGDLGSGDFQMVYFRALVNFTRSIEYSPQLEDAGSREFREVSEAVVDTLESEYLKIPGDQVVSVVFIKELDGWVFVELDVGSEGNADGAQIQEMLLRVISSGSVASYVTSPQGFQFRRLGTVPQFPRACTEAEFACHSYNECVALEYRCDRRPDCRDMSDELNCEEPVLGISPTFSLLVETTSLPPRPETTIMRQPPVTHAPQPLLPGSVRPLPCGPQEAACRNGHCIPRDYLCDGQEDCEDGSDELDCGPPPPCEPNEFPCGNGHCALKLWRCDGDFDCEDRTDEANCPTKRPEEVCGPTQFRCVSTNMCIPASFHCDEESDCPDRSDEFGCMPPQVVTPPRESIQASRGQTVTFTCVAIGVPTPFIINWRLNWGHIPSHPRVTVTSEGGRGTLIIRDVKESDQGAYTCEAMNARGMVFGIPDGVLELVPQRGPCPDGHFYLEHSAACLPCFCFGITSVCQSTRRFRDQIRLRFDQPDDFKGVNVTMPAQPGTPPLSSTQLQIDPSLHEFQLVDLSRRFLVHDSFWALPEQFLGNKVDSYGGSLRYNVRYELARGMLEPVQRPDVVLVGAGYRLLSRGHTPTQPGALNQRQVQFSEEHWVHESGRPVQRAELLQVLQSLEAVLIQTVYNTKMASVGLSDIAMDTTVTHATSHGRAHSVEECRCPIGYSGLSCESCDAHFTRVPGGPYLGTCSGCSCNGHASSCDPVYGHCLNCQHNTEGPQCNKCKAGFFGDAMKATATSCRPCPCPYIDASRRFSDTCFLDTDGQATCDACAPGYTGRRCESCAPGYEGNPIQPGGKCRPVSEYGCHHPLTPTSQPNLGCTPGTLPPCPSS

SEQ ID NO: 860488 - protein, 74 aa, Homo sapiens
WGSSPPLSLFNKSSWLGMVECGPALQPSAPGSQVEQPLITSSFPAQTPPPPPAAVAVAVTPGESVSQAEAQPGS

SEQ ID NO: 860489 - protein, 189 aa, Homo sapiens
TLPSTALQPGARPAAAAFAAATGPSSSSFGSQDEETESQRGEVTCPRSQQLSLLPGLPGPPAAAPAWAMSSSDEETLSERSCRSERSCRSERSYRSERSGSLSPCPPGDTLPWNLPLHEQKKRKSQDSVLDPAERAVVRVADALPSTSFCFPHCSLLRNAAAVSPIRSKRKSKTKRRKPQSFCDCVVWL

SEQ ID NO: 860490 - protein, 113 aa, Homo sapiens
MERVQIQSNRENLEQAFEVAERLGVTRLLDAEDVDVPSPDEKSVITYVSSIYDAFPKVPEGGEGISATEVDSRWQEYQSRVDSLIPWIKQHTILMSDKTFPQNPVELKVKSRT

SEQ ID NO: 860491 - protein, 4344 aa, Homo sapiens
MFPVLWAGIPWRDVGSLQPLPPGFKQFCTSASRVAVITDERDRVQKKTFTKWVNKHLMKVRKHINDLYEDLRDGHNLISLLEVLSGIKLPREKGRMRFHRLQNVQIALDFLKQRQVKLVNIRNDDITDGNPKLTLGLIWTIILHFQISDIYISGESGDMSAKEKLLLWTQKVTAGYTGIKCTNFSSCWSDGKMFNALIHRYRPDLVDMERVQIQSNRENLEQAFEVAERLGVTRLLDAEDVDVPSPDEKSVITYVSSIYDAFPKVPEGGEGISATEVDSRWQEYQSRVDSLIPWIKQHTILMSDKTFPQNPVELKALYNQYIHFKETEILAKEREKGRIEELYKLLEVWIEFGRIKLPQGYHPNDVEEEWGKLIIEMLEREKSLRPAVERLELLLQIANKIQNGALNCEEKLTLAKNTLQADAAHLESGQPVQCESDVIMYIQECEGLIRQLQVDLQILRDENYYQLEELAFRVMRLQDELVTLRLECTNLYRKGHFTSLELVPPSTLTTTHLKAEPLTKATHSSSTSWFRKPMTRAELVAISSSEDEGNLRFVYELLSWVEEMQMKLERAEWGNDLPSVELQLETQQHIHTSVEELGSSVKEARLYEGKMSQNFHTSYAETLGKLETQYCKLKETSSFRMRHLQSLHKFVSRATAELIWLNEKEEEELAYDWSDNNSNISAKRNYFSELTMELEEKQDVFRSLQDTAELLSLENHPAKQTVEAYSAAVQSQLQWMKQLCLCVEQHVKENTAYFQFFSDARELESFLRNLQDSIKRKYSCDHNTSLSRLEDLLQDSMDEKEQLIQSKSSVASLVGRSKTIVQLKPRSPDHVLKNTISVKAVCDYRQIEITICKNDECVLEDNSQRTKWKVISPTGNEAMVPSVCFLIPPPNKDAIEMASRVEQSYQKVMALWHQLHVNTKSLISWNYLRKDLDLVQTWNLEKLRSSAPGECHQIMKNLQAHYEDFLQDSRDSVLFSVADRLRLEEEVEACKARFQHLMKSMENEDKEETVAKMYISELKNIRLRLEEYEQRVVKRIQSLASSRTDRDAWQDNALRIAEQEHTQEDLQQLRSDLDAVSMKCDSFLHQSPSSSSVPTLRSELNLLVEKMDHVYGLSTVYLNKLKTVDVIVRSIQDAELLVKGYEIKLSQEEVVLADLSALEAHWSTLRHWLSDVKDKNSVFSVLDEEIAKAKVVAEQMSRLTPERNLDLERYQEKGSQLQERWHRVIAQLEIRQSELESIQEVLGDYRACHGTLIKWIEETTAQQEMMKPGQAEDSRVLSEQLSQQTALFAEIERNQTKLDQCQKFSQQYSTIVKDYELQLMTYKAFVESQQKSPGKRRRMLSSSDAITQEFMDLRTRYTALVTLTTQHVKYISDALRRLEEEEKVVEEEKQEHVEKVKELLGWVSTLARNTQGKATSSETKESTDIEKAILEQQVLSEELTTKKEQVSEAIKTSQIFLAKHGHKLSEKEKKQISEQLNALNKAYHDLCDGSANQLQQLQSQLAHQTEQKTLQKQQNTCHQQLEDLCSWVGQAERALAGHQGRTTQQDLSALQKNQSDLKDLQDDIQNRATSFATVVKDIEGFMEENQTKLSPRELTALREKLHQAKEQYEALQEETRVAQKELEEAVTSALQQETEKSKAAKELAENKKKIDALLDWVTSVGSSGGQLLTNLPGMEQLSGASLEKGALDTTDGYMGVNQAPEKLDKQCEMMKARHQELLSQQQNFILATQSAQAFLDQHGHNLTPEEQQMLQQKLGELKEQYSTSLAQSEAELKQVQTLQDELQKFLQDHKEFESWLERSEKELENMHKGGSSPETLPSLLKRQGSFSEDVISHKGDLRFVTISGQKVLDMENSFKEGKEPSEIGNLVKDKLKDATERYTALHSKCTRLGSHLNMLLGQYHQFQNSADSLQAWMQACEANVEKLLSDTVASDPGVLQEQLATTKQLQEELAEHQVPVEKLQKVARDIMEIEGEPAPDHRHVQETTDSILSHFQSLSYSLAERSSLLQKAIAQSQSVQESLESLLQSIGEVEQNLEGKQVSSLSSGVIQEALATNMKLKQDIARQKSSLEATREMVTRFMETADSTTAAVLQGKLAEVSQRFEQLCLQQQEKESSLKKLLPQAEMFEHLSGKLQQFMENKSRMLASGNQPDQDITHFFQQIQELNLEMEDQQENLDTLEHLVTELSSCGFALDLCQHQDRVQNLRKDFTELQKTVKEREKDASSCQEQLDEFRKLVRTFQKWLKETEGSIPPTETSMSAKELEKQIEHLKSLLDDWASKGTLVEEINCKGTSLENLIMEITAPDSQGKTDLTEIQCDMSDVNLKYEKLGGVLHERQESLQAILNRMEEVHKEANSVLQWLESKEEVLKSMDAMSSPTKTETVKAQAESNKAFLAELEQNSPKIQKVKEALAGLLVTYPNSQEAENWKKIQEELNSRWERATEVTVARQRQLEESASHLACFQAAESQLRPWLMEKELMMGVLGPLSIDPNMLNAQKQQVQFMLKEFEARRQQHEQLNEAAQGILTGPGDVSLSTSQVQKELQSINQKWVELTDKLNSRSSQIDQAIVKSTQYQELLQDLSEKVRAVGQRLSVQSAISTQPEAVKQQLEETSEIRSDLEQLDHEVKEAQTLCDELSVLIGEQYLKDELKKRLETVALPLQGLEDLAADRINRLQAALASTQQFQQMFDELRTWLDDKQSQQAKNCPISAKLERLQSQLQENEEFQKSLNQHSGSYEVIVAEGESLLLSVPPGEEKRTLQNQLVELKNHWEELSKKTADRQSRLKDCMQKAQKYQWHVEDLVPWIEDCKAKMSELRVTLDPVQLESSLLRSKAMLNEVEKRRSLLEILNSAADILINSSEADEDGIRDEKAGINQNMDAVTEELQAKTGSLEEMTQRLREFQESFKNIEKKVEGAKHQLEIFDALGSQACSNKNLEKLRAQQEVLQALEPQVDYLRNFTQGLVEDAPDGSDASQLLHQAEVAQQEFLEVKQRVNSGCVMMENKLEGIGQFHCRVREMFSQLADLDDELDGMGAIGRDTDSLQSQIEDVRLFLNKIHVLKLDIEASEAECRHMLEEEGTLDLLGLKRELEALNKQCGKLTERGKARQEQLELTLGRVEDFYRKLKGLNDATTAAEEAEALQWVVGTEVEIINQQLADFKMFQKEQVDPLQMKLQQVNGLGQGLIQSAGKDCDVQGLEHDMEEINARWNTLNKKVAQRIAQLQEALLHCGKFQDALEPLLSWLADTEELIANQKPPSAEYKVVKAQIQEQKLLQRLLDDRKATVDMLQAEGGRIAQSAELADREKITGQLESLESRWTELLSKAAARQKQLEDILVLAKQFHETAEPISDFLSVTEKKLANSEPVGTQTAKIQQQIIRHKALEEDIENHATDVHQAVKIGQSLSSLTSPAEQGVLSEKIDSLQARYSEIQDRCCRKAALLDQALSNARLFGEDEVEVLNWLAEVEDKLSSVFVKDFKQDVLHRQHADHLALNEEIVNRKKNVDQAIKNGQALLKQTTGEEVLLIQEKLDGIKTRYADITVTSSKALRTLEQARQLATKFQSTYEELTGWLREVEEELATSGGQSPTGEQIPQFQQRQKELKKEVMEHRLVLDTVNEVSRALLELVPWRAREGLDKLVSDANEQYKLVSDTIGQRVDEIDAAIQRSQQYEQAADAELAWVAETKRKLMALGPIRLEQDQTTAQLQVQKAFSIDIIRHKDSMDELFSHRSEIFGTCGEEQKTVLQEKTESLIQQYEAISLLNSERYARLERAQVLVNQFWETYEELSPWIEETRALIAQLPSPAIDHEQLRQQQEEMRQLRESIAEHKPHIDKLLKIGPQLKELNPEEGEMVEEKYQKAENMYAQIKEEVRQRALALDEAVSQSTQITEFHDKIEPMLETLENLSSRLRMPPLIPAEVDKIRECISDNKSATVELEKLQPSFEALKRRGEELIGRSQGADKDLAAKEIQDKLDQMVFFWEDIKARAEEREIKFLDVLELAEKFWYDMAALLTTIKDTQDIVHDLESPGIDPSIIKQQVEAAETIKEETDGLHEELEFIRILGADLIFACGETEKPEVRKSIDEMNNAWENLNKTWKERLEKLEDAMQAAVQYQDTLQAMFDWLDNTVIKLCTMPPVGTDLNTVKDQLNEMKEFKVEVYQQQIEMEKLNHQGELMLKKATDETDRDIIREPLTELKHLWENLGEKIAHRQHKLEGALLALGQFQHALEELMSWLTHTEELLDAQRPISGDPKVIEVELAKHHVLKNDVLAHQATVETVNKAGNELLESSAGDDASSLRSRLEAMNQCWESVLQKTEEREQQLQSTLQQAQGFHSEIEDFLLELTENGEPAFCI

SEQ ID NO: 860492 - protein, 4344 aa, Homo sapiens; identical to SEQ ID NO: 860491

SEQ ID NO: 860493 - protein, 3833 aa, Homo sapiens
  misc_feature (33)..(34): Xaa can be any naturally occurring amino acid
  misc_feature (43)..(43): Xaa can be any naturally occurring amino acid
GGGDGRRKRGGGKGGRGRGGGGGFKRGRGGKEXXRGGGGGGGXNQAKKSREISLKEFGCKDQRKPRMSSDAKEFISIINPHNLKGKSLGQVSLTHPYSECDFKLKEVARNNMGNDTNEEQEKAVTKIEIISHMKQSTSCLDSEEIRENQGEVILEVQETYCETSGKLPSEQVLQQPMNARVKSKREKREVIVEESIRTCKPAFLSEEKLYQETAIRDEHDSHIKSQPREMTSSEKGKEADTEMGFSITFKIEESSSQVVPQGISVKHLDALTLFSSKQANEGKVNNLSLCLTLKPEENLSREIACGAQSEPFPCMTPRPEGLHYQESDGKAQVTGPSQISKTDKSFQGTTRQETNYQDSWVTSKTKETKHQISSSNECKEKSYQEVSFDPARGLKLEEITVSRPDSKEVRYLEFSDRKDLHHQGSKSDDKLCGTLKSEIATQELTGEKFLEMANPNVAGLEAGSIEDIVTQRGSRVLGSFLPEKLFKGVSQKENTGQQNAIISPTVLETSEEKTVSLTVCSAVKTEKTPQEKLRESPGSEQTPFMTAPEGKGNGGVNPEPFRATQNVFTRQLCLEHDEKLVSYLSLLRNIEMRTKQIQPLELNLAELQDLLCQAKVLERELKDLTTLVSQELECVNQIIISQPQEVPAQLLKALEKDAKNLQKSLSSVSDTWNSRLLHFQNAVEIEKTKVLNQHTQLEGRLQDLRAWVGNKNLILNSKGSNSEIDVDSLNLCLQQYEDLKQPMAERKAQLDALAFDIQFFISEHAQDLSPQQNRQMLRLLNELQRSFQDILEQTAAQVDALQGHLQQMEQEALVKTLQKQQNTCHQQLEDLCSWVGQAERALAGHQGRTTQQDLSALQKNQSDLKDLQDDIQNRATSFATVVKDIEGFMEENQTKLSPRELTALREKLHQAKEQYEALQEETRVAQKELEEAVTSALQQETEKSKAAKELAENKKKIDALLDWVTSVGSSGGQLLTNLPGMEQLSGASLEKGALDTTDGYMGVNQAPEKLDKQCEMMKARHQELLSQQQNFILATQSAQAFLDQHGHNLTPEEQQMLQQKLGELKEQYSTSLAQSEAELKQVQTLQDELQKFLQDHKEFESWLERSEKELENMHKGGSSPETLPSLLKRQGSFSEDVISHKGDLRFVTISGQKVLDMENSFKEGKEPSEIGNLVKDKLKDATERYTALHSKCTRLGSHLNMLLGQYHQFQNSADSLQAWMQACEANVEKLLSDTVASDPGVLQEQLATTKQLQEELAEHQVPVEKLQKVARDIMEIEGEPAPDHRHVQETTDSILSHFQSLSYSLAERSSLLQKAIAQSQSVQESLESLLQSIGEVEQNLEGKQVSSLSSGVIQEALATNMKLKQDIARQKSSLEATREMVTRFMETADSTTAAVLQGKLAEVSQRFEQLCLQQQEKESSLKKLLPQAEMFEHLSGKLQQFMENKSRMLASGNQPDQDITHFFQQIQELNLEMEDQQENLDTLEHLVTELSSCGFALDLCQHQDRVQNLRKDFTELQKTVKEREKDASSCQEQLDEFRKLVRTFQKWLKETEGSIPPTETSMSAKELEKQIEHLKSLLDDWASKGTLVEEINCKGTSLENLIMEITAPDSQGKTDLTEIQCDMSDVNLKYEKLGGVLHERQESLQAILNRMEEVHKEANSVLQWLESKEEVLKSMDAMSSPTKTETVKAQAESNKAFLAELEQNSPKIQKVKEALAGLLVTYPNSQEAENWKKIQEELNSRWERATEVTVARQRQLEESASHLACFQAAESQLRPWLMEKELMMGVLGPLSIDPNMLNAQKQQVQFMLKEFEARRQQHEQLNEAAQGILTGPGDVSLSTSQVQKELQSINQKWVELTDKLNSRSSQIDQAIVKSTQYQELLQDLSEKVRAVGQRLSVQSAISTQPEAVKQQLEETSEIRSDLEQLDHEVKEAQTLCDELSVLIGEQYLKDELKKRLETVALPLQGLEDLAADRINRLQAALASTQQFQQMFDELRTWLDDKQSQQAKNCPISAKLERLQSQLQENEEFQKSLNQHSGSYEVIVAEGESLLLSVPPGEEKRTLQNQLVELKNHWEELSKKTADRQSRLKDCMQKAQKYQWHVEDLVPWIEDCKAKMSELRVTLDPVQLESSLLRSKAMLNEVEKRRSLLEILNSAADILINSSEADEDGIRDEKAGINQNMDAVTEELQAKTGSLEEMTQRLREFQESFKNIEKKVEGAKHQLEIFDALGSQACSNKNLEKLRAQQEVLQALEPQVDYLRNFTQGLVEDAPDGSDASQLLHQAEVAQQEFLEVKQRVNSGCVMMENKLEGIGQFHCRVREMFSQLADLDDELDGMGAIGRDTDSLQSQIEDVRLFLNKIHVLKLDIEASEAECRHMLEEEGTLDLLGLKRELEALNKQCGKLTERGKARQEQLELTLGRVEDFYRKLKGLNDATTAAEEAEALQWVVGTEVEIINQQLADFKMFQKEQVDPLQMKLQQVNGLGQGLIQSAGKDCDVQGLEHDMEEINARWNTLNKKVAQRIAQLQEALLHCGKFQDALEPLLSWLADTEELIANQKPPSAEYKVVKAQIQEQKLLQRLLDDRKATVDMLQAEGGRIAQSAELADREKITGQLESLESRWTELLSKAAARQKQLEDILVLAKQFHETAEPISDFLSVTEKKLANSEPVGTQTAKIQQQIIRHKALEEDIENHATDVHQAVKIGQSLSSLTSPAEQGVLSEKIDSLQARYSEIQDRCCRKAALLDQALSNARLFGEDEVEVLNWLAEVEDKLSSVFVKDFKQDVLHRQHADHLALNEEIVNRKKNVDQAIKNGQALLKQTTGEEVLLIQEKLDGIKTRYADITVTSSKALRTLEQARQLATKFQSTYEELTGWLREVEEELATSGGQSPTGEQIPQFQQRQKELKKEVMEHRLVLDTVNEVSRALLELVPWRAREGLDKLVSDANEQYKLVSDTIGQRVDEIDAAIQRSQQYEQAADAELAWVAETKRKLMALGPIRLEQDQTTAQLQVQKAFSIDIIRHKDSMDELFSHRSEIFGTCGEEQKTVLQEKTESLIQQYEAISLLNSERYARLERAQVLVNQFWETYEELSPWIEETRALIAQLPSPAIDHEQLRQQQEEMRQLRESIAEHKPHIDKLLKIGPQLKELNPEEGEMVEEKYQKAENMYAQIKEEVRQRALALDEAVSQSTQITEFHDKIEPMLETLENLSSRLRMPPLIPAEVDKIRECISDNKSATVELEKLQPSFEALKRRGEELIGRSQGADKDLAAKEIQDKLDQMVFFWEDIKARAEEREIKFLDVLELAEKFWYDMAALLTTIKDTQDIVHDLESPGIDPSIIKQQVEAAETIKEETDGLHEELEFIRILGADLIFACGETEKPEVRKSIDEMNNAWENLNKTWKERLEKLEDAMQAAVQYQDTLQAMFDWLDNTVIKLCTMPPVGTDLNTVKDQLNEMKEFKVEVYQQQIEMEKLNHQGELMLKKATDETDRDIIREPLTELKHLWENLGEKIAHRQHKLEGALLALGQFQHALEELMSWLTHTEELLDAQRPISGDPKVIEVELAKHHVLKNDVLAHQATVETVNKAGNELLESSAGDDASSLRSRLEAMNQCWESVLQKTEEREQQLQSTLQQAQGFHSEIEDFLLELTRMESQLSASKPTGGLPETAREQLDTHMELYSQLKAKEETYNQLLDKGRLMLLSRDDSGSGSKTEQSVALLEQKWHVVSSKMEERKSKLEEALNLATEFQNSLQEFINWLTLAEQSLNIASPPSLILNTVLSQIEEHKVFANEVNAHRDQIIELDQTGNQLKFLSQKQDVVLIKNLLVSVQSRWEKGCPAIY

SEQ ID NO: 860494 - protein, 1780 aa, Homo sapiens
VIEDPGYPIMLDTVNEVSRALLELVPWRAREGLDKLVSDANEQYKLVSDTIGQRVDEIDAAIQRSQQYEQAADAELAWVAETKRKLMALGPIRLEQDQTTAQLQVQKAFSIDIIRHKDSMDELFSHRSEIFGTCGEEQKTVLQEKTESLIQQYEAISLLNSERYARLERAQVLVNQFWETYEELSPWIEETRALIAQLPSPAIDHEQLRQQQEEMRQLRESIAEHKPHIDKLLKIGPQLKELNPEEGEMVEEKYQKAENMYAQIKEEVRQRALALDEAVSQSTQITEFHDKIEPMLETLENLSSRLRMPPLIPAEVDKIRECISDNKSATVELEKLQPSFEALKRRGEELIGRSQGADKDLAAKEIQDKLDQMVFFWEDIKARAEEREIKFLDVLELAEKFWYDMAALLTTIKDTQDIVHDLESPGIDPSIIKQQVEAAETIKEETDGLHEELEFIRILGADLIFACGETEKPEVRKSIDEMNNAWENLNKTWKERLEKLEDAMQAAVQYQDTLQAMFDWLDNTVIKLCTMPPVGTDLNTVKDQLNEMKEFKVEVYQQQIEMEKLNHQGELMLKKATDETDRDIIREPLTELKHLWENLGEKIAHRQHKLEGALLALGQFQHALEELMSWLTHTEELLDAQRPISGDPKVIEVELAKHHVLKNDVLAHQATVETVNKAGNELLESSAGDDASSLRSRLEAMNQCWESVLQKTEEREQQLQSTLQQAQGFHSEIEDFLLELTRMESQLSASKPTGGLPETAREQLDTHMELYSQLKAKEETYNQLLDKGRLMLLSRDDSGSGSKTEQSVALLEQKWHVVSSKMEERKSKLEEALNLATEFQNSLQEFINWLTLAEQSLNIASPPSLILNTVLSQIEEHKVFANEVNAHRDQIIELDQTGNQLKFLSQKQDVVLIKNLLVSVQSRWEKVVQRSIERGRSLDDARKRAKQFHEAWKKLIDWLEDAESHLDSELEISNDPDKIKLQLSKHKEFQKTLGGKQPVYDTTIRTGRALKEKTLLPEDTQKLDNFLGEVRDKWDTVCGKSVERQHKLEEALLFSGQFMDALQALVDWLYKVEPQLAEDQPVHGDLDLVMNLMDAHKVFQKELGKRTGTVQVLKRSGRELIENSRDDTTWVKGQLQELSTRWDTVCKLSVSKQSRLEQALKQAEVFRDTVHMLLEWLSEAEQTLRFRGALPDDTEALQSLIDTHKEFMKKVEEKRVDVNSAVAMGEVILAVCHPDCITTIKHWITIIRARFEEVLTWAKQHQQRLETALSELVANAELLEELLAWIQWAETTLIQRDQEPIPQNIDRVKALIAEHQTFMEEMTRKQPDVDRVTKTYKRKNIEPTHAPFIEKSRSGGRKSLSQPTPPPMPILSQSEAKNPRINQLSARWQQVWLLALERQRKLNDALDRLEELKEFANFDFDVWRKKYMRWMNHKKSRVMDFFRRIDKDQDGKITRQEFIDGILASKFPTTKLEMTAVADIFDRDGDGYIDYYEFVAALHPNKDAYRPTTDADKIEDEVTRQVAQCKCAKRFQVEQIGENKYRFGDSQQLRLVRILRSTVMVRVGGGWMALDEFLVKNDPCRARGRTNIELREKFILPEGASQGMTPFRSRGRRSKPSSRAASPTRSSSSASQSNHSCTSMPSSPATPASGTKVIPSSGSKLKRPTPTFHSSRTSLAGDTSNSSSPASTGAKTNRADPKKSASRPGSRAGSRAGSRASSRRGSDASDFDLLETQSACSDTSESSAAGGQGNSRRGLNKPSKIPTMSKKTTTASPRTPGPKR

SEQ ID NO: 860495 - protein, 4308 aa, Homo sapiens
MFPVLWAGIPWRDVGSLQPLPPGFKQFCTSASRVAVITDERDRVQKKTFTKWVNKHLMKVRKHINDLYEDLRDGHNLISLLEVLSGIKLPREKGRMRFHRLQNVQIALDFLKQRQVKLVNIRNDDITDGNPKLTLGLIWTIILHFQISDIYISGESGDMSAKEKLLLWTQKVTAGYTGIKCTNFSSCWSDGKMFNALIHRYRPDLVDMERVQIQSNRENLEQAFEVAERLGVTRLLDAEDVDVPSPDEKSVITYVSSIYDAFPKVPEGGEGISATEVDSRWQEYQSRVDSLIPWIKQHTILMSDKTFPQNPVELKALYNQYIHFKETEILAKEREKGRIEELYKLLEVWIEFGRIKLPQGYHPNDVEEEWGKLIIEMLEREKSLRPAVERLELLLQIANKIQNGALNCEEKLTLAKNTLQADAAHLESGQPVQCESDVIMYIQECEGLIRQLQVDLQILRDENYYQLEELAFRVMRLQDELVTLRLECTNLYRKGHFTSLELVPPSTLTTTHLKAEPLTKATHSSSTSWFRKPMTRAELVAISSSEDEGNLRFVYELLSWVEEMQMKLERAEWGNDLPSVELQLETQQHIHTSVEELGSSVKEARLYEGKMSQNFHTSYAETLGKLETQYCKLKETSSFRMRHLQSLHKFVSRATAELIWLNEKEEEELAYDWSDNNSNISAKRNYFSELTMELEEKQDVFRSLQDTAELLSLENHPAKQTVEAYSAAVQSQLQWMKQLCLCVEQHVKENTAYFQFFSDARELESFLRNLQDSIKRKYSCDHNTSLSRLEDLLQDSMDEKEQLIQSKSSVASLVGRSKTIVQLKPRSPDHVLKNTISVKAVCDYRQIEITICKNDECVLEDNSQRTKWKVISPTGNEAMVPSVCFLIPPPNKDAIEMASRVEQSYQKVMALWHQLHVNTKSLISWNYLRKDLDLVQTWNLEKLRSSAPGECHQIMKNLQAHYEDFLQDSRDSVLFSVADRLRLEEEVEACKARFQHLMKSMENEDKEETVAKMYISELKNIRLRLEEYEQRVVKRIQSLASSRTDRDAWQDNALRIAEQEHTQEDLQQLRSDLDAVSMKCDSFLHQSPSSSSVPTLRSELNLLVEKMDHVYGLSTVYLNKLKTVDVIVRSIQDAELLVKGYEIKLSQEEVVLADLSALEAHWSTLRHWLSDVKDKNSVFSVLDEEIAKAKVVAEQMSRLTPERNLDLERYQEKGSQLQERWHRVIAQLEIRQSELESIQEVLGDYRACHGTLIKWIEETTAQQEMMKPGQAEDSRVLSEQLSQQTALFAEIERNQTKLDQCQKFSQQYSTIVKDYELQLMTYKAFVESQQKSPGKRRRMLSSSDAITQEFMDLRTRYTALVTLTTQHVKYISDALRRLEEEEKVVEEEKQEHVEKVKELLGWVSTLARNTQGKATSSETKESTDIEKAILEQQVLSEELTTKKEQVSEAIKTSQIFLAKHGHKLSEKEKKQISEQLNALNKAYHDLCDGSANQLQQLQSQLAHQTEQKTLQKQQNTCHQQLEDLCSWVGQAERALAGHQGRTTQQDLSALQKNQSDLKDLQDDIQNRATSFATVVKDIEGFMEENQTKLSPRELTALREKLHQAKEQYEALQEETRVAQKELEEAVTSALQQETEKSKAAKELAENKKKIDALLDWVTSVGSSGGQLLTNLPGMEQLSGASLEKGALDTTDGYMGVNQAPEKLDKQCEMMKARHQELLSQQQNFILATQSAQAFLDQHGHNLTPEEQQMLQQKLGELKEQYSTSLAQSEAELKQVQTLQDELQKFLQDHKEFESWLERSEKELENMHKGGSSPETLPSLLKRQGSFSEDVISHKGDLRFVTISGQKVLDMENSFKEGKEPSEIGNLVKDKLKDATERYTALHSKCTRLGSHLNMLLGQYHQFQNSADSLQAWMQACEANVEKLLSDTVASDPGVLQEQLATTKQLQEELAEHQVPVEKLQKVARDIMEIEGEPAPDHRHVQETTDSILSHFQSLSYSLAERSSLLQKAIAQSQSVQESLESLLQSIGEVEQNLEGKQVSSLSSGVIQEALATNMKLKQDIARQKSSLEATREMVTRFMETADSTTAAVLQGKLAEVSQRFEQLCLQQQEKESSLKKLLPQAEMFEHLSGKLQQFMENKSRMLASGNQPDQDITHFFQQIQELNLEMEDQQENLDTLEHLVTELSSCGFALDLCQHQDRVQNLRKDFTELQKTVKEREKDASSCQEQLDEFRKLVRTFQKWLKETEGSIPPTETSMSAKELEKQIEHLKSLLDDWASKGTLVEEINCKGTSLENLIMEITAPDSQGKTDLTEIQCDMSDVNLKYEKLGGVLHERQESLQAILNRMEEVHKEANSVLQWLESKEEVLKSMDAMSSPTKTETVKAQAESNKAFLAELEQNSPKIQKVKEALAGLLVTYPNSQEAENWKKIQEELNSRWERATEVTVARQRQLEESASHLACFQAAESQLRPWLMEKELMMGVLGPLSIDPNMLNAQKQQVQFMLKEFEARRQQHEQLNEAAQGILTGPGDVSLSTSQVQKELQSINQKWVELTDKLNSRSSQIDQAIVKSTQYQELLQDLSEKVRAVGQRLSVQSAISTQPEAVKQQLEETSEIRSDLEQLDHEVKEAQTLCDELSVLIGEQYLKDELKKRLETVALPLQGLEDLAADRINRLQAALASTQQFQQMFDELRTWLDDKQSQQAKNCPISAKLERLQSQLQENEEFQKSLNQHSGSYEVIVAEGESLLLSVPPGEEKRTLQNQLVELKNHWEELSKKTADRQSRLKDCMQKAQKYQWHVEDLVPWIEDCKAKMSELRVTLDPVQLESSLLRSKAMLNEVEKRRSLLEILNSAADILINSSEADEDGIRDEKAGINQNMDAVTEELQAKTGSLEEMTQRLREFQESFKNIEKKVEGAKHQLEIFDALGSQACSNKNLEKLRAQQEVLQALEPQVDYLRNFTQGLVEDAPDGSDASQLLHQAEVAQQEFLEVKQRVNSGCVMMENKLEGIGQFHCRVREMFSQLADLDDELDGMGAIGRDTDSLQSQIEDVRLFLNKIHVLKLDIEASEAECRHMLEEEGTLDLLGLKRELEALNKQCGKLTERGKARQEQLELTLGRVEDFYRKLKGLNDATTAAEEAEALQWVVGTEVEIINQQLADFKMFQKEQVDPLQMKLQQVNGLGQGLIQSAGKDCDVQGLEHDMEEINARWNTLNKKVAQRIAQLQEALLHCGKFQDALEPLLSWLADTEELIANQKPPSAEYKVVKAQIQEQKLLQRLLDDRKATVDMLQAEGGRIAQSAELADREKITGQLESLESRWTELLSKAAARQKQLEDILVLAKQFHETAEPISDFLSVTEKKLANSEPVGTQTAKIQQQIIRHKALEEDIENHATDVHQAVKIGQSLSSLTSPAEQGVLSEKIDSLQARYSEIQDRCCRKAALLDQALSNARLFGEDEVEVLNWLAEVEDKLSSVFVKDFKQDVLHRQHADHLALNEEIVNRKKNVDQAIKNGQALLKQTTGEEVLLIQEKLDGIKTRYADITVTSSKALRTLEQARQLATKFQSTYEELTGWLREVEEELATSGGQSPTGEQIPQFQQRQKELKKEVMEHRLVLDTVNEVSRALLELVPWRAREGLDKLVSDANEQYKLVSDTIGQRVDEIDAAIQRSQQYEQAADAELAWVAETKRKLMALGPIRLEQDQTTAQLQVQKAFSIDIIRHKDSMDELFSHRSEIFGTCGEEQKTVLQEKTESLIQQYEAISLLNSERYARLERAQVLVNQFWETYEELSPWIEETRALIAQLPSPAIDHEQLRQQQEEMRQLRESIAEHKPHIDKLLKIGPQLKELNPEEGEMVEEKYQKAENMYAQIKEEVRQRALALDEAVSQSTQITEFHDKIEPMLETLENLSSRLRMPPLIPAEVDKIRECISDNKSATVELEKLQPSFEALKRRGEELIGRSQGADKDLAAKEIQDKLDQMVFFWEDIKARAEEREIKFLDVLELAEKFWYDMAALLTTIKDTQDIVHDLESPGIDPSIIKQQVEAAETIKEETDGLHEELEFIRILGADLIFACGETEKPEVRKSIDEMNNAWENLNKTWKERLEKLEDAMQAAVQYQDTLQAMFDWLDNTVIKLCTMPPVGTDLNTVKDQLNEMKEFKVEVYQQQIEMEKLNHQGELMLKKATDETDRDIIREPLTELKHLWENLGEKIAHRQHKLEGALLALGQFQHALEELMSWLTHTEELLDAQRPISGDPKVIEVELAKHHVLKNDVLAHQATVETVNKAGNELLESSAGDDASSLRSRLEAMNQDCTSHLEAARE

SEQ ID NO: 860496 - protein, 4308 aa, Homo sapiens; identical to SEQ ID NO: 860495

SEQ ID NO: 860497 - protein, 4308 aa, Homo sapiens; identical to SEQ ID NO: 860495

SEQ ID NO: 860498 - protein, 4368 aa, Homo sapiens
MFPVLWAGIPWRDVGSLQPLPPGFKQFCTSASRVAVITDERDRVQKKTFTKWVNKHLMKVRKHINDLYEDLRDGHNLISLLEVLSGIKLPREKGRMRFHRLQNVQIALDFLKQRQVKLVNIRNDDITDGNPKLTLGLIWTIILHFQISDIYISGESGDMSAKEKLLLWTQKVTAGYTGIKCTNFSSCWSDGKMFNALIHRYRPDLVDMERVQIQSNRENLEQAFEVAERLGVTRLLDAEDVDVPSPDEKSVITYVSSIYDAFPKVPEGGEGISATEVDSRWQEYQSRVDSLIPWIKQHTILMSDKTFPQNPVELKALYNQYIHFKETEILAKEREKGRIEELYKLLEVWIEFGRIKLPQGYHPNDVEEEWGKLIIEMLEREKSLRPAVERLELLLQIANKIQNGALNCEEKLTLAKNTLQADAAHLESGQPVQCESDVIMYIQECEGLIRQLQVDLQILRDENYYQLEELAFRVMRLQDELVTLRLECTNLYRKGHFTSLELVPPSTLTTTHLKAEPLTKATHSSSTSWFRKPMTRAELVAISSSEDEGNLRFVYELLSWVEEMQMKLERAEWGNDLPSVELQLETQQHIHTSVEELGSSVKEARLYEGKMSQNFHTSYAETLGKLETQYCKLKETSSFRMRHLQSLHKFVSRATAELIWLNEKEEEELAYDWSDNNSNISAKRNYFSELTMELEEKQDVFRSLQDTAELLSLENHPAKQTVEAYSAAVQSQLQWMKQLCLCVEQHVKENTAYFQFFSDARELESFLRNLQDSIKRKYSCDHNTSLSRLEDLLQDSMDEKEQLIQSKSSVASLVGRSKTIVQLKPRSPDHVLKNTISVKAVCDYRQIEITICKNDECVLEDNSQRTKWKVISPTGNEAMVPSVCFLIPPPNKDAIEMASRVEQSYQKVMALWHQLHVNTKSLISWNYLRKDLDLVQTWNLEKLRSSAPGECHQIMKNLQAHYEDFLQDSRDSVLFSVADRLRLEEEVEACKARFQHLMKSMENEDKEETVAKMYISELKNIRLRLEEYEQRVVKRIQSLASSRTDRDAWQDNALRIAEQEHTQEDLQQLRSDLDAVSMKCDSFLHQSPSSSSVPTLRSELNLLVEKMDHVYGLSTVYLNKLKTVDVIVRSIQDAELLVKGYEIKLSQEEVVLADLSALEAHWSTLRHWLSDVKDKNSVFSVLDEEIAKAKVVAEQMSRLTPERNLDLERYQEKGSQLQERWHRVIAQLEIRQSELESIQEVLGDYRACHGTLIKWIEETTAQQEMMKPGQAEDSRVLSEQLSQQTALFAEIERNQTKLDQCQKFSQQYSTIVKDYELQLMTYKAFVESQQKSPGKRRRMLSSSDAITQEFMDLRTRYTALVTLTTQHVKYISDALRRLEEEEKVVEEEKQEHVEKVKELLGWVSTLARNTQGKATSSETKESTDIEKAILEQQVLSEELTTKKEQVSEAIKTSQIFLAKHGHKLSEKEKKQISEQLNALNKAYHDLCDGSANQLQQLQSQLAHQTEQKTLQKQQNTCHQQLEDLCSWVGQAERALAGHQGRTTQQDLSALQKNQSDLKDLQDDIQNRATSFATVVKDIEGFMEENQTKLSPRELTALREKLHQAKEQYEALQEETRVAQKELEEAVTSALQQETEKSKAAKELAENKKKIDALLDWVTSVGSSGGQLLTNLPGMEQLSGASLEKGALDTTDGYMGVNQAPEKLDKQCEMMKARHQELLSQQQNFILATQSAQAFLDQHGHNLTPEEQQMLQQKLGELKEQYSTSLAQSEAELKQVQTLQDELQKFLQDHKEFESWLERSEKELENMHKGGSSPETLPSLLKRQGSFSEDVISHKGDLRFVTISGQKVLDMENSFKEGKEPSEIGNLVKDKLKDATERYTALHSKCTRLGSHLNMLLGQYHQFQNSADSLQAWMQACEANVEKLLSDTVASDPGVLQEQLATTKQLQEELAEHQVPVEKLQKVARDIMEIEGEPAPDHRHVQETTDSILSHFQSLSYSLAERSSLLQKAIAQSQSVQESLESLLQSIGEVEQNLEGKQVSSLSSGVIQEALATNMKLKQDIARQKSSLEATREMVTRFMETADSTTAAVLQGKLAEVSQRFEQLCLQQQEKESSLKKLLPQAEMFEHLSGKLQQFMENKSRMLASGNQPDQDITHFFQQIQELNLEMEDQQENLDTLEHLVTELSSCGFALDLCQHQDRVQNLRKDFTELQKTVKEREKDASSCQEQLDEFRKLVRTFQKWLKETEGSIPPTETSMSAKELEKQIEHLKSLLDDWASKGTLVEEINCKGTSLENLIMEITAPDSQGKTDLTEIQCDMSDVNLKYEKLGGVLHERQESLQAILNRMEEVHKEANSVLQWLESKEEVLKSMDAMSSPTKTETVKAQAESNKAFLAELEQNSPKIQKVKEALAGLLVTYPNSQEAENWKKIQEELNSRWERATEVTVARQRQLEESASHLACFQAAESQLRPWLMEKELMMGVLGPLSIDPNMLNAQKQQVQFMLKEFEARRQQHEQLNEAAQGILTGPGDVSLSTSQVQKELQSINQKWVELTDKLNSRSSQIDQAIVKSTQYQELLQDLSEKVRAVGQRLSVQSAISTQPEAVKQQLEETSEIRSDLEQLDHEVKEAQTLCDELSVLIGEQYLKDELKKRLETVALPLQGLEDLAADRINRLQAALASTQQFQQMFDELRTWLDDKQSQQAKNCPISAKLERLQSQLQENEEFQKSLNQHSGSYEVIVAEGESLLLSVPPGEEKRTLQNQLVELKNHWEELSKKTADRQSRLKDCMQKAQKYQWHVEDLVPWIEDCKAKMSELRVTLDPVQLESSLLRSKAMLNEVEKRRSLLEILNSAADILINSSEADEDGIRDEKAGINQNMDAVTEELQAKTGSLEEMTQRLREFQESFKNIEKKVEGAKHQLEIFDALGSQACSNKNLEKLRAQQEVLQALEPQVDYLRNFTQGLVEDAPDGSDASQLLHQAEVAQQEFLEVKQRVNSGCVMMENKLEGIGQFHCRVREMFSQLADLDDELDGMGAIGRDTDSLQSQIEDVRLFLNKIHVLKLDIEASEAECRHMLEEEGTLDLLGLKRELEALNKQCGKLTERGKARQEQLELTLGRVEDFYRKLKGLNDATTAAEEAEALQWVVGTEVEIINQQLADFKMFQKEQVDPLQMKLQQVNGLGQGLIQSAGKDCDVQGLEHDMEEINARWNTLNKKVAQRIAQLQEALLHCGKFQDALEPLLSWLADTEELIANQKPPSAEYKVVKAQIQEQKLLQRLLDDRKATVDMLQAEGGRIAQSAELADREKITGQLESLESRWTELLSKAAARQKQLEDILVLAKQFHETAEPISDFLSVTEKKLANSEPVGTQTAKIQQQIIRHKALEEDIENHATDVHQAVKIGQSLSSLTSPAEQGVLSEKIDSLQARYSEIQDRCCRKAALLDQALSNARLFGEDEVEVLNWLAEVEDKLSSVFVKDFKQDVLHRQHADHLALNEEIVNRKKNVDQAIKNGQALLKQTTGEEVLLIQEKLDGIKTRYADITVTSSKALRTLEQARQLATKFQSTYEELTGWLREVEEELATSGGQSPTGEQIPQFQQRQKELKKEVMEHRLVLDTVNEVSRALLELVPWRAREGLDKLVSDANEQYKLVSDTIGQRVDEIDAAIQRSQQYEQAADAELAWVAETKRKLMALGPIRLEQDQTTAQLQVQKAFSIDIIRHKDSMDELFSHRSEIFGTCGEEQKTVLQEKTESLIQQYEAISLLNSERYARLERAQVLVNQFWETYEELSPWIEETRALIAQLPSPAIDHEQLRQQQEEMRQLRESIAEHKPHIDKLLKIGPQLKELNPEEGEMVEEKYQKAENMYAQIKEEVRQRALALDEAVSQSTQITEFHDKIEPMLETLENLSSRLRMPPLIPAEVDKIRECISDNKSATVELEKLQPSFEALKRRGEELIGRSQGADKDLAAKEIQDKLDQMVFFWEDIKARAEEREIKFLDVLELAEKFWYDMAALLTTIKDTQDIVHDLESPGIDPSIIKQQVEAAETIKEETDGLHEELEFIRILGADLIFACGETEKPEVRKSIDEMNNAWENLNKTWKERLEKLEDAMQAAVQYQDTLQAMFDWLDNTVIKLCTMPPVGTDLNTVKDQLNEMKEFKVEVYQQQIEMEKLNHQGELMLKKATDETDRDIIREPLTELKHLWENLGEKIAHRQHKLEGALLALGQFQHALEELMSWLTHTEELLDAQRPISGDPKVIEVELAKHHVLKNDVLAHQATVETVNKAGNELLESSAGDDASSLRSRLEAMNQDCYVTFRGSERVAESRSELHMPQCPASYAMLVYSLVAAVQWRASFLHLSPQEDFLKLLGNSLIHIWNSIPS

SEQ ID NO: 860499 - protein, 743 aa, Homo sapiens
RGSHPTVLLGDLDLVTELMDAHKVFQKELGKRTGTVQVLKRSGRELIENSRDDTTWVKGQLQELSTRWDTVCKLSVSKQSRLEQALKQAEVFRDTVHMLLEWLSEAEQTLRFRGALPDDTEALQSLIDTHKEFMKKVEEKRVDVNSAVAMGEVILAVCHPDCITTIKHWITIIRARFEEVLTWAKQHQQRLETALSELVANAELLEELLAWIQWAETTLIQRDQEPIPQNIDRVKALIAEHQTFMEEMTRKQPDVDRVTKTYKRKNIEPTHAPFIEKSRSGGRKSLSQPTPPPMPILSQSEAKNPRINQLSARWQQVWLLALERQRKLNDALDRLEELKEFANFDFDVWRKKYMRWMNHKKSRVMDFFRRIDKDQDGKITRQEFIDGILASKFPTTKLEMTAVADIFDRDGDGYIDYYEFVAALHPNKDAYRPTTDADKIEDEVTRQVAQCKCAKRFQVEQIGENKYRFGDSQQLRLVRILRSTVMVRVGGGWMALDEFLVKNDPCRARGRTNIELREKFILPEGASQGMTPFRSRGRRSKPSSRAASPTRSSSSASQSNHSCTSMPSSPATPASGTKTSLQFSRCYDKPWLVNSKAGTPIRDSHSPDLQLPTPEVIPSSGSKLKRPTPTFHSSRTSLAGDTSNSSSPASTGAKTNRADPKKSASRPGSRAGSRAGSRASSRRGSDASDFDLLETQSACSDTSESSAAGGQGNSRRGLNKPSKIPTMSKKTTTASPRTPGPKR

SEQ ID NO: 860500 - protein, 258 aa, Homo sapiens
LQDLIVICNQVQQSGENKYRFGDSQQLRLVRILRSTVMVRVGGGWMALDEFLVKNDPCRARGRTNIELREKFILPEGASQGMTPFRSRGRRSKPSSRAASPTRSSSSASQSNHSCTSMPSSPATPASGTKVIPSSGSKLKRPTPTFHSSRTSLAGDTSNSSSPASTGAKTNRADPKKSASRPGSRAGSRAGSRASSRRGSDASDFDLLETQSACSDTSESSAAGGQGNSRRGLNKPSKIPTMSKKTTTASPRTPGPKR

SEQ ID NO: 860501 - protein, 4308 aa, Homo sapiens; identical to SEQ ID NO: 860495

SEQ ID NO: 860502 - protein, 4308 aa, Homo sapiens; identical to SEQ ID NO: 860495

SEQ ID NO: 860503 - protein, 4308 aa, Homo sapiens; identical to SEQ ID NO: 860495

SEQ ID NO: 860504 - protein, 4308 aa, Homo sapiens; identical to SEQ ID NO: 860495

SEQ ID NO: 860505 - protein, 4308 aa, Homo sapiens; identical to SEQ ID NO: 860495

SEQ ID NO: 860506 - protein, 4308 aa, Homo sapiens; identical to SEQ ID NO: 860495

SEQ ID NO: 860507 - protein, 4068 aa, Homo sapiens
MFPVLWAGIPWRDVGSLQPLPPGFKQFCTSASRVAVITDERDRVQKKTFTKWVNKHLMKVRKHINDLYEDLRDGHNLISLLEVLSGIKLPREKGRMRFHRLQNVQIALDFLKQRQVKLVNIRNDDITDGNPKLTLGLIWTIILHFQISDIYISGESGDMSAKEKLLLWTQKVTAGYTGIKCTNFSSCWSDGKMFNALIHRYRPDLVDMERVQIQSNRENLEQAFEVAERLGVTRLLDAEDVDVPSPDEKSVITYVSSIYDAFPKVPEGGEGISATEVDSRWQEYQSRVDSLIPWIKQHTILMSDKTFPQNPVELKALYNQYIHFKETEILAKEREKGRIEELYKLLEVWIEFGRIKLPQGYHPNDVEEEWGKLIIEMLEREKSLRPAVERLELLLQIANKIQNGALNCEEKLTLAKNTLQADAAHLESGQPVQCESDVIMYIQECEGLIRQLQVDLQILRDENYYQLEELAFRVMRLQDELVTLRLECTNLYRKGHFTSLELVPPSTLTTTHLKAEPLTKATHSSSTSWFRKPMTRAELVAISSSEDEGNLRFVYELLSWVEEMQMKLERAEWGNDLPSVELQLETQQHIHTSVEELGSSVKEARLYEGKMSQNFHTSYAETLGKLETQYCKLKETSSFRMRHLQSLHKFVSRATAELIWLNEKEEEELAYDWSDNNSNISAKRNYFSELTMELEEKQDVFRSLQDTAELLSLENHPAKQTVEAYSAAVQSQLQWMKQLCLCVEQHVKENTAYFQFFSDARELESFLRNLQDSIKRKYSCDHNTSLSRLEDLLQDSMDEKEQLIQSKSSVASLVGRSKTIVQLKPRSPDHVLKNTISVKAVCDYRQIEITICKNDECVLEDNSQRTKWKVISPTGNEAMVPSVCFLIPPPNKDAIEMASRVEQSYQKVMALWHQLHVNTKSLISWNYLRKDLDLVQTWNLEKLRSSAPGECHQIMKNLQAHYEDFLQDSRDSVLFSVADRLRLEEEVEACKARFQHLMKSMENEDKEETVAKMYISELKNIRLRLEEYEQRVVKRIQSLASSRTDRDAWQDNALRIAEQEHTQEDLQQLRSDLDAVSMKCDSFLHQSPSSSSVPTLRSELNLLVEKMDHVYGLSTVYLNKLKTVDVIVRSIQDAELLVKGYEIKLSQEEVVLADLSALEAHWSTLRHWLSDVKDKNSVFSVLDEEIAKAKVVAEQMSRLTPERNLDLERYQEKGSQLQERWHRVIAQLEIRQSELESIQEVLGDYRACHGTLIKWIEETTAQQEMMKPGQAEDSRVLSEQLSQQTALFAEIERNQTKLDQCQKFSQQYSTIVKDYELQLMTYKAFVESQQKSPGKRRRMLSSSDAITQEFMDLRTRYTALVTLTTQHVKYISDALRRLEEEEKVVEEEKQEHVEKVKELLGWVSTLARNTQGKATSSETKESTDIEKAILEQQVLSEELTTKKEQVSEAIKTSQIFLAKHGHKLSEKEKKQISEQLNALNKAYHDLCDGSANQLQQLQSQLAHQTEQKTLQKQQNTCHQQLEDLCSWVGQAERALAGHQGRTTQQDLSALQKNQSDLKDLQDDIQNRATSFATVVKDIEGFMEENQTKLSPRELTALREKLHQAKEQYEALQEETRVAQKELEEAVTSALQQETEKSKAAKELAENKKKIDALLDWVTSVGSSGGQLLTNLPGMEQLSGASLEKGALDTTDGYMGVNQAPEKLDKQCEMMKARHQELLSQQQNFILATQSAQAFLDQHGHNLTPEEQQMLQQKLGELKEQYSTSLAQSEAELKQVQTLQDELQKFLQDHKEFESWLERSEKELENMHKGGSSPETLPSLLKRQGSFSEDVISHKGDLRFVTISGQKVLDMENSFKEGKEPSEIGNLVKDKLKDATERYTALHSKCTRLGSHLNMLLGQYHQFQNSADSLQAWMQACEANVEKLLSDTVASDPGVLQEQLATTKQLQEELAEHQVPVEKLQKVARDIMEIEGEPAPDHRHVQETTDSILSHFQSLSYSLAERSSLLQKAIAQSQSVQESLESLLQSIGEVEQNLEGKQVSSLSSGVIQEALATNMKLKQDIARQKSSLEATREMVTRFMETADSTTAAVLQGKLAEVSQRFEQLCLQQQEKESSLKKLLPQAEMFEHLSGKLQQFMENKSRMLASGNQPDQDITHFFQQIQELNLEMEDQQENLDTLEHLVTELSSCGFALDLCQHQDRVQNLRKDFTELQKTVKEREKDASSCQEQLDEFRKLVRTFQKWLKETEGSIPPTETSMSAKELEKQIEHLKSLLDDWASKGTLVEEINCKGTSLENLIMEITAPDSQGKTDLTEIQCDMSDVNLKYEKLGGVLHERQESLQAILNRMEEVHKEANSVLQWLESKEEVLKSMDAMSSPTKTETVKAQAESNKAFLAELEQNSPKIQKVKEALAGLLVTYPNSQEAENWKKIQEELNSRWERATEVTVARQRQLEESASHLACFQAAESQLRPWLMEKELMMGVLGPLSIDPNMLNAQKQQVQFMLKEFEARRQQHEQLNEAAQGILTGPGDVSLSTSQVQKELQSINQKWVELTDKLNSRSSQIDQAIVKSTQYQELLQDLSEKVRAVGQRLSVQSAISTQPEAVKQQLEETSEIRSDLEQLDHEVKEAQTLCDELSVLIGEQYLKDELKKRLETVALPLQGLEDLAADRINRLQAALASTQQFQQMFDELRTWLDDKQSQQAKNCPISAKLERLQSQLQENEEFQKSLNQHSGSYEVIVAEGESLLLSVPPGEEKRTLQNQLVELKNHWEELSKKTADRQSRLKDCMQKAQKYQWHVEDLVPWIEDCKAKMSELRVTLDPVQLESSLLRSKAMLNEVEKRRSLLEILNSAADILINSSEADEDGIRDEKAGINQNMDAVTEELQAKTGSLEEMTQRLREFQESFKNIEKKVEGAKHQLEIFDALGSQACSNKNLEKLRAQQEVLQALEPQVDYLRNFTQGLVEDAPDGSDASQLLHQAEVAQQEFLEVKQRVNSGCVMMENKLEGIGQFHCRVREMFSQLADLDDELDGMGAIGRDTDSLQSQIEDVRLFLNKIHVLKLDIEASEAECRHMLEEEGTLDLLGLKRELEALNKQCGKLTERGKARQEQLELTLGRVEDFYRKLKGLNDATTAAEEAEALQWVVGTEVEIINQQLADFKMFQKEQVDPLQMKLQQVNGLGQGLIQSAGKDCDVQGLEHDMEEINARWNTLNKKVAQRIAQLQEALLHCGKFQDALEPLLSWLADTEELIANQKPPSAEYKVVKAQIQEQKLLQRLLDDRKATVDMLQAEGGRIAQSAELADREKITGQLESLESRWTELLSKAAARQKQLEDILVLAKQFHETAEPISDFLSVTEKKLANSEPVGTQTAKIQQQIIRHKALEEDIENHATDVHQAVKIGQSLSSLTSPAEQGVLSEKIDSLQARYSEIQDRCCRKAALLDQALSNARLFGEDEVEVLNWLAEVEDKLSSVFVKDFKQDVLHRQHADHLALNEEIVNRKKNVDQAIKNGQALLKQTTGEEVLLIQEKLDGIKTRYADITVTSSKALRTLEQARQLATKFQSTYEELTGWLREVEEELATSGGQSPTGEQIPQFQQRQKELKKEVMEHRLVLDTVNEVSRALLELVPWRAREGLDKLVSDANEQYKLVSDTIGQRVDEIDAAIQRSQQYEQAADAELAWVAETKRKLMALGPIRLEQDQTTAQLQVQKAFSIDIIRHKDSMDELFSHRSEIFGTCGEEQKTVLQEKTESLIQQYEAISLLNSERYARLERAQVLVNQFWETYEELSPWIEETRALIAQLPSPAIDHEQLRQQQEEMRQLRESIAEHKPHIDKLLKIGPQLKELNPEEGEMVEEKYQKAENMYAQIKEEVRQRALALDEAVSQSTQITEFHDKIEPMLETLENLSSRLRMPPLIPAEVDKIRECISDNKSATVELEKLQPSFEALKRRGEELIGRSQGADKDLAAKEIQDKLDQMVFFWEDIKARAEEREIKFLDVLELAEKFWYDMAALLTTIKDTQDIVHDLESPGIDPSIIKQQVEAAETIKEETDGLHEELEFIRILGADLIFACGEMKLYQ

SEQ ID NO: 860508 - protein, 3724 aa, Homo sapiens
MFPVLWAGIPWRDVGSLQPLPPGFKQFCTSASRVAVITDERDRVQKKTFTKWVNKHLMKVRKHINDLYEDLRDGHNLISLLEVLSGIKLPREKGRMRFHRLQNVQIALDFLKQRQVKLVNIRNDDITDGNPKLTLGLIWTIILHFQISDIYISGESGDMSAKEKLLLWTQKVTAGYTGIKCTNFSSCWSDGKMFNALIHRYRPDLVDMERVQIQSNRENLEQAFEVAERLGVTRLLDAEDVDVPSPDEKSVITYVSSIYDAFPKVPEGGEGISATEVDSRWQEYQSRVDSLIPWIKQHTILMSDKTFPQNPVELKALYNQYIHFKETEILAKEREKGRIEELYKLLEVWIEFGRIKLPQGYHPNDVEEEWGKLIIEMLEREKSLRPAVERLELLLQIANKIQNGALNCEEKLTLAKNTLQADAAHLESGQPVQCESDVIMYIQECEGLIRQLQVDLQILRDENYYQLEELAFRVMRLQDELVTLRLECTNLYRKGHFTSLELVPPSTLTTTHLKAEPLTKATHSSSTSWFRKPMTRAELVAISSSEDEGNLRFVYELLSWVEEMQMKLERAEWGNDLPSVELQLETQQHIHTSVEELGSSVKEARLYEGKMSQNFHTSYAETLGKLETQYCKLKETSSFRMRHLQSLHKFVSRATAELIWLNEKEEEELAYDWSDNNSNISAKRNYFSELTMELEEKQDVFRSLQDTAELLSLENHPAKQTVEAYSAAVQSQLQWMKQLCLCVEQHVKENTAYFQFFSDARELESFLRNLQDSIKRKYSCDHNTSLSRLEDLLQDSMDEKEQLIQSKSSVASLVGRSKTIVQLKPRSPDHVLKNTISVKAVCDYRQIEITICKNDECVLEDNSQRTKWKVISPTGNEAMVPSVCFLIPPPNKDAIEMASRVEQSYQKVMALWHQLHVNTKSLISWNYLRKDLDLVQTWNLEKLRSSAPGECHQIMKNLQAHYEDFLQDSRDSVLFSVADRLRLEEEVEACKARFQHLMKSMENEDKEETVAKMYISELKNIRLRLEEYEQRVVKRIQSLASSRTDRDAWQDNALRIAEQEHTQEDLQQLRSDLDAVSMKCDSFLHQSPSSSSVPTLRSELNLLVEKMDHVYGLSTVYLNKLKTVDVIVRSIQDAELLVKGYEIKLSQEEVVLADLSALEAHWSTLRHWLSDVKDKNSVFSVLDEEIAKAKVVAEQMSRLTPERNLDLERYQEKGSQLQERWHRVIAQLEIRQSELESIQEVLGDYRACHGTLIKWIEETTAQQEMMKPGQAEDSRVLSEQLSQQTALFAEIERNQTKLDQCQKFSQQYSTIVKDYELQLMTYKAFVESQQKSPGKRRRMLSSSDAITQEFMDLRTRYTALVTLTTQHVKYISDALRRLEEEEKVVEEEKQEHVEKVKELLGWVSTLARNTQGKATSSETKESTDIEKAILEQQVLSEELTTKKEQVSEAIKTSQIFLAKHGHKLSEKEKKQISEQLNALNKAYHDLCDGSANQLQQLQSQLAHQTEQKTLQKQQNTCHQQLEDLCSWVGQAERALAGHQGRTTQQDLSALQKNQSDLKDLQDDIQNRATSFATVVKDIEGFMEENQTKLSPRELTALREKLHQAKEQYEALQEETRVAQKELEEAVTSALQQETEKSKAAKELAENKKKIDALLDWVTSVGSSGGQLLTNLPGMEQLSGASLEKGALDTTDGYMGVNQAPEKLDKQCEMMKARHQELLSQQQNFILATQSAQAFLDQHGHNLTPEEQQMLQQKLGELKEQYSTSLAQSEAELKQVQTLQDELQKFLQDHKEFESWLERSEKELENMHKGGSSPETLPSLLKRQGSFSEDVISHKGDLRFVTISGQKVLDMENSFKEGKEPSEIGNLVKDKLKDATERYTALHSKCTRLGSHLNMLLGQYHQFQNSADSLQAWMQACEANVEKLLSDTVASDPGVLQEQLATTKQLQEELAEHQVPVEKLQKVARDIMEIEGEPAPDHRHVQETTDSILSHFQSLSYSLAERSSLLQKAIAQSQSVQESLESLLQSIGEVEQNLEGKQVSSLSSGVIQEALATNMKLKQDIARQKSSLEATREMVTRFMETADSTTAAVLQGKLAEVSQRFEQLCLQQQEKESSLKKLLPQAEMFEHLSGKLQQFMENKSRMLASGNQPDQDITHFFQQIQELNLEMEDQQENLDTLEHLVTELSSCGFALDLCQHQDRVQNLRKDFTELQKTVKEREKDASSCQEQLDEFRKLVRTFQKWLKETEGSIPPTETSMSAKELEKQIEHLKSLLDDWASKGTLVEEINCKGTSLENLIMEITAPDSQGKTDLTEIQCDMSDVNLKYEKLGGVLHERQESLQAILNRMEEVHKEANSVLQWLESKEEVLKSMDAMSSPTKTETVKAQAESNKAFLAELEQNSPKIQKVKEALAGLLVTYPNSQEAENWKKIQEELNSRWERATEVTVARQRQLEESASHLACFQAAESQLRPWLMEKELMMGVLGPLSIDPNMLNAQKQQVQFMLKEFEARRQQHEQLNEAAQGILTGPGDVSLSTSQVQKELQSINQKWVELTDKLNSRSSQIDQAIVKSTQYQELLQDLSEKVRAVGQRLSVQSAISTQPEAVKQQLEETSEIRSDLEQLDHEVKEAQTLCDELSVLIGEQYLKDELKKRLETVALPLQGLEDLAADRINRLQAALASTQQFQQMFDELRTWLDDKQSQQAKNCPISAKLERLQSQLQENEEFQKSLNQHSGSYEVIVAEGESLLLSVPPGEEKRTLQNQLVELKNHWEELSKKTADRQSRLKDCMQKAQKYQWHVEDLVPWIEDCKAKMSELRVTLDPVQLESSLLRSKAMLNEVEKRRSLLEILNSAADILINSSEADEDGIRDEKAGINQNMDAVTEELQAKTGSLEEMTQRLREFQESFKNIEKKVEGAKHQLEIFDALGSQACSNKNLEKLRAQQEVLQALEPQVDYLRNFTQGLVEDAPDGSDASQLLHQAEVAQQEFLEVKQRVNSGCVMMENKLEGIGQFHCRVREMFSQLADLDDELDGMGAIGRDTDSLQSQIEDVRLFLNKIHVLKLDIEASEAECRHMLEEEGTLDLLGLKRELEALNKQCGKLTERGKARQEQLELTLGRVEDFYRKLKGLNDATTAAEEAEALQWVVGTEVEIINQQLADFKMFQKEQVDPLQMKLQQVNGLGQGLIQSAGKDCDVQGLEHDMEEINARWNTLNKKVAQRIAQLQEALLHCGKFQDALEPLLSWLADTEELIANQKPPSAEYKVVKAQIQEQKLLQRLLDDRKATVDMLQAEGGRIAQSAELADREKITGQLESLESRWTELLSKAAARQKQLEDILVLAKQFHETAEPISDFLSVTEKKLANSEPVGTQTAKIQQQIIRHKALEEDIENHATDVHQAVKIGQSLSSLTSPAEQGVLSEKIDSLQARYSEIQDRCCRKAALLDQALSNARLFGEDEVEVLNWLAEVEDKLSSVFVKDFKQDVLHRQHADHLALNEEIVNRKKNVDQAIKNGQALLKQTTGEEVLLIQEKLDGIKTRYADITVTSSKALRTLEQARQLATKFQSTYEELTGWLREVEEELATSGGQSPTGEQIPQFQQRQKELKKEVMEHRLVLDTVNEVSRALLELVPWRAREGLDKLVSDANEQYKLVSDTIGQRVDEIDAAIQRSQQEILLCLLLALFASGLIHRVCVTTCFIFSMVGLYYINKISSTLYQAAAPVLTPAKVTGKSKKRN

SEQ ID NO: 860509 - protein, 843 aa, Homo sapiens
MFPVLWAGIPWRDVGSLQPLPPGFKQFCTSASRVAVITDERDRVQKKTFTKWVNKHLMKVRKHINDLYEDLRDGHNLISLLEVLSGIKLPREKGRMRFHRLQNVQIALDFLKQRQVKLVNIRNDDITDGNPKLTLGLIWTIILHFQISDIYISGESGDMSAKEKLLLWTQKVTAGYTGIKCTNFSSCWSDGKMFNALIHRYRPDLVDMERVQIQSNRENLEQAFEVAERLGVTRLLDAEDVDVPSPDEKSVITYVSSIYDAFPKVPEGGEGISATEVDSRWQEYQSRVDSLIPWIKQHTILMSDKTFPQNPVELKALYNQYIHFKETEILAKEREKGRIEELYKLLEVWIEFGRIKLPQGYHPNDVEEEWGKLIIEMLEREKSLRPAVERLELLLQIANKIQNGALNCEEKLTLAKNTLQADAAHLESGQPVQCESDVIMYIQECEGLIRQLQVDLQILRDENYYQLEELAFRVMRLQDELVTLRLECTNLYRKGHFTSLELVPPSTLTTTHLKAEPLTKATHSSSTSWFRKPMTRAELVAISSSEDEGNLRFVYELLSWVEEMQMKLERAEWGNDLPSVELQLETQQHIHTSVEELGSSVKEARLYEGKMSQNFHTSYAETLGKLETQYCKLKETSSFRMRHLQSLHKFVSRATAELIWLNEKEEEELAYDWSDNNSNISAKRNYFSELTMELEEKQDVFRSLQDTAELLSLENHPAKQTVEAYSAAVQSQLQWMKQLCLCVEQHVKENTAYFQFFSDARELESFLRNLQDSIKRKYSCDHNTSLSRLEDLLQDSMVGVASVGMITSEKESKPYQLLLFISLKAPGQWAIVVIKFGLHSNRV

SEQ ID NO: 860510 - protein, 49 aa, Homo sapiens
MKNLQAHYEDFLQDSRDSVLFSVADRLRLEEEVEACKARFQHLMKSMEN

SEQ ID NO: 860511 - protein, 4344 aa, Homo sapiens; identical to SEQ ID NO: 860491

SEQ ID NO: 860512 - protein, 4344 aa, Homo sapiens; identical to SEQ ID NO: 860491

SEQ ID NO: 860513 - protein, 4344 aa, Homo sapiens; identical to SEQ ID NO: 860491

SEQ ID NO: 860514 - protein, 2255 aa, Homo sapiens
GEVQLASHGECPGTLLNILQCTGESSYNQQLADFKMFQKEQVDPLQMKLQQVNGLGQGLIQSAGKDCDVQGLEHDMEEINARWNTLNKKVAQRIAQLQEALLHCGKFQDALEPLLSWLADTEELIANQKPPSAEYKVVKAQIQEQKLLQRLLDDRKATVDMLQAEGGRIAQSAELADREKITGQLESLESRWTELLSKAAARQKQLEDILVLAKQFHETAEPISDFLSVTEKKLANSEPVGTQTAKIQQQIIRHKALEEDIENHATDVHQAVKIGQSLSSLTSPAEQGVLSEKIDSLQARYSEIQDRCCRKAALLDQALSNARLFGEDEVEVLNWLAEVEDKLSSVFVKDFKQDVLHRQHADHLALNEEIVNRKKNVDQAIKNGQALLKQTTGEEVLLIQEKLDGIKTRYADITVTSSKALRTLEQARQLATKFQSTYEELTGWLREVEEELATSGGQSPTGEQIPQFQQRQKELKKEVMEHRLVLDTVNEVSRALLELVPWRAREGLDKLVSDANEQYKLVSDTIGQRVDEIDAAIQRSQQYEQAADAELAWVAETKRKLMALGPIRLEQDQTTAQLQVQKAFSIDIIRHKDSMDELFSHRSEIFGTCGEEQKTVLQEKTESLIQQYEAISLLNSERYARLERAQVLVNQFWETYEELSPWIEETRALIAQLPSPAIDHEQLRQQQEEMRQLRESIAEHKPHIDKLLKIGPQLKELNPEEGEMVEEKYQKAENMYAQIKEEVRQRALALDEAVSQSTQITEFHDKIEPMLETLENLSSRLRMPPLIPAEVDKIRECISDNKSATVELEKLQPSFEALKRRGEELIGRSQGADKDLAAKEIQDKLDQMVFFWEDIKARAEEREIKFLDVLELAEKFWYDMAALLTTIKDTQDIVHDLESPGIDPSIIKQQVEAAETIKEETDGLHEELEFIRILGADLIFACGETEKPEVRKSIDEMNNAWENLNKTWKERLEKLEDAMQAAVQYQDTLQAMFDWLDNTVIKLCTMPPVGTDLNTVKDQLNEMKEFKVEVYQQQIEMEKLNHQGELMLKKATDETDRDIIREPLTELKHLWENLGEKIAHRQHKLEGALLALGQFQHALEELMSWLTHTEELLDAQRPISGDPKVIEVELAKHHVLKNDVLAHQATVETVNKAGNELLESSAGDDASSLRSRLEAMNQCWESVLQKTEEREQQLQSTLQQAQGFHSEIEDFLLELTRMESQLSASKPTGGLPETAREQLDTHMELYSQLKAKEETYNQLLDKGRLMLLSRDDSGSGSKTEQSVALLEQKWHVVSSKMEERKSKLEEALNLATEFQNSLQEFINWLTLAEQSLNIASPPSLILNTVLSQIEEHKVFANEVNAHRDQIIELDQTGNQLKFLSQKQDVVLIKNLLVSVQSRWEKVVQRSIERGRSLDDARKRAKQFHEAWKKLIDWLEDAESHLDSELEISNDPDKIKLQLSKHKEFQKTLGGKQPVYDTTIRTGRALKEKTLLPEDTQKLDNFLGEVRDKWDTVCGKSVERQHKLEEALLFSGQFMDALQALVDWLYKVEPQLAEDQPVHGDLDLVMNLMDAHKVFQKELGKRTGTVQVLKRSGRELIENSRDDTTWVKGQLQELSTRWDTVCKLSVSKQSRLEQALKQAEVFRDTVHMLLEWLSEAEQTLRFRGALPDDTEALQSLIDTHKEFMKKVEEKRVDVNSAVAMGEVILAVCHPDCITTIKHWITIIRARFEEVLTWAKQHQQRLETALSELVANAELLEELLAWIQWAETTLIQRDQEPIPQNIDRVKALIAEHQTFMEEMTRKQPDVDRVTKTYKRKNIEPTHAPFIEKSRSGGRKSLSQPTPPPMPILSQSEAKNPRINQLSARWQQVWLLALERQRKLNDALDRLEELKEFANFDFDVWRKKYMRWMNHKKSRVMDFFRRIDKDQDGKITRQEFIDGILASKFPTTKLEMTAVADIFDRDGDGYIDYYEFVAALHPNKDAYRPTTDADKIEDEVTRQVAQCKCAKRFQVEQIGENKYRFGDSQQLRLVRILRSTVMVRVGGGWMALDEFLVKNDPCRARGRTNIELREKFILPEGASQGMTPFRSRGRRSKPSSRAASPTRSSSSASQSNHSCTSMPSSPATPASGTKVIPSSGSKLKRPTPTFHSSRTSLAGDTSNSSSPASTGAKTNRADPKKSASRPGSRAGSRAGSRASSRRGSDASDFDLLETQSACSDTSESSAAGGQGNSRRGLNKPSKIPTMSKKTTTASPRTPGPKR

SEQ ID NO: 860515 - protein, 4308 aa, Homo sapiens; identical to SEQ ID NO: 860495

SEQ ID NO: 860516 - protein, 4308 aa, Homo sapiens; identical to SEQ ID NO: 860495

SEQ ID NO: 860517 - protein, 4308 aa, Homo sapiens; identical to SEQ ID NO: 860495

SEQ ID NO: 860518 - protein, 4308 aa, Homo sapiens; identical to SEQ ID NO: 860495

SEQ ID NO: 860519 - protein, 4308 aa, Homo sapiens; identical to SEQ ID NO: 860495

SEQ ID NO: 860520 - protein, 4308 aa, Homo sapiens; identical to SEQ ID NO: 860495

SEQ ID NO: 860521 - protein, 4308 aa, Homo sapiens; identical to SEQ ID NO: 860495

SEQ ID NO: 860522 - protein, 4308 aa, Homo sapiens; identical to SEQ ID NO: 860495

SEQ ID NO: 860523 - protein, 2315 aa, Homo sapiens
MFPVLWAGIPWRDVGSLQPLPPGFKQFCTSASRVAVITDERDRVQKKTFTKWVNKHLMKVRKHINDLYEDLRDGHNLISLLEVLSGIKLPREKGRMRFHRLQNVQIALDFLKQRQVKLVNIRNDDITDGNPKLTLGLIWTIILHFQISDIYISGESGDMSAKEKLLLWTQKVTAGYTGIKCTNFSSCWSDGKMFNALIHRYRPDLVDMERVQIQSNRENLEQAFEVAERLGVTRLLDAEDVDVPSPDEKSVITYVSSIYDAFPKVPEGGEGISATEVDSRWQEYQSRVDSLIPWIKQHTILMSDKTFPQNPVELKALYNQYIHFKETEILAKEREKGRIEELYKLLEVWIEFGRIKLPQGYHPNDVEEEWGKLIIEMLEREKSLRPAVERLELLLQIANKIQNGALNCEEKLTLAKNTLQADAAHLESGQPVQCESDVIMYIQECEGLIRQLQVDLQILRDENYYQLEELAFRVMRLQDELVTLRLECTNLYRKGHFTSLELVPPSTLTTTHLKAEPLTKATHSSSTSWFRKPMTRAELVAISSSEDEGNLRFVYELLSWVEEMQMKLERAEWGNDLPSVELQLETQQHIHTSVEELGSSVKEARLYEGKMSQNFHTSYAETLGKLETQYCKLKETSSFRMRHLQSLHKFVSRATAELIWLNEKEEEELAYDWSDNNSNISAKRNYFSELTMELEEKQDVFRSLQDTAELLSLENHPAKQTVEAYSAAVQSQLQWMKQLCLCVEQHVKENTAYFQFFSDARELESFLRNLQDSIKRKYSCDHNTSLSRLEDLLQDSMDEKEQLIQSKSSVASLVGRSKTIVQLKPRSPDHVLKNTISVKAVCDYRQIEITICKNDECVLEDNSQRTKWKVISPTGNEAMVPSVCFLIPPPNKDAIEMASRVEQSYQKVMALWHQLHVNTKSLISWNYLRKDLDLVQTWNLEKLRSSAPGECHQIMKNLQAHYEDFLQDSRDSVLFSVADRLRLEEEVEACKARFQHLMKSMENEDKEETVAKMYISELKNIRLRLEEYEQRVVKRIQSLASSRTDRDAWQDNALRIAEQEHTQEDLQQLRSDLDAVSMKCDSFLHQSPSSSSVPTLRSELNLLVEKMDHVYGLSTVYLNKLKTVDVIVRSIQDAELLVKGYEIKLSQEEVVLADLSALEAHWSTLRHWLSDVKDKNSVFSVLDEEIAKAKVVAEQMSRLTPERNLDLERYQEKGSQLQERWHRVIAQLEIRQSELESIQEVLGDYRACHGTLIKWIEETTAQQEMMKPGQAEDSRVLSEQLSQQTALFAEIERNQTKLDQCQKFSQQYSTIVKDYELQLMTYKAFVESQQKSPGKRRRMLSSSDAITQEFMDLRTRYTALVTLTTQHVKYISDALRRLEEEEKVVEEEKQEHVEKVKELLGWVSTLARNTQGKATSSETKESTDIEKAILEQQVLSEELTTKKEQVSEAIKTSQIFLAKHGHKLSEKEKKQISEQLNALNKAYHDLCDGSANQLQQLQSQLAHQTEQKTLQKQQNTCHQQLEDLCSWVGQAERALAGHQGRTTQQDLSALQKNQSDLKDLQDDIQNRATSFATVVKDIEGFMEENQTKLSPRELTALREKLHQAKEQYEALQEETRVAQKELEEAVTSALQQETEKSKAAKELAENKKKIDALLDWVTSVGSSGGQLLTNLPGMEQLSGASLEKGALDTTDGYMGVNQAPEKLDKQCEMMKARHQELLSQQQNFILATQSAQAFLDQHGHNLTPEEQQMLQQKLGELKEQYSTSLAQSEAELKQVQTLQDELQKFLQDHKEFESWLERSEKELENMHKGGSSPETLPSLLKRQGSFSEDVISHKGDLRFVTISGQKVLDMENSFKEGKEPSEIGNLVKDKLKDATERYTALHSKCTRLGSHLNMLLGQYHQFQNSADSLQAWMQACEANVEKLLSDTVASDPGVLQEQLATTKQLQEELAEHQVPVEKLQKVARDIMEIEGEPAPDHRHVQETTDSILSHFQSLSYSLAERSSLLQKAIAQSQSVQESLESLLQSIGEVEQNLEGKQVSSLSSGVIQEALATNMKLKQDIARQKSSLEATREMVTRFMETADSTTAAVLQGKLAEVSQRFEQLCLQQQEKESSLKKLLPQAEMFEHLSGKLQQFMENKSRMLASGNQPDQDITHFFQQIQELNLEMEDQQENLDTLEHLVTELSSCGFALDLCQHQDRVQNLRKDFTELQKTVKEREKDASSCQEQLDEFRKLVRTFQKWLKETEGSIPPTETSMSAKELEKQIEHLKSLLDDWASKGTLVEEINCKGTSLENLIMEITAPDSQGKTGEYRLFKI

SEQ ID NO: 860524 - protein, 4308 aa, Homo sapiens; identical to SEQ ID NO: 860495

SEQ ID NO: 860525 - protein, 3893 aa, Homo sapiens
MFPVLWAGIPWRDVGSLQPLPPGFKQFCTSASRVAVITDERDRVQKKTFTKWVNKHLMKVRKHINDLYEDLRDGHNLISLLEVLSGIKLPREKGRMRFHRLQNVQIALDFLKQRQVKLVNIRNDDITDGNPKLTLGLIWTIILHFQISDIYISGESGDMSAKEKLLLWTQKVTAGYTGIKCTNFSSCWSDGKMFNALIHRYRPDLVDMERVQIQSNRENLEQAFEVAERLGVTRLLDAEDVDVPSPDEKSVITYVSSIYDAFPKVPEGGEGISATEVDSRWQEYQSRVDSLIPWIKQHTILMSDKTFPQNPVELKALYNQYIHFKETEILAKEREKGRIEELYKLLEVWIEFGRIKLPQGYHPNDVEEEWGKLIIEMLEREKSLRPAVERLELLLQIANKIQNGALNCEEKLTLAKNTLQADAAHLESGQPVQCESDVIMYIQECEGLIRQLQVDLQILRDENYYQLEELAFRVMRLQDELVTLRLECTNLYRKGHFTSLELVPPSTLTTTHLKAEPLTKATHSSSTSWFRKPMTRAELVAISSSEDEGNLRFVYELLSWVEEMQMKLERAEWGNDLPSVELQLETQQHIHTSVEELGSSVKEARLYEGKMSQNFHTSYAETLGKLETQYCKLKETSSFRMRHLQSLHKFVSRATAELIWLNEKEEEELAYDWSDNNSNISAKRNYFSELTMELEEKQDVFRSLQDTAELLSLENHPAKQTVEAYSAAVQSQLQWMKQLCLCVEQHVKENTAYFQFFSDARELESFLRNLQDSIKRKYSCDHNTSLSRLEDLLQDSMDEKEQLIQSKSSVASLVGRSKTIVQLKPRSPDHVLKNTISVKAVCDYRQIEITICKNDECVLEDNSQRTKWKVISPTGNEAMVPSVCFLIPPPNKDAIEMASRVEQSYQKVMALWHQLHVNTKSLISWNYLRKDLDLVQTWNLEKLRSSAPGECHQIMKNLQAHYEDFLQDSRDSVLFSVADRLRLEEEVEACKARFQHLMKSMENEDKEETVAKMYISELKNIRLRLEEYEQRVVKRIQSLASSRTDRDAWQDNALRIAEQEHTQEDLQQLRSDLDAVSMKCDSFLHQSPSSSSVPTLRSELNLLVEKMDHVYGLSTVYLNKLKTVDVIVRSIQDAELLVKGYEIKLSQEEVVLADLSALEAHWSTLRHWLSDVKDKNSVFSVLDEEIAKAKVVAEQMSRLTPERNLDLERYQEKGSQLQERWHRVIAQLEIRQSELESIQEVLGDYRACHGTLIKWIEETTAQQEMMKPGQAEDSRVLSEQLSQQTALFAEIERNQTKLDQCQKFSQQYSTIVKDYELQLMTYKAFVESQQKSPGKRRRMLSSSDAITQEFMDLRTRYTALVTLTTQHVKYISDALRRLEEEEKVVEEEKQEHVEKVKELLGWVSTLARNTQGKATSSETKESTDIEKAILEQQVLSEELTTKKEQVSEAIKTSQIFLAKHGHKLSEKEKKQISEQLNALNKAYHDLCDGSANQLQQLQSQLAHQTEQKTLQKQQNTCHQQLEDLCSWVGQAERALAGHQGRTTQQDLSALQKNQSDLKDLQDDIQNRATSFATVVKDIEGFMEENQTKLSPRELTALREKLHQAKEQYEALQEETRVAQKELEEAVTSALQQETEKSKAAKELAENKKKIDALLDWVTSVGSSGGQLLTNLPGMEQLSGASLEKGALDTTDGYMGVNQAPEKLDKQCEMMKARHQELLSQQQNFILATQSAQAFLDQHGHNLTPEEQQMLQQKLGELKEQYSTSLAQSEAELKQVQTLQDELQKFLQDHKEFESWLERSEKELENMHKGGSSPETLPSLLKRQGSFSEDVISHKGDLRFVTISGQKVLDMENSFKEGKEPSEIGNLVKDKLKDATERYTALHSKCTRLGSHLNMLLGQYHQFQNSADSLQAWMQACEANVEKLLSDTVASDPGVLQEQLATTKQLQEELAEHQVPVEKLQKVARDIMEIEGEPAPDHRHVQETTDSILSHFQSLSYSLAERSSLLQKAIAQSQSVQESLESLLQSIGEVEQNLEGKQVSSLSSGVIQEALATNMKLKQDIARQKSSLEATREMVTRFMETADSTTAAVLQGKLAEVSQRFEQLCLQQQEKESSLKKLLPQAEMFEHLSGKLQQFMENKSRMLASGNQPDQDITHFFQQIQELNLEMEDQQENLDTLEHLVTELSSCGFALDLCQHQDRVQNLRKDFTELQKTVKEREKDASSCQEQLDEFRKLVRTFQKWLKETEGSIPPTETSMSAKELEKQIEHLKSLLDDWASKGTLVEEINCKGTSLENLIMEITAPDSQGKTDLTEIQCDMSDVNLKYEKLGGVLHERQESLQAILNRMEEVHKEANSVLQWLESKEEVLKSMDAMSSPTKTETVKAQAESNKAFLAELEQNSPKIQKVKEALAGLLVTYPNSQEAENWKKIQEELNSRWERATEVTVARQRQLEESASHLACFQAAESQLRPWLMEKELMMGVLGPLSIDPNMLNAQKQQVQFMLKEFEARRQQHEQLNEAAQGILTGPGDVSLSTSQVQKELQSINQKWVELTDKLNSRSSQIDQAIVKSTQYQELLQDLSEKVRAVGQRLSVQSAISTQPEAVKQQLEETSEIRSDLEQLDHEVKEAQTLCDELSVLIGEQYLKDELKKRLETVALPLQGLEDLAADRINRLQAALASTQQFQQMFDELRTWLDDKQSQQAKNCPISAKLERLQSQLQENEEFQKSLNQHSGSYEVIVAEGESLLLSVPPGEEKRTLQNQLVELKNHWEELSKKTADRQSRLKDCMQKAQKYQWHVEDLVPWIEDCKAKMSELRVTLDPVQLESSLLRSKAMLNEVEKRRSLLEILNSAADILINSSEADEDGIRDEKAGINQNMDAVTEELQAKTGSLEEMTQRLREFQESFKNIEKKVEGAKHQLEIFDALGSQACSNKNLEKLRAQQEVLQALEPQVDYLRNFTQGLVEDAPDGSDASQLLHQAEVAQQEFLEVKQRVNSGCVMMENKLEGIGQFHCRVREMFSQLADLDDELDGMGAIGRDTDSLQSQIEDVRLFLNKIHVLKLDIEASEAECRHMLEEEGTLDLLGLKRELEALNKQCGKLTERGKARQEQLELTLGRVEDFYRKLKGLNDATTAAEEAEALQWVVGTEVEIINQQLADFKMFQKEQVDPLQMKLQQVNGLGQGLIQSAGKDCDVQGLEHDMEEINARWNTLNKKVAQRIAQLQEALLHCGKFQDALEPLLSWLADTEELIANQKPPSAEYKVVKAQIQEQKLLQRLLDDRKATVDMLQAEGGRIAQSAELADREKITGQLESLESRWTELLSKAAARQKQLEDILVLAKQFHETAEPISDFLSVTEKKLANSEPVGTQTAKIQQQIIRHKALEEDIENHATDVHQAVKIGQSLSSLTSPAEQGVLSEKIDSLQARYSEIQDRCCRKAALLDQALSNARLFGEDEVEVLNWLAEVEDKLSSVFVKDFKQDVLHRQHADHLALNEEIVNRKKNVDQAIKNGQALLKQTTGEEVLLIQEKLDGIKTRYADITVTSSKALRTLEQARQLATKFQSTYEELTGWLREVEEELATSGGQSPTGEQIPQFQQRQKELKKEVMEHRLVLDTVNEVSRALLELVPWRAREGLDKLVSDANEQYKLVSDTIGQRVDEIDAAIQRSQQYEQAADAELAWVAETKRKLMALGPIRLEQDQTTAQLQVQKAFSIDIIRHKDSMDELFSHRSEIFGTCGEEQKTVLQEKTESLIQQYEAISLLNSERYARLERAQVLVNQFWETYEELSPWIEETRALIAQLPSPAIDHEQLRQQQEEMRQLRESIAEHKPHIDKLLKIGPQLKELNPEEGEMVEEKYQKAENMYAQIKEEVRQRALALDEAVSQSTQVCVCLTLITLNCLLF

SEQ ID NO: 860526 - protein, 3525 aa, Homo sapiens
MFPVLWAGIPWRDVGSLQPLPPGFKQFCTSASRVAVITDERDRVQKKTFTKWVNKHLMKVRKHINDLYEDLRDGHNLISLLEVLSGIKLPREKGRMRFHRLQNVQIALDFLKQRQVKLVNIRNDDITDGNPKLTLGLIWTIILHFQISDIYISGESGDMSAKEKLLLWTQKVTAGYTGIKCTNFSSCWSDGKMFNALIHRYRPDLVDMERVQIQSNRENLEQAFEVAERLGVTRLLDAEDVDVPSPDEKSVITYVSSIYDAFPKVPEGGEGISATEVDSRWQEYQSRVDSLIPWIKQHTILMSDKTFPQNPVELKALYNQYIHFKETEILAKEREKGRIEELYKLLEVWIEFGRIKLPQGYHPNDVEEEWGKLIIEMLEREKSLRPAVERLELLLQIANKIQNGALNCEEKLTLAKNTLQADAAHLESGQPVQCESDVIMYIQECEGLIRQLQVDLQILRDENYYQLEELAFRVMRLQDELVTLRLECTNLYRKGHFTSLELVPPSTLTTTHLKAEPLTKATHSSSTSWFRKPMTRAELVAISSSEDEGNLRFVYELLSWVEEMQMKLERAEWGNDLPSVELQLETQQHIHTSVEELGSSVKEARLYEGKMSQNFHTSYAETLGKLETQYCKLKETSSFRMRHLQSLHKFVSRATAELIWLNEKEEEELAYDWSDNNSNISAKRNYFSELTMELEEKQDVFRSLQDTAELLSLENHPAKQTVEAYSAAVQSQLQWMKQLCLCVEQHVKENTAYFQFFSDARELESFLRNLQDSIKRKYSCDHNTSLSRLEDLLQDSMDEKEQLIQSKSSVASLVGRSKTIVQLKPRSPDHVLKNTISVKAVCDYRQIEITICKNDECVLEDNSQRTKWKVISPTGNEAMVPSVCFLIPPPNKDAIEMASRVEQSYQKVMALWHQLHVNTKSLISWNYLRKDLDLVQTWNLEKLRSSAPGECHQIMKNLQAHYEDFLQDSRDSVLFSVADRLRLEEEVEACKARFQHLMKSMENEDKEETVAKMYISELKNIRLRLEEYEQRVVKRIQSLASSRTDRDAWQDNALRIAEQEHTQEDLQQLRSDLDAVSMKCDSFLHQSPSSSSVPTLRSELNLLVEKMDHVYGLSTVYLNKLKTVDVIVRSIQDAELLVKGYEIKLSQEEVVLADLSALEAHWSTLRHWLSDVKDKNSVFSVLDEEIAKAKVVAEQMSRLTPERNLDLERYQEKGSQLQERWHRVIAQLEIRQSELESIQEVLGDYRACHGTLIKWIEETTAQQEMMKPGQAEDSRVLSEQLSQQTALFAEIERNQTKLDQCQKFSQQYSTIVKDYELQLMTYKAFVESQQKSPGKRRRMLSSSDAITQEFMDLRTRYTALVTLTTQHVKYISDALRRLEEEEKVVEEEKQEHVEKVKELLGWVSTLARNTQGKATSSETKESTDIEKAILEQQVLSEELTTKKEQVSEAIKTSQIFLAKHGHKLSEKEKKQISEQLNALNKAYHDLCDGSANQLQQLQSQLAHQTEQKTLQKQQNTCHQQLEDLCSWVGQAERALAGHQGRTTQQDLSALQKNQSDLKDLQDDIQNRATSFATVVKDIEGFMEENQTKLSPRELTALREKLHQAKEQYEALQEETRVAQKELEEAVTSALQQETEKSKAAKELAENKKKIDALLDWVTSVGSSGGQLLTNLPGMEQLSGASLEKGALDTTDGYMGVNQAPEKLDKQCEMMKARHQELLSQQQNFILATQSAQAFLDQHGHNLTPEEQQMLQQKLGELKEQYSTSLAQSEAELKQVQTLQDELQKFLQDHKEFESWLERSEKELENMHKGGSSPETLPSLLKRQGSFSEDVISHKGDLRFVTISGQKVLDMENSFKEGKEPSEIGNLVKDKLKDATERYTALHSKCTRLGSHLNMLLGQYHQFQNSADSLQAWMQACEANVEKLLSDTVASDPGVLQEQLATTKQLQEELAEHQVPVEKLQKVARDIMEIEGEPAPDHRHVQETTDSILSHFQSLSYSLAERSSLLQKAIAQSQSVQESLESLLQSIGEVEQNLEGKQVSSLSSGVIQEALATNMKLKQDIARQKSSLEATREMVTRFMETADSTTAAVLQGKLAEVSQRFEQLCLQQQEKESSLKKLLPQAEMFEHLSGKLQQFMENKSRMLASGNQPDQDITHFFQQIQELNLEMEDQQENLDTLEHLVTELSSCGFALDLCQHQDRVQNLRKDFTELQKTVKEREKDASSCQEQLDEFRKLVRTFQKWLKETEGSIPPTETSMSAKELEKQIEHLKSLLDDWASKGTLVEEINCKGTSLENLIMEITAPDSQGKTDLTEIQCDMSDVNLKYEKLGGVLHERQESLQAILNRMEEVHKEANSVLQWLESKEEVLKSMDAMSSPTKTETVKAQAESNKAFLAELEQNSPKIQKVKEALAGLLVTYPNSQEAENWKKIQEELNSRWERATEVTVARQRQLEESASHLACFQAAESQLRPWLMEKELMMGVLGPLSIDPNMLNAQKQQVQFMLKEFEARRQQHEQLNEAAQGILTGPGDVSLSTSQVQKELQSINQKWVELTDKLNSRSSQIDQAIVKSTQYQELLQDLSEKVRAVGQRLSVQSAISTQPEAVKQQLEETSEIRSDLEQLDHEVKEAQTLCDELSVLIGEQYLKDELKKRLETVALPLQGLEDLAADRINRLQAALASTQQFQQMFDELRTWLDDKQSQQAKNCPISAKLERLQSQLQENEEFQKSLNQHSGSYEVIVAEGESLLLSVPPGEEKRTLQNQLVELKNHWEELSKKTADRQSRLKDCMQKAQKYQWHVEDLVPWIEDCKAKMSELRVTLDPVQLESSLLRSKAMLNEVEKRRSLLEILNSAADILINSSEADEDGIRDEKAGINQNMDAVTEELQAKTGSLEEMTQRLREFQESFKNIEKKVEGAKHQLEIFDALGSQACSNKNLEKLRAQQEVLQALEPQVDYLRNFTQGLVEDAPDGSDASQLLHQAEVAQQEFLEVKQRVNSGCVMMENKLEGIGQFHCRVREMFSQLADLDDELDGMGAIGRDTDSLQSQIEDVRLFLNKIHVLKLDIEASEAECRHMLEEEGTLDLLGLKRELEALNKQCGKLTERGKARQEQLELTLGRVEDFYRKLKGLNDATTAAEEAEALQWVVGTEVEIINQQLADFKMFQKEQVDPLQMKLQQVNGLGQGLIQSAGKDCDVQGLEHDMEEINARWNTLNKKVAQRIAQLQEALLHCGKFQDALEPLLSWLADTEELIANQKPPSAEYKVVKAQIQEQKLLQRLLDDRKATVDMLQAEGGRIAQSAELADREKITGQLESLESRWTELLSKAAARQKQLEDILVLAKQFHETAEPISDFLSVTEKKLANSEPVGTQTAKIQQQIIRHKALEEDIENHATDVHQAVKIGQSLSSLTSPAEQGVLSEKIDSLQARYSEIQDRCCRKAALLDQALSNARLFGEDEVEVLNWLAEVEDKLSSVFVKDFKQDVLHRQHADHLVFMFPFLLVMLFCYFVILIHVSLHLFFFLHYKHFNFILYTSA

SEQ ID NO: 860527 - protein, 692 aa, Homo sapiens
  misc_feature (33)..(34): Xaa can be any naturally occurring amino acid
  misc_feature (43)..(43): Xaa can be any naturally occurring amino acid
GGGDGRRKRGGGKGGRGRGGGGGFKRGRGGKEXXRGGGGGGGXNQAKKSREISLKEFGCKDQRKPRMSSDAKEFISIINPHNLKGKSLGQVSLTHPYSECDFKLKEVARNNMGNDTNEEQEKAVTKIEIISHMKQSTSCLDSEEIRENQGEVILEVQETYCETSGKLPSEQVLQQPMNARVKSKREKREVIVEESIRTCKPAFLSEEKLYQETAIRDEHDSHIKSQPREMTSSEKGKEADTEMGFSITFKIEESSSQVVPQGISVKHLDALTLFSSKQANEGKVNNLSLCLTLKPEENLSREIACGAQSEPFPCMTPRPEGLHYQESDGKAQVTGPSQISKTDKSFQGTTRQETNYQDSWVTSKTKETKHQISSSNECKEKSYQEVSFDPARGLKLEEITVSRPDSKEVRYLEFSDRKDLHHQGSKSDDKLCGTLKSEIATQELTGEKFLEMANPNVAGLEAGSIEDIVTQRGSRVLGSFLPEKLFKGVSQKENTGQQNAIISPTVLETSEEKTVSLTVCSAVKTEKTPQEKLRESPGSEQTPFMTAPEGKGNGGVNPEPFRATQNVFTRQLCLEHDEKLVSYLSLLRNIEMRTKQIQPLELNLAELQDLLCQAKVLERELKDLTTYVSRAAEPQEQEFGKSAWIRDYSSGGSSRTLDAQDRSFPPQTAELWVQPREAQHQDEELRRIPVWK

SEQ ID NO: 860528 - protein, 5938 aa, Homo sapiens
MQKGLLDQDTGLVLLESQVIMSGLIAPETGENLSLEEGIARNLINPQMYQQLRELQDALALISRLTESRGPLSVVEAIEKRIISETVGLKILEAHLATGGFSLSPSENCINLEEAFHQGLISAWLHSVLESYLRTSKNLIDPNTAEKIGLLDLMQRCIVHQESGFKLLPVKQLAGGMVSLKSGRKVSIFRAVQEGLIDRQVTVRLLEAQLFAGGIVDPRTGHRLTVEEAVRHNLIDQDMACAILIRQLQTGGIIDTVTGQRLTIDEAVSNDLVAAKIALVILESLWSFMGLLWPESGEILPITDALEQGIVSTELAHKILSNRQHIKALFLPATTEILSWKKAIESGILDRDLANNLKSICIPDVMPHMQLADSAEQNINPGAAVLPCSKSHPKATASQSENLLFQLMTHSYINVQNGQRLLLLDKELMETLTSRDEYQTSPPKVVEIGHQRQKTPEGLQESANVKISGTFSSGWTVRLPEFQFSSQNKEYPDREDCTTEKGKKTTVETEDSSVENPEQDLFVEQKERNPNIDALKVINKVKLEVQRQLIGTQREDQTAVSVRENASRGHLLTIPPAEAEGVPLVVDKDVFSVETPKKEHQPLRNTSFTCQNEQAHTLETEYIHDETGGSHIKPQSKKLQVQVKKTLGIKLELKSETDGNVHPLDKKEMLKKTFLAKDDHKESQEAQNIAGGSMMMSEKTDEEDSGREIFLSCSHPLELLEEATLNVLSAQLLDGGIFHEQTGQKLLLNEAISRGIVPSHTAVKLMEKLNMFQGFFDSQTCESLTTEEVINEGLMDEKLLHNVLMADKAISGVLDPRTQTLCSVKDAVTVGLLDKETATRILERQVVTGGIIDLKRGKKVSVTLASTLGLVDVADQPELINLEKASKGRDAEKTVRERLISLQMETTGLIDPDSKAPLTVVQSIDRGLLEREEAVRLLTKQVVDGGIIHHISGMRLSVDNAFRHGLIGEDLAEKLKRVENLNIHQIFNPETKENISLPKAIKLDLITSDLKREIQEVQAFTGNFVDLISGQRLTLAEAKKEGLLTNEAVLSPGMMHGIVDPENCRIVPYSELVKKCKIDIESGQRYLEVIPFSDIKDGVSDKVLTLSQAIQLGKVDFASTLKVLEAQANTGGIIDTATGKRLTLASALEEKLVDENMVRIIASHQVLNGGIVDIFSDQRVTLVEAIEKRLISPELANMIQIDSSEFSDHRAQIEKQEGIEVCALQNEFLGKDMLIACNQTAEMSCNKVEESERLFQVENQSAQEKVKVRVSDGEQAKKSREISLKEFGCKDQRKPRMSSDAKEFISIINPHNLKGKSLGQVSLTHPYSECDFKLKEVARNNMGNDTNEEQEKAVTKIEIISHMKQSTSCLDSEEIRENQGEVILEVQETYCETSGKLPSEQVLQQPMNARVKSKREKREVIVEESIRTCKPAFLSEEKLYQETAIRDEHDSHIKSQPREMTSSEKGKEADTEMGFSITFKIEESSSQVVPQGISVKHLDALTLFSSKQANEGKVNNLSLCLTLKPEENLSREIACGAQSEPFPCMTPRPEGLHYQESDGKAQVTGPSQISKTDKSFQGTTRQETNYQDSWVTSKTKETKHQISSSNECKEKSYQEVSFDPARGLKLEEITVSRPDSKEVRYLEFSDRKDLHHQGSKSDDKLCGTLKSEIATQELTGEKFLEMANPNVAGLEAGSIEDIVTQRGSRVLGSFLPEKLFKGVSQKENTGQQNAIISPTVLETSEEKTVSLTVCSAVKTEKTPQEKLRESPGSEQTPFMTAPEGKGNGGVNPEPFRATQNVFTRQLCLEHDEKLVSYLSLLRNIEMRTKQIQPLELNLAELQDLLCQAKVLERELKDLTTLVSQELECVNQIIISQPQEVPAQLLKALEKDAKNLQKSLSSVSDTWNSRLLHFQNAVEIEKTKVLNQHTQLEGRLQDLRAWVGNKNLILNSKGSNSEIDVDSLNLCLQQYEDLKQPMAERKAQLDALAFDIQFFISEHAQDLSPQQNRQMLRLLNELQRSFQDILEQTAAQVDALQGHLQQMEQEALVKTLQKQQNTCHQQLEDLCSWVGQAERALAGHQGRTTQQDLSALQKNQSDLKDLQDDIQNRATSFATVVKDIEGFMEENQTKLSPRELTALREKLHQAKEQYEALQEETRVAQKELEEAVTSALQQETEKSKAAKELAENKKKIDALLDWVTSVGSSGGQLLTNLPGMEQLSGASLEKGALDTTDGYMGVNQAPEKLDKQCEMMKARHQELLSQQQNFILATQSAQAFLDQHGHNLTPEEQQMLQQKLGELKEQYSTSLAQSEAELKQVQTLQDELQKFLQDHKEFESWLERSEKELENMHKGGSSPETLPSLLKRQGSFSEDVISHKGDLRFVTISGQKVLDMENSFKEGKEPSEIGNLVKDKLKDATERYTALHSKCTRLGSHLNMLLGQYHQFQNSADSLQAWMQACEANVEKLLSDTVASDPGVLQEQLATTKQLQEELAEHQVPVEKLQKVARDIMEIEGEPAPDHRHVQETTDSILSHFQSLSYSLAERSSLLQKAIAQSQSVQESLESLLQSIGEVEQNLEGKQVSSLSSGVIQEALATNMKLKQDIARQKSSLEATREMVTRFMETADSTTAAVLQGKLAEVSQRFEQLCLQQQEKESSLKKLLPQAEMFEHLSGKLQQFMENKSRMLASGNQPDQDITHFFQQIQELNLEMEDQQENLDTLEHLVTELSSCGFALDLCQHQDRVQNLRKDFTELQKTVKEREKDASSCQEQLDEFRKLVRTFQKWLKETEGSIPPTETSMSAKELEKQIEHLKSLLDDWASKGTLVEEINCKGTSLENLIMEITAPDSQGKTGSILPSVGSSVGSVNGYHTCKDLTEIQCDMSDVNLKYEKLGGVLHERQESLQAILNRMEEVHKEANSVLQWLESKEEVLKSMDAMSSPTKTETVKAQAESNKAFLAELEQNSPKIQKVKEALAGLLVTYPNSQEAENWKKIQEELNSRWERATEVTVARQRQLEESASHLACFQAAESQLRPWLMEKELMMGVLGPLSIDPNMLNAQKQQVQFMLKEFEARRQQHEQLNEAAQGILTGPGDVSLSTSQVQKELQSINQKWVELTDKLNSRSSQIDQAIVKSTQYQELLQDLSEKVRAVGQRLSVQSAISTQPEAVKQQLEETSEIRSDLEQLDHEVKEAQTLCDELSVLIGEQYLKDELKKRLETVALPLQGLEDLAADRINRLQAALASTQQFQQMFDELRTWLDDKQSQQAKNCPISAKLERLQSQLQENEEFQKSLNQHSGSYEVIVAEGESLLLSVPPGEEKRTLQNQLVELKNHWEELSKKTADRQSRLKDCMQKAQKYQWHVEDLVPWIEDCKAKMSELRVTLDPVQLESSLLRSKAMLNEVEKRRSLLEILNSAADILINSSEADEDGIRDEKAGINQNMDAVTEELQAKTGSLEEMTQRLREFQESFKNIEKKVEGAKHQLEIFDALGSQACSNKNLEKLRAQQEVLQALEPQVDYLRNFTQGLVEDAPDGSDASQLLHQAEVAQQEFLEVKQRVNSGCVMMENKLEGIGQFHCRVREMFSQLADLDDELDGMGAIGRDTDSLQSQIEDVRLFLNKIHVLKLDIEASEAECRHMLEEEGTLDLLGLKRELEALNKQCGKLTERGKARQEQLELTLGRVEDFYRKLKGLNDATTAAEEAEALQWVVGTEVEIINQQLADFKMFQKEQVDPLQMKLQQVNGLGQGLIQSAGKDCDVQGLEHDMEEINARWNTLNKKVAQRIAQLQEALLHCGKFQDALEPLLSWLADTEELIANQKPPSAEYKVVKAQIQEQKLLQRLLDDRKATVDMLQAEGGRIAQSAELADREKITGQLESLESRWTELLSKAAARQKQLEDILVLAKQFHETAEPISDFLSVTEKKLANSEPVGTQTAKIQQQIIRHKALEEDIENHATDVHQAVKIGQSLSSLTSPAEQGVLSEKIDSLQARYSEIQDRCCRKAALLDQALSNARLFGEDEVEVLNWLAEVEDKLSSVFVKDFKQDVLHRQHADHLALNEEIVNRKKNVDQAIKNGQALLKQTTGEEVLLIQEKLDGIKTRYADITVTSSKALRTLEQARQLATKFQSTYEELTGWLREVEEELATSGGQSPTGEQIPQFQQRQKELKKEVMEHRLVLDTVNEVSRALLELVPWRAREGLDKLVSDANEQYKLVSDTIGQRVDEIDAAIQRSQQYEQAADAELAWVAETKRKLMALGPIRLEQDQTTAQLQVQKAFSIDIIRHKDSMDELFSHRSEIFGTCGEEQKTVLQEKTESLIQQYEAISLLNSERYARLERAQVLVNQFWETYEELSPWIEETRALIAQLPSPAIDHEQLRQQQEEMRQLRESIAEHKPHIDKLLKIGPQLKELNPEEGEMVEEKYQKAENMYAQIKEEVRQRALALDEAVSQSTQITEFHDKIEPMLETLENLSSRLRMPPLIPAEVDKIRECISDNKSATVELEKLQPSFEALKRRGEELIGRSQGADKDLAAKEIQDKLDQMVFFWEDIKARAEEREIKFLDVLELAEKFWYDMAALLTTIKDTQDIVHDLESPGIDPSIIKQQVEAAETIKEETDGLHEELEFIRILGADLIFACGETEKPEVRKSIDEMNNAWENLNKTWKERLEKLEDAMQAAVQYQDTLQAMFDWLDNTVIKLCTMPPVGTDLNTVKDQLNEMKEFKVEVYQQQIEMEKLNHQGELMLKKATDETDRDIIREPLTELKHLWENLGEKIAHRQHKLEGALLALGQFQHALEELMSWLTHTEELLDAQRPISGDPKVIEVELAKHHVLKNDVLAHQATVETVNKAGNELLESSAGDDASSLRSRLEAMNQCWESVLQKTEEREQQLQSTLQQAQGFHSEIEDFLLELTRMESQLSASKPTGGLPETAREQLDTHMELYSQLKAKEETYNQLLDKGRLMLLSRDDSGSGSKTEQSVALLEQKWHVVSSKMEERKSKLEEALNLATEFQNSLQEFINWLTLAEQSLNIASPPSLILNTVLSQIEEHKVFANEVNAHRDQIIELDQTGNQLKFLSQKQDVVLIKNLLVSVQSRWEKVVQRSIERGRSLDDARKRAKQFHEAWKKLIDWLEDAESHLDSELEISNDPDKIKLQLSKHKEFQKTLGGKQPVYDTTIRTGRALKEKTLLPEDTQKLDNFLGEVRDKWDTVCGKSVERQHKLEEALLFSGQFMDALQALVDWLYKVEPQLAEDQPVHGDLDLVMNLMDAHKVFQKELGKRTGTVQVLKRSGRELIENSRDDTTWVKGQLQELSTRWDTVCKLSVSKQSRLEQALKQAEVFRDTVHMLLEWLSEAEQTLRFRGALPDDTEALQSLIDTHKEFMKKVEEKRVDVNSAVAMGEVILAVCHPDCITTIKHWITIIRARFEEVLTWAKQHQQRLETALSELVANAELLEELLAWIQWAETTLIQRDQEPIPQNIDRVKALIAEHQTFMEEMTRKQPDVDRVTKTYKRKNIEPTHAPFIEKSRSGGRKSLSQPTPPPMPILSQSEAKNPRINQLSARWQQVWLLALERQRKLNDALDRLEELKEFANFDFDVWRKKYMRWMNHKKSRVMDFFRRIDKDQDGKITRQEFIDGILASKFPTTKLEMTAVADIFDRDGDGYIDYYEFVAALHPNKDAYRPTTDADKIEDEVTRQVAQCKCAKRFQVEQIGENKYRFFLGNQFGDSQQLRLVRILRSTVMVRVGGGWMALDEFLVKNDPCRARGRTNIELREKFILPEGASQGMTPFRSRGRRSKPSSRAASPTRSSSSASQSNHSCTSMPSSPATPASGTKVIPSSGSKLKRPTPTFHSSRTSLAGDTSNSSSPASTGAKTNRADPKKSASRPGSRAGSRAGSRASSRRGSDASDFDLLETQSACSDTSESSAAGGQGNSRRGLNKPSKIPTMSKKTTTASPRTPGPKR

SEQ ID NO: 860529 - protein, 673 aa, Homo sapiens
MEGARARGAQLRLGERVRPVGRRSAPGRSRFRQPWRPGASDSAPPAGTMAQSRVLLLLLLLPPQLHLGPVLAVRAPGFGRSGGHSLSPEENEFAEEEPVLVLSPEEPGPGPAAVSCPRDCACSQEGVVDCGGIDLREFPGDLPEHTNHLSLQNNQLEKIYPEELSRLHRLETLNLQNNRLTSRGLPEKAFEHLTNLNYLYLANNKLTLDPRFLPNALISVDFAANYLTKIYGLTFGQKPNLRSVYLHNNKLADAGLPDNMFNGSSNVEVLILSSNFLRHVPKHLPPALYKLHLKNNKLEKIPPGAFSELSSLRELYLQNNYLTDEGLDNETFWKLSSLEYLDLSSNNLSRVPAGLPRSLVLLHLEKNAIRSVDANVLTPIRSLEYLLLHSNQLREQGIHPLAFQGLKRLHTVHLYNNALERVPSGLPRRVRTLMILHNQITGIGREDFATTYFLEELNLSYNRITSPQVHRDAFRKLRLLRSLDLSGNRLHTLPPGLPRNVHVLKVKRNELAALARGALAGMAQLRELYLTSNRLRSRALGPRAWVDLAHLQVGVPDSLWSPLQLLDIAGNQLTEIPEGLPESLEYLYLQNNKISAVPANAFDSTPNLKGIFLRFNKLAVGSVVDSAFRRLKHLQVLDIEGNLEFGDISKDRGRLGKEKEEEEEEEEEEEETR

SEQ ID NO: 860530 - protein, 390 aa, Homo sapiens
MPHISDAHKAKNNKLEKIPPGAFSELSSLRELYLQNNYLTDEGLDNETFWKLSSLEYLDLSSNNLSRVPAGLPRSLVLLHLEKNAIRSVDANVLTPIRSLEYLLLHSNQLREQGIHPLAFQGLKRLHTVHLYNNALERVPSGLPRRVRTLMILHNQITGIGREDFATTYFLEELNLSYNRITSPQVHRDAFRKLRLLRSLDLSGNRLHTLPPGLPRNVHVLKVKRNELAALARGALAGMAQLRELYLTSNRLRSRALGPRAWVDLAHLQVGVPDSLWSPLQLLDIAGNQLTEIPEGLPESLEYLYLQNNKISAVPANAFDSTPNLKGIFLRFNKLAVGSVVDSAFRRLKHLQVLDIEGNLEFGDISKDRGRLGKEKEEEEEEEEEEEETR

SEQ ID NO: 860531 - protein, 184 aa, Homo sapiens
  misc_feature (12)..(12): Xaa can be any naturally occurring amino acid
  misc_feature (19)..(19): Xaa can be any naturally occurring amino acid
  misc_feature (21)..(21): Xaa can be any naturally occurring amino acid
LFQKGGWQVLPXCTTHTFXTXSLEPTMHLLGKQGKTHTTHTHMHKSCANSPPKPMPQTALAPARISHSSSPSALSICPSVPWRRHKGIHALWPGACHPLELTKAGFYSFPILWGQEPSGLLAWPGPPCSSRCWAVTLLRVPPCHALAGHRHFSNGQAQWRQDGRAPWVLLGPWGRSEAEVMGLG

SEQ ID NO: 860532 - protein, 673 aa, Homo sapiens; identical to SEQ ID NO: 860529

SEQ ID NO: 860533 - protein, 635 aa, Homo sapiens
MEGARARGAQLRLGERVRPVGRRSAPGRSRFRQPWRPGASDSAPPAGTMAQSRVLLLLLLLPPQLHLGPVLAVRAPGFGRSGGHSLSPEENEFAEEEPVLVLSPEEPGPGPAAVSCPRDCACSQEGVVDCGGIDLREFPGDLPEHTNHLSLQNNQLEKIYPEELSRLHRLETLNLQNNRLTSRGLPEKAFEHLTNLNYLYLANNKLTLDPRFLPNALISVDFAANYLTKIYGLTFGQKPNLRSVYLHNNKLADAGLPDNMFNGSSNVEVLILSSNFLRHVPKHLPPALYKLHLKNNKLEKIPPGAFSELSSLRELYLQNNYLTDEGLDNETFWKLSSLEYLDLSSNNLSRVPAGLPRSLVLLHLEKNAIRSVDANVLTPIRSLEYLLLHSNQLREQGIHPLAFQGLKRLHTVHLYNNALERVPSGLPRRVRTLMILHNQITGIGREDFATTYFLEELNLSYNRITSPQVHRDAFRKLRLLRSLDLSGNRLHTLPPGLPRNVHVLKVKRNELAALARGALAGMAQLRELYLTSNRLRSRALGPRAWVDLAHLQNNKISAVPANAFDSTPNLKGIFLRFNKLAVGSVVDSAFRRLKHLQVLDIEGNLEFGDISKDRGRLGKEKEEEEEEEEEEEETR

SEQ ID NO: 860534 - protein, 142 aa, Homo sapiens
MHKSCANSPPKPMPQTALAPARISHSSSPSALSICPSVPWRRHKGIHALWPGACHPLELTKAGFYSFPILWGQEPSGLLAWPGPPCSSRCWAVTLLRVPPCHALAGHRHFSNGQAQWRQDGRAPWVLLGPWGRSEAEVMGLG

SEQ ID NO: 860535 - protein, 124 aa, Homo sapiens
MEGARARGAQLRLGERVRPVGRRSAPGRSRFRQPWRPGASDSAPPAGTMAQSRVLLLLLLLPPQLHLGPVLAVRAPGFGRSGGHSLSPEENEFAEEEPVLVLSPEEPGPGLAHPAPPGAGQSLC

SEQ ID NO: 860536 - protein, 149 aa, Homo sapiens
MRYNEKELQALSRQPAEMAAELGMRGPKKGSVLKRRLVKLVVNFLFYFRTDEAEPVGALLLERCRVVREEPGTFSISFIEDPERKYHFECSSEEQCQEWMEALRRASYEFMRRSLIFYRNEIRKVTGKDPLEQFGISEEARFQLSGLQA

SEQ ID NO: 860537 - protein, 135 aa, Homo sapiens
AVDSKTAVGVKGRGMKAAGVRGMKPVQDSGDTLVDMAYYTGHTHKDYSPWAWAFGNTQDILDRWDRVVPAPVEEELSQAFVMELAQQSQPPLEMEQQQKELDLLEAQVVEAWVWAGAAFYETAQQAALPGAPGST

SEQ ID NO: 860538 - protein, 149 aa, Homo sapiens; identical to SEQ ID NO: 860536

SEQ ID NO: 860539 - protein, 82 aa, Homo sapiens
DTLRATLSLPPPAPGRSRKGCQPSLGCLDSVPPWSGLFQFNGYVTTVRLSYQPVPRPRQQPRVASATQRRRAAWLAQGAQAH

SEQ ID NO: 860540 - protein, 174 aa, Homo sapiens
MRYNEKELQALSRQPAEMAAELGMRGPKKGSVLKRRLVKLVVNFLFYFRTDEAEPVGALLLERCRVVREEPGTFSISFIEDPERKYHFECSSEEQCQEWMEALRRASYEFMRRSLIFYRNEIRKVTGKVCAGLQRAGVGLQVAEAVLQPWLMATRPPHRTPWNSSAYPRRPGSS

SEQ ID NO: 860541 - protein, 241 aa, Homo sapiens
LVEASPCPPCITSVPTFPLLHRRQAEFRAHPDNPFLLHFIILFAYFLRQGLGMSPRLECSGAISAPCNFPLSGSSDSPASASRVAGTTGTRHHAQLIFVFLVETGFRHIGQAALELLTSGDPPTSASQSAGITVLSHRTRPSLFLRQDLLFPRLECSGVITAHCSLNPLGSSSPPTSDSGVAGPTRPHHHTWLIFVFVEMGILPCHPGWSRTPELKQSSHLGLSKRWDYRHEPPHLATTSF

SEQ ID NO: 860542 - protein, 142 aa, Homo sapiens
MAGPRCAGALALGVLPCLRPEDIFGAGPSLSGDGGREGAARVPVPRGAMRYNEKELQALSRQPAEMAAELGMRGPKKGSVLKRRLVKLVVNFLFYFRTDEAEPVGALLLERCRVVREEPGTFSITTSSCGEASSSTGTKSGR

SEQ ID NO: 860543 - protein, 149 aa, Homo sapiens; identical to SEQ ID NO: 860536

SEQ ID NO: 860544 - protein, 277 aa, Homo sapiens
MRYNEKELQALSRQPAEMAAELGMRGPKKGSVLKRRLVKLVVNFLFYFRTDEAEPVGALLLERCRVVREEPGTFSISFIEDPERKYHFECSSEEQCQEWMEALRRASYEFMRRSLIFYRNEIRKVTGKKHQGTHDRPAPHRRACCEPWTAEKYKSKCTCSTCPRRPHSTIAQHMASCVTAQAPSHARAQPTPRRVNSLGVHSAGVKVKSSGQAPGRSGRGSGRGEASEECGGDGPAFGTGAARRGSRPGGVSENGVRRCQRLVSTKRVEAGAGLGTR

SEQ ID NO: 860545 - protein, 65 aa, Homo sapiens
MRYNEKELQALSRQPAEMAAELGMRGPKKGSVSGTRETETVPGAGGRGRGLGGGAGGRSPGRGAG

SEQ ID NO: 860546 - protein, 241 aa, Homo sapiens; identical to SEQ ID NO: 860541

SEQ ID NO: 860547 - protein, 149 aa, Homo sapiens; identical to SEQ ID NO: 860536

SEQ ID NO: 860548 - protein, 149 aa, Homo sapiens; identical to SEQ ID NO: 860536

SEQ ID NO: 860549 - protein, 122 aa, Homo sapiens
MARGSCLWLWVGPTTGVPSPGFIEDPERKYHFECSSEEQCQEWMEALRRARWGQAVVGTAGVGTAAMQSGHLTPCHPFPQLRVHAEKPHLLQERNPEGDGQGVCRAAEGRGGAAGGRGSPPA

SEQ ID NO: 860550 - protein, 102 aa, Homo sapiens
SWLWRTDPACLLSSVSICHSGMATKCSSPWCMPGSFAHSIPQIAWTREHTPGGHVTGRRLVQRAVQGECAKTGHLLGRRPIARKEVIFLSGHSLFLYTRALQ

SEQ ID NO: 860551 - protein, 872 aa, Homo sapiens
RARGSERRRQRRKRRGRRASGSEVVEAAEAAAEAAAARDWARLEAARVRAPQQAPISRLDHPPAARTPGPRSLCPGSDPGAQPGAVTLRRRRRGRAGPGWGAVALDPRLPDRWREMSNPGTRRNGSSIKIRLTVLCAKNLAKKDFFRLPDPFAKIVVDGSGQCHSTDTVKNTLDPKWNQHYDLYVGKTDSITISVWNHKKIHKKQGAGFLGCVRLLSNAISRLKDTGYQRLDLCKLNPSDTDAVRGQIVVSLQTRDRIGTGGSVVDCRGLLENEGTVYEDSGPGRPLSCFMEEPAPYTDSTGAAAGGGNCRFVESPSQDQRLQAQRLRNPDVRGSLQTPQNRPHGHQSPELPEGYEQRTTVQGQVYFLHTQTGVSTWHDPRIPSPSGTIPGGDAAFLYEFLLQGHTSEPRDLNSVNCDELGPLPPGWEVRSTVSGRIYFVDHNNRTTQFTDPRLHHIMNHQCQLKEPSQPLPLPSEGSLEDEELPAQRYERDLVQKLKVLRHELSLQQPQAGHCRIEVSREEIFEESYRQIMKMRPKDLKKRLMVKFRGEEGLDYGGVAREWLYLLCHEMLNPYYGLFQYSTDNIYMLQINPDSSINPDHLSYFHFVGRIMGLAVFHGHYINGGFTVPFYKQLLGKPIQLSDLESVDPELHKSLVWILENDITPVLDHTFCVEHNAFGRILQHELKPNGRNVPVTEENKKEYVRLYVNWRFMRGIEAQFLALQKGFNELIPQHLLKPFDQKELELIIGGLDKIDLNDWKSNTRLKHCVADSNIVRWFWQAVETFDEERRARLLQFVTGSTRVPLQGFKALQGSTGAAGPRLFTIHLIDANTDNLPKAHTCFNRIDIPPYESYEKLYEKLLTAVEETCGFAVE

SEQ ID NO: 860552 - protein, 93 aa, Homo sapiens
SGTLFPRSLGTARDSHIGRHHADKFVFSGAPYQDHLSYFHFVGRIMGLAVFHGHYINGGFTVPFYKQLLGKPIQLSDLESVDPELHKSLVWIL

SEQ ID NO: 860553 - protein, 846 aa, Homo sapiens
RARGSERRRQRRKRRGRRASGSEVVEAAEAAAEAAAARDWARLEAARVRAPQQAPISRLDHPPAARTPGPRSLCPGSDPGAQPGAVTLRRRRRGRAGPGWGAVALDPRLPDRWREMSNPGTRRNGSSIKIRLTVLCAKNLAKKDFFRLPDPFAKIVVDGSGQCHSTDTVKNTLDPKWNQHYDLYVGKTDSITISVWNHKKIHKKQGAGFLGCVRLLSNAISRLKDTGYQRLDLCKLNPSDTDAVRGQIVVSLQTRDRIGTGGSVVDCRGLLENEGTVYEDSGPGRPLSCFMEEPAPYTDSTGAAAGGGNCRFVESPSQDQRLQAQRLRNPDVRGSLQTPQNRPHGHQSPELPEGYEQRTTVQGQVYFLHTQTGVSTWHDPRIPRDLNSVNCDELGPLPPGWEVRSTVSGRIYFVDHNNRTTQFTDPRLHHIMNHQCQLKEPSQPLPLPSEGSLEDEELPAQRYERDLVQKLKVLRHELSLQQPQAGHCRIEVSREEIFEESYRQIMKMRPKDLKKRLMVKFRGEEGLDYGGVAREWLYLLCHEMLNPYYGLFQYSTDNIYMLQINPDSSINPDHLSYFHFVGRIMGLAVFHGHYINGGFTVPFYKQLLGKPIQLSDLESVDPELHKSLVWILENDITPVLDHTFCVEHNAFGRILQHELKPNGRNVPVTEENKKEYVRLYVNWRFMRGIEAQFLALQKGFNELIPQHLLKPFDQKELELIIGGLDKIDLNDWKSNTRLKHCVADSNIVRWFWQAVETFDEERRARLLQFVTGSTRVPLQGFKALQGSTGAAGPRLFTIHLIDANTDNLPKAHTCFNRIDIPPYESYEKLYEKLLTAVEETCGFAVE

SEQ ID NO: 860554 - protein, 717 aa, Homo sapiens
MGLPVLCAKNLAKKDFFRLPDPFAKIVVDGSGQCHSTDTVKNTLDPKWNQHYDLYVGKTDSITISVWNHKKIHKKQGAGFLGCVRLLSNAISRLKDTGYQRLDLCKLNPSDTDAVRGQIVVSLQTRDRIGTGGSVVDCRGLLENEGTVYEDSGPGRPLSCFMEEPAPYTDSTGAAAGGGNCRFVESPSQDQRLQAQRLRNPDVRGSLQTPQNRPHGHQSPELPEGYEQRTTVQGQVYFLHTQTGVSTWHDPRIPRDLNSVNCDELGPLPPGWEVRSTVSGRIYFVDHNNRTTQFTDPRLHHIMNHQCQLKEPSQPLPLPSEGSLEDEELPAQRYERDLVQKLKVLRHELSLQQPQAGHCRIEVSREEIFEESYRQIMKMRPKDLKKRLMVKFRGEEGLDYGGVAREWLYLLCHEMLNPYYGLFQYSTDNIYMLQINPDSSINPDHLSYFHFVGRIMGLAVFHGHYINGGFTVPFYKQLLGKPIQLSDLESVDPELHKSLVWILENDITPVLDHTFCVEHNAFGRILQHELKPNGRNVPVTEENKKEYVRLYVNWRFMRGIEAQFLALQKGFNELIPQHLLKPFDQKELELIIGGLDKIDLNDWKSNTRLKHCVADSNIVRWFWQAVETFDEERRARLLQFVTGSTRVPLQGFKALQGSTGAAGPRLFTIHLIDANTDNLPKAHTCFNRIDIPPYESYEKLYEKLLTAVEETCGFAVE

SEQ ID NO: 860555 - protein, 846 aa, Homo sapiens; identical to SEQ ID NO: 860553

SEQ ID NO: 860556 - protein, 111 aa, Homo sapiens [sequence omitted]

SEQ ID NO: 860557 - protein, 156 aa, Homo sapiens
RARGSERRRQRRKRRGRRASGSEVVEAAEAAAEAAAARDWARLEAARVRAPQQAPISRLDHPPAARTPGPRSLCPGSDPGAQPGAVTLRRRRRGRAGPGWGAVALDPRLPDRWREMSNPGTRRNGSSIKIRLTELVRFFHLFNPRADHEVKSRRLQ

SEQ ID NO: 860558 - protein, 664 aa, Homo sapiens
MLCAKNLAKKDFFRLPDPFAKIVVDGSGQCHSTDTVKNTLDPKWNQHYDLYVGKTDSITISVWNHKKIHKKQGAGFLGCVRLLSNAISRLKDTGYQRLDLCKLNPSDTDAVRGQIVVSLQTRDRIGTGGSVVDCRGLLENEGTVYEDSGPGRPLSCFMEEPAPYTDSTGAAAGGGNCRFVESPSQDQRLQAQRLRNPDVRGSLQTPQNRPHGHQSPELPEGYEQRTTVQGQVYFLHTQTGVSTWHDPRIPRDLNSVNCDELGPLPPGWEVRSTVSGRIYFVDHNNRTTQFTDPRLHHIMNHQCQLKEPSQPLPLPSEGSLEDEELPAQRYERDLVQKLKVLRHELSLQQPQAGHCRIEVSREEIFEESYRQIMKMRPKDLKKRLMVKFRGEEGLDYGGVAREWLYLLCHEMLNPYYGLFQYSTDNIYMLQINPDSSINPDHLSYFHFVGRIMGLAVFHGHYINGGFTVPFYKQLLGKPIQLSDLESVDPELHKSLVWILENDITPVLDHTFCVEHNAFGRILQHELKPNGRNVPVTEENKKEYVRLYVNWRFMRGIEAQFLALQKGFNELIPQHLLKPFDQKELELIIGGLDKIDLNDWKSNTRLKHCVADSNIVRWFWQAVETFDEERRARLLQFVTGSTRVPLQGFKALQGSTAGALPRLVD

SEQ ID NO: 860559 - protein, 142 aa, Homo sapiens
MKERCMKTPGLGGRSAASWRNQPLTQIAPVLLLEEGIAGSWSPQVKIKDFRHSGFETLMCEVHYRRPRTDHTATSPRNCPKATNKEQQSRAKFTFCIHRLELARGTTPGYQVPRGPFLGEMQLFYTNSFYKAIHLSPETLTV

SEQ ID NO: 860560 - protein, 499 aa, Homo sapiens
MLCAKNLAKKDFFRLPDPFAKIVVDGSGQCHSTDTVKNTLDPKWNQHYDLYVGKTDSITISVWNHKKIHKKQGAGFLGCVRLLSNAISRLKDTGYQRLDLCKLNPSDTDAVRGQIVVSLQTRDRIGTGGSVVDCRGLLENEGTVYEDSGPGRPLSCFMEEPAPYTDSTGAAAGGGNCRFVESPSQDQRLQAQRLRNPDVRGSLQTPQNRPHGHQSPELPEGYEQRTTVQGQVYFLHTQTGVSTWHDPRIPRDLNSVNCDELGPLPPGWEVRSTVSGRIYFVDHNNRTTQFTDPRLHHIMNHQCQLKEPSQPLPLPSEGSLEDEELPAQRYERDLVQKLKVLRHELSLQQPQAGHCRIEVSREEIFEESYRQIMKMRPKDLKKRLMVKFRGEEGLDYGGVAREWLYLLCHEMLNPYYGLFQYSTDNIYMLQINPDSSINPDHLSYFHFVGRIMGLAVFHGHYINGGFTVPFYKQLLGKPIQLSDLESVDPELHKSLVWIL

SEQ ID NO: 860561 - protein, 713 aa, Homo sapiens
MLCAKNLAKKDFFRLPDPFAKIVVDGSGQCHSTDTVKNTLDPKWNQHYDLYVGKTDSITISVWNHKKIHKKQGAGFLGCVRLLSNAISRLKDTGYQRLDLCKLNPSDTDAVRGQIVVSLQTRDRIGTGGSVVDCRGLLENEGTVYEDSGPGRPLSCFMEEPAPYTDSTGAAAGGGNCRFVESPSQDQRLQAQRLRNPDVRGSLQTPQNRPHGHQSPELPEGYEQRTTVQGQVYFLHTQTGVSTWHDPRIPRDLNSVNCDELGPLPPGWEVRSTVSGRIYFVDHNNRTTQFTDPRLHHIMNHQCQLKEPSQPLPLPSEGSLEDEELPAQRYERDLVQKLKVLRHELSLQQPQAGHCRIEVSREEIFEESYRQIMKMRPKDLKKRLMVKFRGEEGLDYGGVAREWLYLLCHEMLNPYYGLFQYSTDNIYMLQINPDSSINPDHLSYFHFVGRIMGLAVFHGHYINGGFTVPFYKQLLGKPIQLSDLESVDPELHKSLVWILENDITPVLDHTFCVEHNAFGRILQHELKPNGRNVPVTEENKKEYVRLYVNWRFMRGIEAQFLALQKGFNELIPQHLLKPFDQKELELIIGGLDKIDLNDWKSNTRLKHCVADSNIVRWFWQAVETFDEERRARLLQFVTGSTRVPLQGFKALQGSTGAAGPRLFTIHLIDANTDNLPKAHTCFNRIDIPPYESYEKLYEKLLTAVEETCGFAVE

SEQ ID NO: 860562 - protein, 161 aa, Homo sapiens [sequence omitted]

SEQ ID NO: 860563 - protein, 111 aa, Homo sapiens [sequence omitted]

SEQ ID NO: 860564 - protein, 846 aa, Homo sapiens; identical to SEQ ID NO: 860553

SEQ ID NO: 860565 - protein, 846 aa, Homo sapiens; identical to SEQ ID NO: 860553

SEQ ID NO: 860566 - protein, 156 aa, Homo sapiens; identical to SEQ ID NO: 860557

SEQ ID NO: 860567 - protein, 125 aa, Homo sapiens
MEPDGTYEPGFVGIRFCQECNNMLYPKEDKENRILLYACRNCDYQQEADNSCIYVNKITHEVDELTQIIADVSQDPTLPRTEDHPCQKCGHKEAVFFQSHSARAEDAMRLYYVCTAPHCGHRWTE

SEQ ID NO: 860568 - protein, 103 aa, Homo sapiens
MLYPKEDKENRILLYACRNCDYQQEADNSCIYVNKITHEVDELTQIIADVSQDPTLPRTEDHPCQKCGHKEAVFFQSHSARAEDAMRLYYVCTAPHCGHRWTE

SEQ ID NO: 860569 - protein, 134 aa, Homo sapiens
MEPDGTYEPGFVGIRFCQECNNMLYPKEDKENRILLYACRNCDYQQEADNSCIYVNKITHEVDELTQIIADVSQDPTLPRTEDHPCQKLSVQLVLGRCGHKEAVFFQSHSARAEDAMRLYYVCTAPHCGHRWTE

SEQ ID NO: 860570 - protein, 207 aa, Homo sapiens
MEPDGTYEPGFVGIRFCQECNNMLYPKEDKENRILLYAVSAGVFPGRSTCSQRGPALPPASVMDSLFALRCTSSDPDSHVLPIPKESPVVISSGITLPSPPNLVWNPSVTPFPPHSPSRECRNCDYQQEADNSCIYVNKITHEVDELTQIIADVSQDPTLPRTEDHPCQKCGHKEAVFFQSHSARAEDAMRLYYVCTAPHCGHRWTE

SEQ ID NO: 860571 - protein, 87 aa, Homo sapiens
ANPEGPSIVHGSSNSGPGKDQNRRRRLKPGGRSGKSSPSPRRVNSRMRTGLQPSQAPWLLSWMLSVLRFTMRIVFPALAPDPYYSVN

SEQ ID NO: 860572 - protein, 125 aa, Homo sapiens; identical to SEQ ID NO: 860567

SEQ ID NO: 860573 - protein, 125 aa, Homo sapiens; identical to SEQ ID NO: 860567

SEQ ID NO: 860574 - protein, 87 aa, Homo sapiens; identical to SEQ ID NO: 860571

SEQ ID NO: 860575 - protein, 103 aa, Homo sapiens; identical to SEQ ID NO: 860568

SEQ ID NO: 860576 - protein, 143 aa, Homo sapiens
MDRARHSGSRSGCRRGRVARTQIVEAEDAATVVPPDAREGLQEAAPDTLCATGSLVPSDFPLPPGPTSGCGCRPSPTHAGGSRPFALPAASACYGPGKHLGIPFLHRDPSQLKLIHSCGSTMQLTQILSKQSSQVGDPQESLH

SEQ ID NO: 860577 - protein, 143 aa, Homo sapiens; identical to SEQ ID NO: 860576

SEQ ID NO: 860578 - protein, 169 aa, Homo sapiens
MDRARHSGSRSGCRRGRVARTQIVEAEDAATVVPPDAREGLQEAAPDTLCATGSLVPSDFPLPPGPTSGCGCRPSPTHAGGSRPFALPAASACYGPGKHLGIPFLHRDPSQASARLTVPESSKHALGLGPGRYIWEGLKLIHSCGSTMQLTQILSKQSSQVGDPQESLH

SEQ ID NO: 860579 - protein, 143 aa, Homo sapiens; identical to SEQ ID NO: 860576

SEQ ID NO: 860580 - protein, 143 aa, Homo sapiens; identical to SEQ ID NO: 860576

SEQ ID NO: 860581 - protein, 143 aa, Homo sapiens; identical to SEQ ID NO: 860576

SEQ ID NO: 860582 - protein, 143 aa, Homo sapiens; identical to SEQ ID NO: 860576

SEQ ID NO: 860583 - protein, 143 aa, Homo sapiens; identical to SEQ ID NO: 860576

SEQ ID NO: 860584 - protein, 143 aa, Homo sapiens; identical to SEQ ID NO: 860576

SEQ ID NO: 860585 - protein, 143 aa, Homo sapiens; identical to SEQ ID NO: 860576

SEQ ID NO: 860586 - protein, 198 aa, Homo sapiens
MDRARHSGSRSGCRRGRVARTQIVEAEDAATVVPPDAREGLQEAAPDTLCATGSLVPSDFPLPPGPTSGCGCRPSPTHAGGSRPFALPAASACYGPGKHLGIPFLHRDPSQASARLTVPESSKHALGLGPGRYIWEGVGGWVDRRGRIVSTLSQVAEASETFPSWIWGQRSAVKADTFLWVNYATNSDFEVNNKSLYL

SEQ ID NO: 860587 - protein, 165 aa, Homo sapiens
KSKQKSAVEVEPSWRTSTKAVQRRNVRLEPPHRVPTGALGSGAVRRGPPFSRPQNGRSTNSLHRALGKAPGTQRQPMKTATGAVPCRTTGVELPRTLGVHPLHQCSLDVRHGVKGDYFGALTFNDCSTGFQICMGLAASLFWQIFPIWKGSIYPMPVPPLYLGSN

SEQ ID NO: 860588 - protein, 85 aa, Homo sapiens
LQLRVRNPGVDYYYYNVGGVDPNLGHISTSMLLRHDSSASYVYRYFATVPPLRCAGEGGVTVSCVGALRDICCVLLLGCFSPHVQ

SEQ ID NO: 860589 - protein, 240 aa, Homo sapiens
MDRARHSGSRSGCRRGRVARTQIVEAEDAATVVPPDAREGLQEAAPDTLCATGSLVPSDFPLPPGPTSGCGCRPSPTHAGGSRPFALPAASACYGPGKHLGIPFLHRDPSQASARLTVPESSKHALGLGPGRYIWEGVGGWVDRRGRIVSTLSQVAEASETFPSWIWGQRSAGIDKITLFAIPLGAQMRIESEKNGTWALGVGGGESRTPCALFLRRLEKKLFKMSDRPYSVQSSLKSFT

SEQ ID NO: 860590 - protein, 143 aa, Homo sapiens; identical to SEQ ID NO: 860576

SEQ ID NO: 860591 - protein, 160 aa, Homo sapiens
MDRARHSGSRSGCRRGRVARTQIVEAEDAATVVPPDAREGLQEAAPDTLCATGSLVPSDFPLPPGPTSGCGCRPSPTHAGGSRPFALPAASACYGPGKHLGIPFLHRDPSQLRPPKPSLAGFGDRGALLKLIHSCGSTMQLTQILSKQSSQVGDPQESLH

SEQ ID NO: 860592 - protein, 143 aa, Homo sapiens; identical to SEQ ID NO: 860576

SEQ ID NO: 860593 - protein, 143 aa, Homo sapiens; identical to SEQ ID NO: 860576

SEQ ID NO: 860594 - protein, 143 aa, Homo sapiens; identical to SEQ ID NO: 860576

SEQ ID NO: 860595 - protein, 143 aa, Homo sapiens; identical to SEQ ID NO: 860576

SEQ ID NO: 860596 - protein, 143 aa, Homo sapiens; identical to SEQ ID NO: 860576

SEQ ID NO: 860597 - protein, 143 aa, Homo sapiens; identical to SEQ ID NO: 860576

SEQ ID NO: 860598 - protein, 81 aa, Homo sapiens
GGGREGRRPPEGLQIPATASAVAGLAVPCGSGGDGGLGGGGGCCCGGDGGAAMRRERGQTQPDSGIRALQNTHHIAPEVAW

SEQ ID NO: 860599 - protein, 1196 aa, Homo sapiens
MASVWKRLQRVGKHASKFQFVASYQELMVECTKKWQPDKLVVVWTRRSRRKSSKAHSWQPGIKNPYRGVVVWPVPENIEITVTLFKDPHAEEFEDKEWTFVIENESPSGRRKALATSSINMKQYASPMPTQTDVKLKFKPLSKKVVSAALQFSLSCIFLREGKATDEDMQSLASLMSMKQADIGNLDDFEEDNEDDDENRVNQEEKAAKITELINKLNFLDEAEKDLATVNSNPFDDPDAAELNPFGDPDSEEPITETASPRKTEDSFYNNSYNPFKEVQTPQYLNPFDEPEAFVTIKDSPPQSTKRKNIRPVDMSKYLYADSSKTEEEELDESNPFYEPKSTPPPNNLVNPVQELETERRVKRKAPAPPVLSPKTGVLNENTVSAGKDLSTSPKPSPIPSPVLGRKPNASQSLLVWCKEVTKNYRGVKITNFTTSWRNGLSFCAILHHFRPDLIDYKSLNPQDIKENNKKAYDGFASIGISRLLEPSDMVLLAIPDKLTVMTYLYQIRAHFSGQELNVVQIEENSSKSTYKVGNYETDTNSSVDQEKFYAELSDLKREPELQQPISGAVDFLSQDDSVFVNDSGVGESESEHQTPDDHLSPSTASPYCRRTKSDTEPQKSQQSSGRTSGSDDPGICSNTDSTQAQVLLGKKRLLKAETLELSDLYVSDKKKDMSPPFICEETDEQKLQTLDIGSNLEKEKLENSRSLECRSDPESPIKKTSLSPTSKLGYSYSRDLDLAKKKHASLRQTESDPDADRTTLNHADHSSKIVQHRLLSRQEELKERARVLLEQARRDAALKAGNKHNTNTATPFCNRQLSDQQDEERRRQLRERARQLIAEARSGVKMSELPSYGEMAAEKLKERSKASGDENDNIEIDTNEEIPEGFVVGGGDELTNLENDLDTPEQNSKLVDLKLKKLLEVQPQVANSPSSAAQKAVTESSEQDMKSGTEDLRTERLQKTTERFRNPVVFSKDSTVRKTQLQSFSQYIENRPEMKRQRSIQEDTKKGNEEKAAITETQRKPSEDEVLNKGFKDTSQYVVGELAALENEQKQIDTRAALVEKRLRYLMDTGRNTEEEEAMMQEWFMLVNKKNALIRRMNQLSLLEKEHDLERRYELLNRELRAMLAIEDWQKTEAQKRREQLLLDELVALVNKRDALVRDLDAQEKQAEEEDEHLERTLEQNKGKMAKKEEKCVLQ

SEQ ID NO: 860600 - protein, 1069 aa, Homo sapiens
MASVWKRLQRVGKHASKFQFVASYQELMVECTKKWQPDKLVVVWTRRSRRKSSKAHSWQPGIKNPYRGVVVWPVPENIEITVTLFKDPHAEEFEDKEWTFVIENESPSGRRKALATSSINMKQYASPMPTQTDVKLKFKPLSKKVVSAALQFSLSCIFLREGKATDEDMQSLASLMSMKQADIGNLDDFEEDNEDDDENRVNQEEKAAKITELINKLNFLDEAEKDLATVNSNPFDDPDAAELNPFGDPDSEEPITETASPRKTEDSFYNNSYNPFKEVQTPQYLNPFDEPEAFVTIKDSPPQSTKRKNIRPVDMSKYLYADSSKTEEEELDESNPFYEPKSTPPPNNLVNPVQELETERRVKRKAPAPPVLSPKTGVLNENTVSAGKDLSTSPKPSPIPSPVLGRKPNASQSLLVWCKEVTKNYRGVKITNFTTSWRNGLSFCAILHHFRPDLIDYKSLNPQDIKENNKKAYDGFASIGISRLLEPSDMVLLAIPDKLTVMTYLYQIRAHFSGQELNVVQIEENSSKSTYKVGNYETDTNSSVDQEKFYAELSDLKREPELQQPISGAVDFLSQDDSVFVNDSGVGESESEHQTPDDHLSPSTASPYCRRTKSDTEPQKSQQSSGRTSGSDDPGICSNTDSTQAQVLLGKKRLLKAETLELSDLYVSDKKKDMSPPFICEETDEQKLQTLDIGSNLEKEKLENSRSLECRSDPESPIKKTSLSPTSKLGYSYSRDLDLAKKKHASLRQTESDPDADRTTLNHADHSSKIVQHRLLSRQEELKERARVLLEQARRDAALKAGNKHNTNTATPFCNRQLSDSGTEDLRTERLQKTTERFRNPVVFSKDSTVRKTQLQSFSQYIENRPEMKRQRSIQEDTKKGNEEKAAITETQRKPSEDEVLNKGFKDTSQYVVGELAALENEQKQIDTRAALVEKRLRYLMDTGRNTEEEEAMMQEWFMLVNKKNALIRRMNQLSLLEKEHDLERRYELLNRELRAMLAIEDWQKTEAQKRREQLLLDELVALVNKRDALVRDLDAQEKQAEEEDEHLERTLEQNKGKMAKKEEKCVLQ

SEQ ID NO: 860601 - protein, 1112 aa, Homo sapiens
MASVWKRLQRVGKHASKFQFVASYQELMVECTKKWQPDKLVVVWTRRSRRKSSKAHSWQPGIKNPYRGVVVWPVPENIEITVTLFKDPHAEEFEDKEWTFVIENESPSGRRKALATSSINMKQYASPMPTQTDVKLKFKPLSKKVVSAALQFSLSCIFLREGKATDEDMQSLASLMSMKQADIGNLDDFEEDNEDDDENRVNQEEKAAKITELINKLNFLDEAEKDLATVNSNPFDDPDAAELNPFGDPDSEEPITETASPRKTEDSFYNNSYNPFKEVQTPQYLNPFDEPEAFVTIKDSPPQSTKRKNIRPVDMSKYLYADSSKTEEEELDESNPFYEPKSTPPPNNLVNPVQELETERRVKRKAPAPPVLSPKTGVLNENTVSAGKDLSTSPKPSPIPSPVLGRKPNASQSLLVWCKEVTKNYRGVKITNFTTSWRNGLSFCAILHHFRPDLIDYKSLNPQDIKENNKKAYDGFASIGISRLLEPSDMVLLAIPDKLTVMTYLYQIRAHFSGQELNVVQIEENSSKSTYKVGNYETDTNSSVDQEKFYAELSDLKREPELQQPISGAVDFLSQDDSVFVNDSGVGESESEHQTPDDHLSPSTASPYCRRTKSDTEPQKSQQSSGRTSGSDDPGICSNTDSTQAQVLLGKKRLLKAETLELSDLYVSDKKKDMSPPFICEETDEQKLQTLDIGSNLEKEKLENSRSLECRSDPESPIKKTSLSPTSKLGYSYSRDLDLAKKKHASLRQTESDPDADRTTLNHADHSSKIVQQQDEERRRQLRERARQLIAEARSGVKMSELPSYGEMAAEKLKERSKASGEQNSKLVDLKLKKLLEVQPQVANSPSSAAQKAVTESSEQDMKSGTEDLRTERLQKTTERFRNPVVFSKDSTVRKTQLQSFSQYIENRPEMKRQRSIQEDTKKGNEEKAAITETQRKPSEDEVLNKGFKDTSQYVVGELAALENEQKQIDTRAALVEKRLRYLMDTGRNTEEEEAMMQEWFMLVNKKNALIRRMNQLSLLEKEHDLERRYELLNRELRAMLAIEDWQKTEAQKRREQLLLDELVALVNKRDALVRDLDAQEKQAEEEDEHLERTLEQNKGKMAKKEEKCVLQ

SEQ ID NO: 860602 - protein, 1112 aa, Homo sapiens; identical to SEQ ID NO: 860601

SEQ ID NO: 860603 - protein, 108 aa, Homo sapiens
MRSSGTWTRRRSSEWAVGSGRGWATCRGAEKCAESSIQRSREGRGSLPLAWCSPFPLGIQILGDGGVLLCPPRRKIILFPVCPVCLTSRAEEEDEHLERTLEQNKGKM

SEQ ID NO: 860604 - protein, 132 aa, Homo sapiens
MHASNARPDQRSRIRLLARDDVSGTEDLRTERLQKTTERFRNPVVFSKDSTVRKTQLQSFSQYIENRPEMKRQRSIQEDTKKGNEEKAAITETQRKPSEDEVLNKKIKISQTWWCAPVVSATQEAEAGGLLD

SEQ ID NO: 860605 - protein, 1196 aa, Homo sapiens; identical to SEQ ID NO: 860599

SEQ ID NO: 860606 - protein, 1196 aa, Homo sapiens; identical to SEQ ID NO: 860599

SEQ ID NO: 860607 - protein, 937 aa, Homo sapiens
MASVWKRLQRVGKHASKFQFVASYQELMVECTKKWQPDKLVVVWTRRSRRKSSKAHSWQPGIKNPYRGVVVWPVPENIEITVTLFKDPHAEEFEDKEWTFVIENESPSGRRKALATSSINMKQYASPMPTQTDVKLKFKPLSKKVVSAALQFSLSCIFLREGKATDEDMQSLASLMSMKQADIGNLDDFEEDNEDDDENRVNQEEKAAKITELINKLNFLDEAEKDLATVNSNPFDDPDAAELNPFGDPDSEEPITETASPRKTEDSFYNNSYNPFKEVQTPQYLNPFDEPEAFVTIKDSPPQSTKRKNIRPVDMSKYLYADSSKTEEEELDESNPFYEPKSTPPPNNLVNPVQELETERRVKRKAPAPPVLSPKTGVLNENTVSAGKDLSTSPKPSPIPSPVLGRKPNASQSLLVWCKEVTKNYRGVKITNFTTSWRNGLSFCAILHHFRPDLIDYKSLNPQDIKENNKKAYDGFASIGISRLLEPSDMTESDPDADRTTLNHADHSSKIVQHRLLSRQEELKERARVLLEQARRDAALKAGNKHNTNTATPFCNRQLSDQQDEERRRQLRERARQLIAEARSGVKMSELPSYGEMAAEKLKERSKASGDENDNIEIDTNEEIPEGFVVGGGDELTNLENDLDTPEQNSKLVDLKLKKLLEVQPQVANSPSSAAQKAVTESSEQDMKSGTEDLRTERLQKTTERFRNPVVFSKDSTVRKTQLQSFSQYIENRPEMKRQRSIQEDTKKGNEEKAAITETQRKPSEDEVLNKGFKDTSQYVVGELAALENEQKQIDTRAALVEKRLRYLMDTGRNTEEEEAMMQEWFMLVNKKNALIRRMNQLSLLEKEHDLERRYELLNRELRAMLAIEDWQKTEAQKRREQLLLDELVALVNKRDALVRDLDAQEKQAEEEDEHLERTLEQNKGKMAKKEEKCVLQ

SEQ ID NO: 860608 - protein, 947 aa, Homo sapiens
MASVWKRLQRVGKHASKFQFVASYQELMVECTKKWQPDKLVVVWTRRSRRKSSKAHSWQPGIKNPYRGVVVWPVPENIEITVTLFKDPHAEEFEDKEWTFVIENESPSGRRKALATSSINMKQYASPMPTQTDVKLKFKPLSKKVVSAALQFSLSCIFLREGKATDEDMQSLASLMSMKQADIGNLDDFEEDNEDDDENRVNQEEKAAKITELINKLNFLDEAEKDLATVNSNPFDDPDAAELNPFGDPDSEEPITETASPRKTEDSFYNNSYNPFKEVQTPQYLNPFDEPEAFVTIKDSPPQSTKRKNIRPVDMSKYLYADSSKTEEEELDESNPFYEPKSTPPPNNLVNPVQELETERRVKRKAPAPPVLSPKTGVLNENTVSAGKDLSTSPKPSPIPSPVLGRKPNASQSLLVWCKEVTKNYRGVKITNFTTSWRNGLSFCAILHHFRPDLIDYKSLNPQDIKENNKKAYDGFASIGISRLLEPSDMVLLAIPDKLTVMTYLYQIRAHFSGQELNVVQIEENSSKSTYKVGNYETDTNSSVDQEKFYAELSDLKREPELQQPISGAVDFLSQDDSVFVNDSGVGESESEHQTPDDHLSPSTASPYCRRTKSDTEPQKSQQSSGRTSGSDDPGICSNTDSTQAQVLLGKKRLLKAETLELSDLYVSDKKKDMSPPFICEETDEQKLQTLDIGSNLEKEKLENSRSLECRSDPESPIKKTSLSPTSKLGYSYSRDLDLAKKKHASLRQTESDPDADRTTLNHADHSSKIVQQQDEERRRQLRERARQLIAEARSGVKMSELPSYGEMAAEKLKERSKASGEQNSKLVDLKLKKLLEVQPQVANSPSSAAQKAVTESSEQDMKSGTEDLRTERLQKTTERFRNPVVFSKDSTVRKTQLQSFSQYIENRPEMKRQRSIQEDTKKGNEEKAAITETQRKPSEDEVLNVY

SEQ ID NO: 860609 - protein, 77 aa, Homo sapiens
MINFIFYTNRLLRMVLKNYKRNELTVQKFYNYYTCVLFGGWEMYFYIVANHFIFVNLNLMGLFFFISLDVRFYSLFK

SEQ ID NO: 860610 - protein, 103 aa, Homo sapiens
VRGTGGRPSGQLVGGGSRPAQSRFTRRRLEPDRAEKERLLQIASKNSSGNWSWQACSQPWAPGAQDTAYHTAVWQMAVVLGWGCGVAGLVCWQSKWMEKLEML

SEQ ID NO: 860611 - protein, 142 aa, Homo sapiens
MPRGSRSAASRPASRPAAPSAHPPAHPPPSAAAPAPAPSGQPGLMAQMATTAAGVAVGSAVGHVMGSALTGAFSGGSSEPSQPAVQQAPTPAAPQPLQMGPCAYEIRQFLDCSTTQSDLSLCEGFSEALKQCKYYHGLSSLP

SEQ ID NO: 860612 - protein, 108 aa, Homo sapiens
PAVTSAAAFVPATAPLPPSLRSPGSHRRHHASGKPQRGLPASQPPRRALCPPARAPTALGSRPRMGPCAYEIRQFLDCSTTQSDLSLCEGFSEALKQCKYYHGLSSLP

SEQ ID NO: 860613 - protein, 142 aa, Homo sapiens; identical to SEQ ID NO: 860611

SEQ ID NO: 860614 - protein, 159 aa, Homo sapiens
MPRGSRSAASRPASRPAAPSAHPPAHPPPSAAAPAPAPSGQPGLMAQMATTAAGVAVGSAVGHVMGSALTGAFSGGSSEPSQPAVQQAPTPAAPQPLQMGPCAYEIRQFLDCSTTQSDLSLCEGFSEALKQCKYYHATSTPRRQPDHNTRLYPDSWDWK

SEQ ID NO: 860615 - protein, 131 aa, Homo sapiens
PCAYEIRQFLDCSTTQSDLSLCEGFSEALKQCKYYHVSEWTPTQAGRGRGQPSSCTCRLTTSLCCPSLPRSELPALKRSVQTRGPVLHPPLPLADSQTTTPDCTQIAGIGSEEVSHPTDNPRHKCAIKSLF

SEQ ID NO: 860616 - protein, 98 aa, Homo sapiens
PAVTSAAAFVPATAPLPPSLRSPGSHRRHHASGKPQRGLPASQAPTPAAPQPLQMGPCAYEIRQFLDCSTTQSDLSLCEGFSEALKQCKYYHGLSSLP

SEQ ID NO: 860617 - protein, 133 aa, Homo sapiens
VVCSPAFSILVCGFFSLIVVPPLPLVGVSSSSNMIRLVFARGSSSLLGVWFFDPAAASSPASFYYSCALLFRGRPLSLSHKVCGVAVAFLWGRLPRGGFFCWGAPPALSSFFFCLFLFVVFFCFVFVCFCLFF

SEQ ID NO: 860618 - protein, 147 aa, Homo sapiens
PAVTSAAAFVPATAPLPPSLRSPGSHRRHHASGKPQRGLPASQPPRRALCPPARAPTALGSRPSPRPFGPAGAHGSDGDHGRRGSRGLGCGTRHGQRPDRSLQRGELGALPACCPAGWGPAPMRSGSSWTVPPLRVTCPCVRASARP

SEQ ID NO: 860619 - protein, 442 aa, Homo sapiens
MSYNGLHQRVFKELKLLTLCSISSQIGPPEVALTTDEKSISVVLTAPEKWKRNPEDLPVSMQQIYSNLKYNVSVLNTKSNRTWSQCVTNHTLVLTWLEPNTLYCVHVESFVPGPPRRAQPSEKQCARTLKDQSSEFKAKIIFWYVLPISITVFLFSVMGYSIYRYIHVGKEKHPANLILIYGNEFDKRFFVPAEKIVINFITLNISDDSKISHQDMSLLGKSSDVSSLNDPQPSGNLRPPQEEEEVKHLGYASHLMEIFCDSEENTEGTSLTQQESLSRTIPPDKTVIEYEYDVRTTDICAGPEEQELSLQEEVSTQGTLLESQAALAVLGPQTLQYSYTPQLQDLDPLAQEHTDSEEGPEEEPSTTLVDWDPQTGRLCIPSLSSFDQDSEGCEPSEGDGLGEEGLLSRLYEEPAPDRPPGENETYLMQFMEEWGLYVQMEN

SEQ ID NO: 860620 - protein, 420 aa, Homo sapiens
MSYNGLHQRVFKELKLLTLCSISSPEKWKRNPEDLPVSMQQIYSNLKYNVSVLNTKSNRTWSQCVTNHTLVLTWLEPNTLYCVHVESFVPGPPRRAQPSEKQCARTLKDQSSEFKAKIIFWYVLPISITVFLFSVMGYSIYRYIHVGKEKHPANLILIYGNEFDKRFFVPAEKIVINFITLNISDDSKISHQDMSLLGKSSDVSSLNDPQPSGNLRPPQEEEEVKHLGYASHLMEIFCDSEENTEGTSLTQQESLSRTIPPDKTVIEYEYDVRTTDICAGPEEQELSLQEEVSTQGTLLESQAALAVLGPQTLQYSYTPQLQDLDPLAQEHTDSEEGPEEEPSTTLVDWDPQTGRLCIPSLSSFDQDSEGCEPSEGDGLGEEGLLSRLYEEPAPDRPPGENETYLMQFMEEWGLYVQMEN

SEQ ID NO: 860621 - protein, 68 aa, Homo sapiens
RGRACLVPGSLPSLPSQPGPWGALGTAAAEGLLSRLYEEPAPDRPPGENETYLMQFMEEWGLYVQMEN

SEQ ID NO: 860622 - protein, 209 aa, Homo sapiens
MRAPGRPALRPLPLPPLLLLLLAAPWGRAVPCVSGGLPKPANITFLSINMKNVLQWTPPEGLQGVKVTYTVQYFIYGQKKWLNKSECRNINRTYCDLSAETSDYEHQYYAKVKAIWGTKCSKWAESGRFYPFLETQIGPPEVALTTDEKSISVVLTAPEKWKRNPEDLPVSMQQIYSNLKYNVSVLNTKSNRTVSLKWNGAYIHVPLCS

SEQ ID NO: 860623 - protein, 553 aa, Homo sapiens
MRAPGRPALRPLPLPPLLLLLLAAPWGRAVPCVSGGLPKPANITFLSINMKNVLQWTPPEGLQGVKVTYTVQYFIYGQKKWLNKSECRNINRTYCDLSAETSDYEHQYYAKVKAIWGTKCSKWAESGRFYPFLETQIGPPEVALTTDEKSISVVLTAPEKWKRNPEDLPVSMQQIYSNLKYNVSVLNTKSNRTWSQCVTNHTLVLTWLEPNTLYCVHVESFVPGPPRRAQPSEKQCARTLKDQSSEFKAKIIFWYVLPISITVFLFSVMGYSIYRYIHVGKEKHPANLILIYGNEFDKRFFVPAEKIVINFITLNISDDSKISHQDMSLLGKSSDVSSLNDPQPSGNLRPPQEEEEVKHLGYASHLMEIFCDSEENTEGTSLTQQESLSRTIPPDKTVIEYEYDVRTTDICAGPEEQELSLQEEVSTQGTLLESQAALAVLGPQTLQYSYTPQLQDLDPLAQEHTDSEEGPEEEPSTTLVDWDPQTGRLCIPSLSSFDQDSEGCEPSEGDGLGEEGLLSRLYEEPAPDRPPGENETYLMQFMEEWGLYVQMEN

SEQ ID NO: 860624 - protein, 420 aa, Homo sapiens; identical to SEQ ID NO: 860620

SEQ ID NO: 860625 - protein, 553 aa, Homo sapiens; identical to SEQ ID NO: 860623

SEQ ID NO: 860626 - protein, 381 aa, Homo sapiens
MRAPGRPALRPLPLPPLLLLLLAAPWGRAVPCVSGGLPKPANITFLSINMKNVLQWTPPEGLQGVKVTYTVQYFIYGQKKWLNKSECRNINRTYCDLSAETSDYEHQYYAKVKAIWGTKCSKWAESGRFYPFLETQIGPPEVALTTDEKSISVVLTAPEKWKRNPEDLPVSMQQIYSNLKYNVSVLNTKSNRTWSQCVTNHTLVLTWLEPNTLYCVHVESFVPGPPRRAQPSEKQCARTLKDQSSEFKAKIIFWYVLPISITVFLFSVMGYSIYRYIHVGKEKHPANLILIYGNEFDKRFFVPAEKIVINFITLNISDDSKISHQDMSLLGKSSDVSSLNDPQPSGETLEGPLQGKEGRRVGNNLRGNWLSAIWNWRKFFW

SEQ ID NO: 860627 - protein, 171 aa, Homo sapiens [sequence omitted]

SEQ ID NO: 860628 - protein, 184 aa, Homo sapiens
MESFSSKSLALQAEKKLLSKMAGRSVAHLFIDETSSEVLDELYRVSKEYTHSRPQAQRVIKDLIKVAIKVAVLHRNGSFGPSELALATRFRQKLRQGAMTALSFGEVDFTFEAAVLAGLLTECRDVLLELVEHHLTPKSHGRIRHVFDHFSDPGLLTALYGPDFTQHLGKICDGLRKLLDEGKL

SEQ ID NO: 860629 - protein, 228 aa, Homo sapiens
MSPFLFRDDMKDLTVFLNSLTPKFYVALTGTSSLISGLIFIFEWWYFHKHGTSFIEQVSVSHLQPLMGGTESSISEPGSPSRNRENETSRQNLSECKVWRNPLNLFRGAEYRRYTWVTGKEPLTYYDMNLSAQDHQTFFTCDTDFLRPSDTVMQKAWRERNPPARIKAAYQALELNNDCATAYVLLAEEEATTIVDAERLFKQALKAGETIYRQSQQCQHQSPQHEAQ

SEQ ID NO: 860630 - protein, 152 aa, Homo sapiens
MGGTESSISEPGSPSRNRENETSRQNLSECKVWRNPLNLFRGAEYRRYTWVTGKEPLTYYDMNLSAQDHQTFFTCDTDFLRPSDTVMQKAWRERNPPARIKAAYQALELNNEYKPSKVSSNLLHSSTVEDKDCFRKILSRNSLQKRIKHSRN

SEQ ID NO: 860631 - protein, 218 aa, Homo sapiens
MSPFLFRDDMKDLTVFLNSLTPKFYVALTGTSSLISGLIFIFEWWYFHKHGTSFIEQVSVSHLQPLMGGTESSISEPGSPSRNRENETSRQNLSECKVWRNPLNLFRGAEYRRYTWVTGKEPLTYYDMNLSAQDHQTFFTCDTDFLRPSDTVMQKAWRERNPPARIKAAYQALELNNEYKPSKVSSNLLHSSTVEDKDCFRKILSRNSLQKRIKHSRN

SEQ ID NO: 860632 - protein, 152 aa, Homo sapiens; identical to SEQ ID NO: 860630

SEQ ID NO: 860633 - protein, 163 aa, Homo sapiens
MADRGGVGEAAAVGASPASVPGLNPTLGWRERLRAGLAGTGASLWFVAGLGLLYALRIPLRLCENLAAVTVFLNSLTPKFYVALTGTSSLISGLIFIFEWWYFHKHGTSFIEQVSVSHLQPLMGGTESSISEPGSPSRNRENETSRQNLSGDYFSNVFSELCI

SEQ ID NO: 860634 - protein, 274 aa, Homo sapiens
MADRGGVGEAAAVGASPASVPGLNPTLGWRERLRAGLAGTGASLWFVAGLGLLYALRIPLRLCENLAAVTVFLNSLTPKFYVALTGTSSLISGLIFIFEWWYFHKHGTSFIEQVSVSHLQPLMGGTESSISEPGSPSRNRENETSRQNLSECKVWRNPLNLFRGAEYRRYTWVTGKEPLTYYDMNLSAQDHQTFFTCDTDFLRPSDTVMQKAWRERNPPARIKAAYQALELNNEYKPSKVSSNLLHSSTVEDKDCFRKILSRNSLQKRIKHSRN

SEQ ID NO: 860635 - protein, 284 aa, Homo sapiens
MADRGGVGEAAAVGASPASVPGLNPTLGWRERLRAGLAGTGASLWFVAGLGLLYALRIPLRLCENLAAVTVFLNSLTPKFYVALTGTSSLISGLIFIFEWWYFHKHGTSFIEQVSVSHLQPLMGGTESSISEPGSPSRNRENETSRQNLSECKVWRNPLNLFRGAEYRRYTWVTGKEPLTYYDMNLSAQDHQTFFTCDTDFLRPSDTVMQKAWRERNPPARIKAAYQALELNNDCATAYVLLAEEEATTIVDAERLFKQALKAGETIYRQSQQCQHQSPQHEAQ

SEQ ID NO: 860636 - protein, 260 aa, Homo sapiens
MADRGGVGEAAAVGASPASVPGLNPTLGWRERLRAGLAGTGASLWFVAGLGLLYALRIPLRLCENLAAVTVFLNSLTPKFYVALTGTSSLISGLIFIFEWWYFHKHGTSFIEQVSVSHLQPLMGGTESSISEPGSPSRNRENETSRQNLSDGISLLLPRLECNVAILAHCNLHLPGSSDSPAPASRVAGITSTCHHARVIFVFLVEMGFRHVGQTGLKPLTSDDSSTSASQSAGITGMSHQAWPILSSFLSTFIAPYLGP

SEQ ID NO: 860637 - protein, 166 aa, Homo sapiens
MADRGGVGEAAAVGASPASVPGLNPTLGWRERLRAGLAGTGASLWFVAGLGLLYALRIPLRLCENLAAVTVFLNSLTPKFYVALTGTSSLISGLIFIFEWWYFHKHGTSFIEQVSVSHLQPLMGGTESSISEPGSPSRNRENETSRQNLSGSLGGDQVMRAVPSGM

SEQ ID NO: 860638 - protein, 219 aa, Homo sapiens
MADRGGVGEAAAVGASPASVPGLNPTLGWRERLRAGLAGTGASLWFVAGLGLLYALRIPLRLCENLAAVTVFLNSLTPKFYVALTGTSSLISGLIFIFEWWYFHKHGTSFIEQVSVSHLQPLMGGTESSISEPGSPSRNRENETSRQNLSECKVWRNPLNLFRGAEYRSCATAYVLLAEEEATTIVDAERLFKQALKAGETIYRQSQQCQHQSPQHEAQ

SEQ ID NO: 860639 - protein, 162 aa, Homo sapiens
MGGTESSISEPGSPSRNRENETSRQNLSECKVWRNPLNLFRGAEYRRYTWVTGKEPLTYYDMNLSAQDHQTFFTCDTDFLRPSDTVMQKAWRERNPPARIKAAYQALELNNDCATAYVLLAEEEATTIVDAERLFKQALKAGETIYRQSQQCQHQSPQHEAQ

SEQ ID NO: 860640 - protein, 274 aa, Homo sapiens; identical to SEQ ID NO: 860634

SEQ ID NO: 860641 - protein, 152 aa, Homo sapiens; identical to SEQ ID NO: 860630

SEQ ID NO: 860642 - protein, 271 aa, Homo sapiens
KLGRIREAVKIMRDLMKEFPPLTMLNIHENLLESLLELQAYPDVQAVLAKYDDISLPKSAAICYTAALLKTRTVSEKFSPETASRRGLSTAEINAVEAIHRAVEFNPHVPKYLLEMKSLILPPEHILKRGDSEAIAYAFFHLQHWKQIEGALNLLQCTWEGTFRMIPYPLEKGHLFYPYPSCTETADRELLPTFHHVSVYPKKELPLFIHFTAGFCSSTAMIAILTHQFPEIMGIFAKAVLGLWCPQPWASSGFEENTQDLKSEDLGLSSG

SEQ ID NO: 860643 - protein, 152 aa, Homo sapiens; identical to SEQ ID NO: 860630

SEQ ID NO: 860644 - protein, 80 aa, Homo sapiens
RKPSDGITAAAVGRTRPETPTKRAPCQLCAGVTSPNASARARAPGSRVCLSDCIFKFIDTQILCGTYRDLFIDIRTNIYI

SEQ ID NO: 860645 - protein, 154 aa, Homo sapiens
MADRGGVGEAAAVGASPASVPGLNPTLGWRERLRAGLAGTGASLWFVAGLGLLYALRIPLRLCENLAAVTVFLNSLTPKFYVALTGTSSLISGLIFIFEWWYFHKHGTSFIEQVSVSHLQPLMGGTESSISEPGSPSRNRENETSRQNLSDTLG

SEQ ID NO: 860646 - protein, 274 aa, Homo sapiens; identical to SEQ ID NO: 860634

SEQ ID NO: 860647 - protein, 138 aa, Homo sapiens
MGGTESSISEPGSPSRNRENETSRQNLSDGISLLLPRLECNVAILAHCNLHLPGSSDSPAPASRVAGITSTCHHARVIFVFLVEMGFRHVGQTGLKPLTSDDSSTSASQSAGITGMSHQAWPILSSFLSTFIAPYLGP

SEQ ID NO: 860648 - protein, 1923 aa, Homo sapiens
MAAGTWSPCRRAAAAERTRGVRGARSRPGPGHERAVLESPSRGARPRPSGRPASLAMARLADYFVLVAFGPHPRGSGEGQGQILQRFPEKDWEDNPFPQGIELFCQPSGWQLCPERNPPTFFVAVLTDINSERHYCACLTFWEPAEPSQETTRVEDATEREEEGDEGGQTHLSPTAPAPSAQLFAPKTLVLVSRLDHTEVFRNSLGLIYAIHVEGLNVCLENVIGNLLTCTVPLAGGSQRTISLGAGDRQVIQTPLADSLPVSRCSVALLFRQLGITNVLSLFCAALTEHKVLFLSRSYQRLADACRGLLALLFPLRYSFTYVPILPAQLLEVLSTPTPFIIGVNAAFQAETQELLDVIVADLDGGTVTIPECVHIPPLPEPLQSQTHSVLSMVLDPELELADLAFPPPTTSTSSLKMQDKELRAVFLRLFAQLLQGYRWCLHVVRIHPEPVIRFHKAAFLGQRGLVEDDFLMKVLEGMAFAGFVSERGVPYRPTDLFDELVAHEVARMRADENHPQRVLRHVQELAEQLYKNENPYPAVAMHKVQRPGESSHLRRVPRPFPRLDEGTVQWIVDQAAAKMQGAPPAVKAERRTTVPSGPPMTAILERCSGLHVNSARRLEVVRNCISYVFEGKMLEAKKLLPAVLRALKGRAARRCLAQELHLHVQQNRAVLDHQQFDFVVRMMNCCLQDCTSLDEHGIAAALLPLVTAFCRKLSPGVTQFAYSCVQEHVVWSTPQFWEAMFYGDVQTHIRALYLEPTEDLAPAQEVGEAPSQEDERSALDVASEQRRLWPTLSREKQQELVQKEESTVFSQAIHYANRMSYLLLPLDSSKSRLLRERAGLGDLESASNSLVTNSMAGSVAESYDTESGFEDAETCDVAGAVVRFINRFVDKVCTESGVTSDHLKGLHVMVPDIVQMHIETLEAVQRESRRLPPIQKPKLLRPRLLPGEECVLDGLRVYLLPDGREEGAGGSAGGPALLPAEGAVFLTTYRVIFTGMPTDPLVGEQVVVRSFPVAALTKEKRISVQTPVDQLLQDGLQLRSCTFQLLKMAFDEEVGSDSAELFRKQLHKLRYPPDIRATFAFTLGSAHTPGRPPRVTKDKGPSLRTLSRNLVKNAKKTIGRQHVTRKKYNPPSWEHRGQPPPEDQEDEISVSEELEPSTLTPSSALKPSDRMTMSSLVERACCRDYQRLGLGTLSSSLSRAKSEPFRISPVNRMYAICRSYPGLLIVPQSVQDNALQRVSRCYRQNRFPVVCWRSGRSKAVLLRSGGLHGKGVVGLFKAQNAPSPGQSQADSSSLEQEKYLQAVVSSMPRYADASGRNTLSGFSSAHMGSHGKWGSVRTSGRSSGLGTDVGSRLAGRDALAPPQANGGPPDPGFLRPQRAALYILGDKAQLKGVRSDPLQQWELVPIEVFEARQVKASFKKLLKACVPGCPAAEPSPASFLRSLEDSEWLIQIHKLLQVSVLVVELLDSGSSVLVGLEDGWDITTQVVSLVQLLSDPFYRTLEGFRLLVEKEWLSFGHRFSHRGAHTLAGQSSGFTPVFLQFLDCVHQVHLQFPMEFEFSQFYLKFLGYHHVSRRFRTFLLDSDYERIELGLLYEEKGERRGQVPCRSVWEYVDRLSKRTPVFHNYMYAPEDAEVLRPYSNVSNLKVWDFYTEETLAEGPPYDWELAQGPPEPPEEERSDGGAPQSRRRVVWPCYDSCPRAQPDAISRLLEELQRLETELGQPAERWKDTWDRVKAAQRLEGRPDGRGTPSSLLVSTAPHHRRSLGVYLQEGPVGSTLSLSLDSDQSSGSTTSGSRQAARRSTSTLYSQFQTAESENRSYEGTLYKKGAFMKPWKARWFVLDKTKHQLRYYDHRVDTECKGVIDLAEVEAVAPGTPTMGAPKTVDEKAFFDVKTTRRVYNFCAQDVPSAQQWVDRIQSCLSDA

SEQ ID NO: 860649 - protein, 1750 aa, Homo sapiens
HQTPAPVWPAVCTEDAVSDVLTWKNPGVRNSLGLIYAIHVEGLNVCLENVIGNLLTCTVPLAGGSQRTISLGAGDRQVIQTPLADSLPVSRCSVALLFRQLGITNVLSLFCAALTEHKVLFLSRSYQRLADACRGLLALLFPLRYSFTYVPILPAQLLEVLSTPTPFIIGVNAAFQAETQELLDVIVADLDGGTVTIPECVHIPPLPEPLQSQTHSVLSMVLDPELELADLAFPPPTTSTSSLKMQDKELRAVFLRLFAQLLQGYRWCLHVVRIHPEPVIRFHKAAFLGQRGLVEDDFLMKVLEGMAFAGFVSERGVPYRPTDLFDELVAHEVARMRADENHPQRVLRHVQELAEQLYKNENPYPAVAMHKVQRPGESSHLRRVPRPFPRLDEGTVQWIVDQAAAKMQGAPPAVKAERRTTVPSGPPMTAILERCSGLHVNSARRLEVVRNCISYVFEGKMLEAKKLLPAVLRALKGRAARRCLAQELHLHVQQNRAVLDHQQFDFVVRMMNCCLQDCTSLDEHGIAAALLPLVTAFCRKLSPGVTQFAYSCVQEHVVWSTPQFWEAMFYGDVQTHIRALYLEPTEDLAPAQEVGEAPSQEDERSALDVASEQRRLWPTLSREKQQELVQKEESTVFSQAIHYANRMSYLLLPLDSSKSRLLRERAGLGDLESASNSLVTNSMAGSVAESYDTESGFEDAETCDVAGAVVRFINRFVDKVCTESGVTSDHLKGLHVMVPDIVQMHIETLEAVQRESRRLPPIQKPKLLRPRLLPGEECVLDGLRVYLLPDGREEGAGGSAGGPALLPAEGAVFLTTYRVIFTGMPTDPLVGEQVVVRSFPVAALTKEKRISVQTPVDQLLQDGLQLRSCTFQLLKMAFDEEVGSDSAELFRKQLHKLRYPPDIRATFAFTLGSAHTPGRPPRVTKDKGPSLRTLSRNLVKNAKKTIGRQHVTRKKYNPPSWEHRGQPPPEDQEDEISVSEELEPSTLTPSSALKPSDRMTMSSLVERACCRDYQRLGLGTLSSSLSRAKSEPFRISPVNRMYAICRSYPGLLIVPQSVQDNALQRVSRCYRQNRFPVVCWRSGRSKAVLLRSGGLHGKGVVGLFKAQNAPSPGQSQADSSSLEQEKYLQAVVSSMPRYADASGRNTLSGFSSAHMGSHGKWGSVRTSGRSSGLGTDVGSRLAGRDALAPPQANGGPPDPGFLRPQRAALYILGDKAQLKGVRSDPLQQWELVPIEVFEARQVKASFKKLLKACVPGCPAAEPSPASFLRSLEDSEWLIQIHKLLQVSVLVVELLDSGSSVLVGLEDGWDITTQVVSLVQLLSDPFYRTLEGFRLLVEKEWLSFGHRFSHRGAHTLAGQSSGFTPVFLQFLDCVHQVHLQFPMEFEFSQFYLKFLGYHHVSRRFRTFLLDSDYERIELGLLYEEKGERRGQVPCRSVWEYVDRLSKRTPVFHNYMYAPEDAEVLRPYSNVSNLKVWDFYTEETLAEGPPYDWELAQGPPEPPEEERSDGGAPQSRRRVVWPCYDSCPRAQPDAISRLLEELQRLETELGQPAERWKDTWDRVKAAQRLEGRPDGRGTPSSLLVSTAPHHRRSLGVYLQEGPVGSTLSLSLDSDQSSGSTTSGSRQAARRSTSTLYSQFQTAESENRSYEGTLYKKGAFMKPWKARWFVLDKTKHQLRYYDHRVDTECKGVIDLAEVEAVAPGTPTMGAPKTVDEKAFFDVKTTRRVYNFCAQDVPSAQQWVDRIQSCLSDA

SEQ ID NO: 860650 - protein, 1661 aa, Homo sapiens
AQGPLQASLLPLGITNVLSLFCAALTEHKVLFLSRSYQRLADACRGLLALLFPLRYSFTYVPILPAQLLEVLSTPTPFIIGVNAAFQAETQELLDVIVADLDGGTVTIPECVHIPPLPEPLQSQTHSVLSMVLDPELELADLAFPPPTTSTSSLKMQDKELRAVFLRLFAQLLQGYRWCLHVVRIHPEPVIRFHKAAFLGQRGLVEDDFLMKVLEGMAFAGFVSERGVPYRPTDLFDELVAHEVARMRADENHPQRVLRHVQELAEQLYKNENPYPAVAMHKVQRPGESSHLRRVPRPFPRLDEGTVQWIVDQAAAKMQGAPPAVKAERRTTVPSGPPMTAILERCSGLHVNSARRLEVVRNCISYVFEGKMLEAKKLLPAVLRALKGRAARRCLAQELHLHVQQNRAVLDHQQFDFVVRMMNCCLQDCTSLDEHGIAAALLPLVTAFCRKLSPGVTQFAYSCVQEHVVWSTPQFWEAMFYGDVQTHIRALYLEPTEDLAPAQEVGEAPSQEDERSALDVASEQRRLWPTLSREKQQELVQKEESTVFSQAIHYANRMSYLLLPLDSSKSRLLRERAGLGDLESASNSLVTNSMAGSVAESYDTESGFEDAETCDVAGAVVRFINRFVDKVCTESGVTSDHLKGLHVMVPDIVQMHIETLEAVQRESRRLPPIQKPKLLRPRLLPGEECVLDGLRVYLLPDGREEGAGGSAGGPALLPAEGAVFLTTYRVIFTGMPTDPLVGEQVVVRSFPVAALTKEKRISVQTPVDQLLQDGLQLRSCTFQLLKMAFDEEVGSDSAELFRKQLHKLRYPPDIRATFAFTLGSAHTPGRPPRVTKDKGPSLRTLSRNLVKNAKKTIGRQHVTRKKYNPPSWEHRGQPPPEDQEDEISVSEELEPSTLTPSSALKPSDRMTMSSLVERACCRDYQRLGLGTLSSSLSRAKSEPFRISPVNRMYAICRSYPGLLIVPQSVQDNALQRVSRCYRQNRFPVVCWRSGRSKAVLLRSGGLHGKGVVGLFKAQNAPSPGQSQADSSSLEQEKYLQAVVSSMPRYADASGRNTLSGFSSAHMGSHGKWGSVRTSGRSSGLGTDVGSRLAGRDALAPPQANGGPPDPGFLRPQRAALYILGDKAQLKGVRSDPLQQWELVPIEVFEARQVKASFKKLLKACVPGCPAAEPSPASFLRSLEDSEWLIQIHKLLQVSVLVVELLDSGSSVLVGLEDGWDITTQVVSLVQLLSDPFYRTLEGFRLLVEKEWLSFGHRFSHRGAHTLAGQSSGFTPVFLQFLDCVHQVHLQFPMEFEFSQFYLKFLGYHHVSRRFRTFLLDSDYERIELGLLYEEKGERRGQVPCRSVWEYVDRLSKRTPVFHNYMYAPEDAEVLRPYSNVSNLKVWDFYTEETLAEGPPYDWELAQGPPEPPEEERSDGGAPQSRRRVVWPCYDSCPRAQPDAISRLLEELQRLETELGQPAERWKDTWDRVKAAQRLEGRPDGRGTPSSLLVSTAPHHRRSLGVYLQEGPVGSTLSLSLDSDQSSGSTTSGSRQAARRSTSTLYSQFQTAESENRSYEGTLYKKGAFMKPWKARWFVLDKTKHQLRYYDHRVDTECKGVIDLAEVEAVAPGTPTMGAPKTVDEKAFFDVKTTRRVYNFCAQDVPSAQQWVDRIQSCLSDA

SEQ ID NO: 860651 - protein, 1503 aa, Homo sapiens
TPGSESGRTWRRRWSFRPLLSFSWPSWVPCLQSPGGKAAFLGQRGLVEDDFLMKVLEGMAFAGFVSERGVPYRPTDLFDELVAHEVARMRADENHPQRVLRHVQELAEQLYKNENPYPAVAMHKVQRPGESSHLRRVPRPFPRLDEGTVQWIVDQAAAKMQGAPPAVKAERRTTVPSGPPMTAILERCSGLHVNSARRLEVVRNCISYVFEGKMLEAKKLLPAVLRALKGRAARRCLAQELHLHVQQNRAVLDHQQFDFVVRMMNCCLQDCTSLDEHGIAAALLPLVTAFCRKLSPGVTQFAYSCVQEHVVWSTPQFWEAMFYGDVQTHIRALYLEPTEDLAPAQEVGEAPSQEDERSALDVASEQRRLWPTLSREKQQELVQKEESTVFSQAIHYANRMSYLLLPLDSSKSRLLRERAGLGDLESASNSLVTNSMAGSVAESYDTESGFEDAETCDVAGAVVRFINRFVDKVCTESGVTSDHLKGLHVMVPDIVQMHIETLEAVQRESRRLPPIQKPKLLRPRLLPGEECVLDGLRVYLLPDGREEGAGGSAGGPALLPAEGAVFLTTYRVIFTGMPTDPLVGEQVVVRSFPVAALTKEKRISVQTPVDQLLQDGLQLRSCTFQLLKMAFDEEVGSDSAELFRKQLHKLRYPPDIRATFAFTLGSAHTPGRPPRVTKDKGPSLRTLSRNLVKNAKKTIGRQHVTRKKYNPPSWEHRGQPPPEDQEDEISVSEELEPSTLTPSSALKPSDRMTMSSLVERACCRDYQRLGLGTLSSSLSRAKSEPFRISPVNRMYAICRSYPGLLIVPQSVQDNALQRVSRCYRQNRFPVVCWRSGRSKAVLLRSGGLHGKGVVGLFKAQNAPSPGQSQADSSSLEQEKYLQAVVSSMPRYADASGRNTLSGFSSAHMGSHGKWGSVRTSGRSSGLGTDVGSRLAGRDALAPPQANGGPPDPGFLRPQRAALYILGDKAQLKGVRSDPLQQWELVPIEVFEARQVKASFKKLLKACVPGCPAAEPSPASFLRSLEDSEWLIQIHKLLQVSVLVVELLDSGSSVLVGLEDGWDITTQVVSLVQLLSDPFYRTLEGFRLLVEKEWLSFGHRFSHRGAHTLAGQSSGFTPVFLQFLDCVHQVHLQFPMEFEFSQFYLKFLGYHHVSRRFRTFLLDSDYERIELGLLYEEKGERRGQVPCRSVWEYVDRLSKRTPVFHNYMYAPEDAEVLRPYSNVSNLKVWDFYTEETLAEGPPYDWELAQGPPEPPEEERSDGGAPQSRRRVVWPCYDSCPRAQPDAISRLLEELQRLETELGQPAERWKDTWDRVKAAQRLEGRPDGRGTPSSLLVSTAPHHRRSLGVYLQEGPVGSTLSLSLDSDQSSGSTTSGSRQAARRSTSTLYSQFQTAESENRSYEGTLYKKGAFMKPWKARWFVLDKTKHQLRYYDHRVDTECKGVIDLAEVEAVAPGTPTMGAPKTVDEKAFFDVKTTRRVYNFCAQDVPSAQQWVDRIQSCLSDA

SEQ ID NO: 860652 - protein, 2013 aa, Homo sapiens
MAAGTWSPCRRAAAAERTRGVRGARSRPGPGHERAVLESPSRGARPRPSGRPASLAMARLADYFVLVAFGPHPRGSGEGQGQILQRFPEKDWEDNPFPQGIELFCQPSGWQLCPERNPPTFFVAVLTDINSERHYCACLTFWEPAEPSQETTRVEDATEREEEGDEGGQTHLSPTAPAPSAQLFAPKTLVLVSRLDHTEVFRNSLGLIYAIHVEGLNVCLENVIGNLLTCTVPLAGGSQRTISLGAGDRQVIQTPLADSLPVSRCSVALLFRQLGITNVLSLFCAALTEHKVLFLSRSYQRLADACRGLLALLFPLRYSFTYVPILPAQLLEVLSTPTPFIIGVNAAFQAETQELLDVIVADLDGGTVTIPECVHIPPLPEPLQSQTHSVLSMVLDPELELADLAFPPPTTSTSSLKMQDKELRAVFLRLFAQLLQGYRWCLHVVRIHPEPVIRFHKAAFLGQRGLVEDDFLMKVLEGMAFAGFVSERGVPYRPTDLFDELVAHEVARMRADENHPQRVLRHVQELAEQLYKNENPYPAVAMHKVQRPGESSHLRRVPRPFPRLDEGTVQWIVDQAAAKMQGAPPAVKAERRTTVPSGPPMTAILERCSGLHVNSARRLEVVRNCISYVFEGKMLEAKKLLPAVLRALKGRAARRCLAQELHLHVQQNRAVLDHQQFDFVVRMMNCCLQDCTSLDEHGIAAALLPLVTAFCRKLSPGVTQFAYSCVQEHVVWSTPQFWEAMFYGDVQTHIRALYLEPTEDLAPAQEVGEAPSQEDERSALDVASEQRRLWPTLSREKQQELVQKEESTVFSQAIHYANRMSYLLLPLDSSKSRLLRERAGLGDLESASNSLVTNSMAGSVAESYDTESGFEDAETCDVAGAVVRFINRFVDKVCTESGVTSDHLKGLHVMVPDIVQMHIETLEAVQRESRRLPPIQKPKLLRPRLLPGEECVLDGLRVYLLPDGREEGAGGSAGGPALLPAEGAVFLTTYRVIFTGMPTDPLVGEQVVVRSFPVAALTKEKRISVQTPVDQLLQDGLQLRSCTFQLLKMAFDEEVGSDSAELFRKQLHKLRYPPDIRATFAFTLGSAHTPGRPPRVTKDKGPSLRTLSRNLVKNAKKTIGRQHVTRKKYNPPSWEHRGQPPPEDQEDEISVSEELEPSTLTPSSALKPSDRMTMSSLVERACCRDYQRLGLGTLSSSLSRAKSEPFRISPVNRMYAICRSYPGLLIVPQSVQDNALQRVSRCYRQNRFPVVCWRSGRSKAVLLRSGGLHGKGVVGLFKAQNAPSPGQSQADSSSLEQEKYLQAVVSSMPRYADASGRNTLSGFSSAHMGSHVPSPRARVTTLSNPMAASASRRTAPRGTVPSLRRPASPYLVLAASVCTELLRALMSPSTPDTNDPSPEPHQPQVSGALAPFGCLPGISFTGKWGSVRTSGRSSGLGTDVGSRLAGRDALAPPQANGGPPDPGFLRPQRAALYILGDKAQLKGVRSDPLQQWELVPIEVFEARQVKASFKKLLKACVPGCPAAEPSPASFLRSLEDSEWLIQIHKLLQVSVLVVELLDSGSSVLVGLEDGWDITTQVVSLVQLLSDPFYRTLEGFRLLVEKEWLSFGHRFSHRGAHTLAGQSSGFTPVFLQFLDCVHQVHLQFPMEFEFSQFYLKFLGYHHVSRRFRTFLLDSDYERIELGLLYEEKGERRGQVPCRSVWEYVDRLSKRTPVFHNYMYAPEDAEVLRPYSNVSNLKVWDFYTEETLAEGPPYDWELAQGPPEPPEEERSDGGAPQSRRRVVWPCYDSCPRAQPDAISRLLEELQRLETELGQPAERWKDTWDRVKAAQRLEGRPDGRGTPSSLLVSTAPHHRRSLGVYLQEGPVGSTLSLSLDSDQSSGSTTSGSRQAARRSTSTLYSQFQTAESENRSYEGTLYKKGAFMKPWKARWFVLDKTKHQLRYYDHRVDTECKGVIDLAEVEAVAPGTPTMGAPKTVDEKAFFDVKTTRRVYNFCAQDVPSAQQWVDRIQSCLSDA

SEQ ID NO: 860653 - protein, 1973 aa, Homo sapiens
MAAGTWSPCRRAAAAERTRGVRGARSRPGPGHERAVLESPSRGARPRPSGRPASLAMARLADYFVLVAFGPHPRGSGEGQGQILQRFPEKDWEDNPFPQGIELFCQPSGWQLCPERNPPTFFVAVLTDINSERHYCACLTFWEPAEPSQETTRVEDATEREEEGDEGGQTHLSPTAPAPSAQLFAPKTLVLVSRLDHTEVFRNSLGLIYAIHVEGLNVCLENVIGNLLTCTVPLAGGSQRTISLGAGDRQVIQTPLADSLPVSRCSVALLFRQLGITNVLSLFCAALTEHKVLFLSRSYQRLADACRGLLALLFPLRYSFTYVPILPAQLLEVLSTPTPFIIGVNAAFQAETQELLDVIVADLDGGTVTIPECVHIPPLPEPLQSQTHSVLSMVLDPELELADLAFPPPTTSTSSLKMQDKELRAVFLRLFAQLLQGYRWCLHVVRIHPEPVIRFHKAAFLGQRGLVEDDFLMKVLEGMAFAGFVSERGVPYRPTDLFDELVAHEVARMRADENHPQRVLRHVQELAEQLYKNENPYPAVAMHKVQRPGESSHLRRVPRPFPRLDEGTVQWIVDQAAAKMQGAPPAVKAERRTTVPSGPPMTAILERCSGLHVNSARRLEVVRNCISYVFEGKMLEAKKLLPAVLRALKGRAARRCLAQELHLHVQQNRAVLDHQQFDFVVRMMNCCLQDCTSLDEHGIAAALLPLVTAFCRKLSPGVTQFAYSCVQEHVVWSTPQFWEAMFYGDVQTHIRALYLEPTEDLAPAQEVGEAPSQEDERSALDVASEQRRLWPTLSREKQQELVQKEESTVFSQAIHYANRMSYLLLPLDSSKSRLLRERAGLGDLESASNSLVTNSMAGSVAESYDTESGFEDAETCDVAGAVVRFINRFVDKVCTESGVTSDHLKGLHVMVPDIVQMHIETLEAVQRESRRLPPIQKPKLLRPRLLPGEECVLDGLRVYLLPDGREEGAGGSAGGPALLPAEGAVFLTTYRVIFTGMPTDPLVGEQVVVRSFPVAALTKEKRISVQTPVDQLLQDGLQLRSCTFQLLKMAFDEEVGSDSAELFRKQLHKLRYPPDIRATFAFTLGSAHTPGRPPRVTKDKGPSLRTLSRNLVKNAKKTIGRQHVTRKKYNPPSWEHRGQPPPEDQEDEISVSEELEPSTLTPSSALKPSDRMTMSSLVERACCRDYQRLGLGTLSSSLSRAKSEPFRISPVNRMYAICRSYPGLLIVPQSVQDNALQRVSRCYRQNRFPVVCWRSGRSKAVLLRSGGLHGKGVVGLFKAQNAPSPGQSQADSSSLEQEKYLQAVVSSMPRYADASGRNTLSGFSSAHMGSHVPSPRARVTTLSNPMAASASRRTAPRGKWGSVRTSGRSSGLGTDVGSRLAGRDALAPPQANGGPPDPGFLRPQRAALYILGDKAQLKGVRSDPLQQWELVPIEVFEARQVKASFKKLLKACVPGCPAAEPSPASFLRSLEDSEWLIQIHKLLQVSVLVVELLDSGSSVLVGLEDGWDITTQVVSLVQLLSDPFYRTLEGFRLLVEKEWLSFGHRFSHRGAHTLAGQSSGFTPVFLQFLDCVHQVHLQFPMEFEFSQFYLKFLGYHHVSRRFRTFLLDSDYERIELGMWGVGAGAARVRRAPGSVLLLCRGLLYEEKGERRGQVPCRSVWEYVDRLSKRTPVFHNYMYAPEDAEVLRPYSNVSNLKVWDFYTEETLAEGPPYDWELAQGPPEPPEEERSDGGAPQSRRRVVWPCYDSCPRAQPDAISRLLEELQRLETELGQPAERWKDTWDRVKAAQRLEGRPDGRGTPSSLLVSTAPHHRRSLGVYLQEGPVGSTLSLSLDSDQSSGSTTSGSRQAARRSTSTLYSQFQTAESENRSYEGTLYKKGAFMKPWKARWFVLDKTKHQLRYYDHRVDTECKGVIDLAEVEAVAPGTPTMGAPKTVDEKAFFDVKTTRRVYNFCAQDVPSAQQWVDRIQSCLSDA

SEQ ID NO: 860654 - protein, 1949 aa, Homo sapiens
MAAGTWSPCRRAAAAERTRGVRGARSRPGPGHERAVLESPSRGARPRPSGRPASLAMARLADYFVLVAFGPHPRGSGEGQGQILQRFPEKDWEDNPFPQGIELFCQPSGWQLCPERNPPTFFVAVLTDINSERHYCACLTFWEPAEPSQETTRVEDATEREEEGDEGGQTHLSPTAPAPSAQLFAPKTLVLVSRLDHTEVFRNSLGLIYAIHVEGLNVCLENVIGNLLTCTVPLAGGSQRTISLGAGDRQVIQTPLADSLPVSRCSVALLFRQLGITNVLSLFCAALTEHKVLFLSRSYQRLADACRGLLALLFPLRYSFTYVPILPAQLLEVLSTPTPFIIGVNAAFQAETQELLDVIVADLDGGTVTIPECVHIPPLPEPLQSQTHSVLSMVLDPELELADLAFPPPTTSTSSLKMQDKELRAVFLRLFAQLLQGYRWCLHVVRIHPEPVIRFHKAAFLGQRGLVEDDFLMKVLEGMAFAGFVSERGVPYRPTDLFDELVAHEVARMRADENHPQRVLRHVQELAEQLYKNENPYPAVAMHKVQRPGESSHLRRVPRPFPRLDEGTVQWIVDQAAAKMQGAPPAVKAERRTTVPSGPPMTAILERCSGLHVNSARRLEVVRNCISYVFEGKMLEAKKLLPAVLRALKGRAARRCLAQELHLHVQQNRAVLDHQQFDFVVRMMNCCLQDCTSLDEHGIAAALLPLVTAFCRKLSPGVTQFAYSCVQEHVVWSTPQFWEAMFYGDVQTHIRALYLEPTEDLAPAQEVGEAPSQEDERSALDVASEQRRLWPTLSREKQQELVQKEESTVFSQAIHYANRMSYLLLPLDSSKSRLLRERAGLGDLESASNSLVTNSMAGSVAESYDTESGFEDAETCDVAGAVVRFINRFVDKVCTESGVTSDHLKGLHVMVPDIVQMHIETLEAVQRESRRLPPIQKPKLLRPRLLPGEECVLDGLRVYLLPDGREEGAGGSAGGPALLPAEGAVFLTTYRVIFTGMPTDPLVGEQVVVRSFPVAALTKEKRISVQTPVDQLLQDGLQLRSCTFQLLKMAFDEEVGSDSAELFRKQLHKLRYPPDIRATFAFTLGSAHTPGRPPRVTKDKGPSLRTLSRNLVKNAKKTIGRQHVTRKKYNPPSWEHRGQPPPEDQEDEISVSEELEPSTLTPSSALKPSDRMTMSSLVERACCRDYQRLGLGTLSSSLSRAKSEPFRISPVNRMYAICRSYPGLLIVPQSVQDNALQRVSRCYRQNRFPVVCWRSGRSKAVLLRSGGLHGKGVVGLFKAQNAPSPGQSQADSSSLEQEKYLQAVVSSMPRYADASGRNTLSGFSSAHMGSHVPSPRARVTTLSNPMAASASRRTAPRGKWGSVRTSGRSSGLGTDVGSRLAGRDALAPPQANGGPPDPGFLRPQRAALYILGDKAQLKGVRSDPLQQWELVPIEVFEARQVKASFKKLLKACVPGCPAAEPSPASFLRSLEDSEWLIQIHKLLQVSVLVVELLDSGSSVLVGLEDGWDITTQVVSLVQLLSDPFYRTLEGFRLLVEKEWLSFGHRFSHRGAHTLAGQSSGFTPVFLQFLDCVHQVHLQFPMEFEFSQFYLKFLGYHHVSRRFRTFLLDSDYERIELGLLYEEKGERRGQVPCRSVWEYVDRLSKRTPVFHNYMYAPEDAEVLRPYSNVSNLKVWDFYTEETLAEGPPYDWELAQGPPEPPEEERSDGGAPQSRRRVVWPCYDSCPRAQPDAISRLLEELQRLETELGQPAERWKDTWDRVKAAQRLEGRPDGRGTPSSLLVSTAPHHRRSLGVYLQEGPVGSTLSLSLDSDQSSGSTTSGSRQAARRSTSTLYSQFQTAESENRSYEGTLYKKGAFMKPWKARWFVLDKTKHQLRYYDHRVDTECKGVIDLAEVEAVAPGTPTMGAPKTVDEKAFFDVKTTRRVYNFCAQDVPSAQQWVDRIQSCLSDA

SEQ ID NO: 860655 - protein, 1949 aa, Homo sapiens; identical to SEQ ID NO: 860654

SEQ ID NO: 860656 - protein, 1884 aa, Homo sapiens
MAAGTWSPCRRAAAAERTRGVRGARSRPGPGHERAVLESPSRGARPRPSGRPASLAMARLADYFVLVAFGPHPRGSGEGQGQILQRFPEKDWEDNPFPQGIELFCQPSGWQLCPERNPPTFFVAVLTDINSERHYCACLTFWEPAEPSQETTRVEDATEREEEGDEGGQTHLSPTAPAPSAQLFAPKTLVLVSRLDHTEVFRNSLGLIYAIHVEGLNVCLENVIGNLLTCTVPLAGGSQRTISLGAGDRQVIQTPLADSLPVSRCSVALLFRQLGITNVLSLFCAALTEHKVLFLSRSYQRLADACRGLLALLFPLRYSFTYVPILPAQLLEVLSTPTPFIIGVNAAFQAETQELLDVIVADLDGGTVTIPECVHIPPLPEPLQSQTHSVLSMVLDPELELADLAFPPPTTSTSSLKMQDKELRAVFLRLFAQLLQGYRWCLHVVRIHPEPVIRFHKAAFLGQRGLVEDDFLMKVLEGMAFAGFVSERGVPYRPTDLFDELVAHEVARMRADENHPQRVLRHVQELAEQLYKNENPYPAVAMHKVQRPGESSHLRRVPRPFPRLDEGTVQWIVDQAAAKMQGAPPAVKAERRTTVPSGPPMTAILERCSGLHVNSARRLEVVRNCISYVFEGKMLEAKKLLPAVLRALKGRAARRCLAQELHLHVQQNRAVLDHQQFDFVVRMMNCCLQDCTSLDEHGIAAALLPLVTAFCRKLSPGVTQFAYSCVQEHVVWSTPQFWEAMFYGDVQTHIRALYLEPTEDLAPAQEVGEAPSQEDERSALDVASEQRRLWPTLSREKQQELVQKEESTVFSQAIHYANRMSYLLLPLDSSKSRLLRERAGLGDLESASNSLVTNSMAGSVAESYDTESGFEDAETCDVAGAVVRFINRFVDKVCTESGVTSDHLKGLHVMVPDIVQMHIETLEAVQRESRRLPPIQKPKLLRPRLLPGEECVLDGLRVYLLPDGREEGAGGSAGGPALLPAEGAVFLTTYRVIFTGMPTDPLVGEQVVVRSFPVAALTKEKRISVQTPVDQLLQDGLQLRSCTFQLLKMAFDEEVGSDSAELFRKQLHKLRYPPDIRATFAFTLGSAHTPGRPPRVTKDKGPSLRTLSRNLVKNAKKTIGRQHVTRKKYNPPSWEHRGQPPPEDQEDEISVSEELEPSTLTPSSALKPSDRMTMSSLVERACCRDYQRLGLGTLSSSLSRAKSEPFRISPVNRMYAICRSYPGLLIVPQSVQDNALQRVSRCYRQNRFPVVCWRSGRSKAVLLRSGGLHGKGVVGLFKAQNAPSPGQSQADSSSLEQEKYLQAVVSSMPRYADASGRNTLSGFSSAHMGSHVPSPRARVTTLSNPMAASASRRTAPRGKWGSVRTSGRSSGLGTDVGSRLAGRDALAPPQANGGPPDPGFLRPQRAALYILGDKAQLKGVRSDPLQQWELVPIEVFEARQVKASFKKLLKACVPGCPAAEPSPASFLRSLEDSEWLIQIHKLLQVSVLVVELLDSGSSVLVGLEDGWDITTQVVSLVQLLSDPFYRTLEGFRLLVEKEWLSFGHRFSHRGAHTLAGQSSGFTPVFLQFLDCVHQVHLQFPMEFEFSQFYLKFLGYHHVSRRFRTFLLDSDYERIELGLLYEEKGERRGQVPCRSVWEYVDRLSKRTPVFHNYMYAPEDAEVLRPYSNVSNLKVWDFYTEETLAEGPPYDWELAQGPPEPPEEERSDGGAPQSRRRVVWPCYDSCPRAQPDAISRLLEELQRLETELGQPAERWKDTWDRVKAAQRLEGRPDGRGTPSSLLVSTAPHHRRSLGVYLQEGPVGSTLSLSLDSDQSSGSTTSGSRQAARRSTSTLYSQFQTAESENRSYEGTLYKKGAFMKPWKARWFVLDKTKHQPRPRPAPPGRP

SEQ ID NO: 860657 - protein, 1889 aa, Homo sapiens
MAAGTWSPCRRAAAAERTRGVRGARSRPGPGHERAVLESPSRGARPRPSGRPASLAMARLADYFVLVAFGPHPRGSGEGQGQILQRFPEKDWEDNPFPQGIELFCQPSGWQLCPERNPPTFFVAVLTDINSERHYCACLTFWEPAEPSQETTRVEDATEREEEGDEGGQTHLSPTAPAPSAQLFAPKTLVLVSRLDHTEVFRNSLGLIYAIHVEGLNVCLENVIGNLLTCTVPLAGGSQRTISLGAGDRQVIQTPLADSLPVSRCSVALLFRQLGITNVLSLFCAALTEHKVLFLSRSYQRLADACRGLLALLFPLRYSFTYVPILPAQLLEVLSTPTPFIIGVNAAFQAETQELLDVIVADLDGGTVTIPECVHIPPLPEPLQSQTHSVLSMVLDPELELADLAFPPPTTSTSSLKMQDKELRAVFLRLFAQLLQGYRWCLHVVRIHPEPVIRFHKAAFLGQRGLVEDDFLMKVLEGMAFAGFVSERGVPYRPTDLFDELVAHEVARMRADENHPQRVLRHVQELAEQLYKNENPYPAVAMHKVQRPGESSHLRRVPRPFPRLDEGTVQWIVDQAAAKMQGAPPAVKAERRTTVPSGPPMTAILERCSGLHVNSARRLEVVRNCISYVFEGKMLEAKKLLPAVLRALKGRAARRCLAQELHLHVQQNRAVLDHQQFDFVVRMMNCCLQDCTSLDEHGIAAALLPLVTAFCRKLSPGVTQFAYSCVQEHVVWSTPQFWEAMFYGDVQTHIRALYLEPTEDLAPAQEVGEAPSQEDERSALDVASEQRRLWPTLSREKQQELVQKEESTVFSQAIHYANRMSYLLLPLDSSKSRLLRERAGLGDLESASNSLVTNSMAGSVAESYDTESGFEDAETCDVAGAVVRFINRFVDKVCTESGVTSDHLKGLHVMVPDIVQMHIETLEAVQRESRRLPPIQKPKLLRPRLLPGEECVLDGLRVYLLPDGREEGAGGSAGGPALLPAEGAVFLTTYRVIFTGMPTDPLVGEQVVVRSFPVAALTKEKRISVQTPVDQLLQDGLQLRSCTFQLLKMAFDEEVGSDSAELFRKQLHKLRYPPDIRATFAFTLGSAHTPGRPPRVTKDKGPSLRTLSRNLVKNAKKTIGRQHVTRKKYNPPSWEHRGQPPPEDQEDEISVSEELEPSTLTPSSALKPSDRMTMSSLVERACCRDYQRLGLGTLSSSLSRAKSEPFRISPVNRMYAICRSYPGLLIVPQSVQDNALQRVSRCYRQNRFPVVCWRSGRSKAVLLRSGGLHGKGVVGLFKAQNAPSPGQSQADSSSLEQEKYLQAVVSSMPRYADASGRNTLSGFSSAHMGSHVPSPRARVTTLSNPMAASASRRTAPRGKWGSVRTSGRSSGLGTDVGSRLAGRDALAPPQANGGPPDPGFLRPQRAALYILGDKAQLKGVRSDPLQQWELVPIEVFEARQVKASFKKLLKACVPGCPAAEPSPASFLRSLEDSEWLIQIHKLLQVSVLVVELLDSGSSVLVGLEDGWDITTQVVSLVQLLSDPFYRTLEGFRLLVEKEWLSFGHRFSHRGAHTLAGQSSGFTPVFLQFLDCVHQVHLQFPMEFEFSQFYLKFLGYHHVSRRFRTFLLDSDYERIELGLLYEEKGERRGQVPCRSVWEYVDRLSKRTPVFHNYMYAPEDAEVLRPYSNVSNLKVWDFYTEETLAEGPPYDWELAQGPPEPPEEERSDGGAPQSRRRVVWPCYDSCPRAQPDAISRLLEELQRLETELGQPAERWKDTWDRVKAAQRLEGRPDGRGTPSSLLVSTAPHHRRSLGVYLQEGPVGSTLSLSLDSDQSSGSTTSGSRQAARRSTSTLYSQFQTAESENRSYEGTLYKKGAFMKPWKARWFVLDKTKHQLRYYTTVDTNVQVHAR

SEQ ID NO: 860658 - protein, 1860 aa, Homo sapiens
MAAGTWSPCRRAAAAERTRGVRGARSRPGPGHERAVLESPSRGARPRPSGRPASLAMARLADYFVLVAFGPHPRGSGEGQGQILQRFPEKDWEDNPFPQGIELFCQPSGWQLCPERNPPTFFVAVLTDINSERHYCACLTFWEPAEPSQETTRVEDATEREEEGDEGGQTHLSPTAPAPSAQLFAPKTLVLVSRLDHTEVFRNSLGLIYAIHVEGLNVCLENVIGNLLTCTVPLAGGSQRTISLGAGDRQVIQTPLADSLPVSRCSVALLFRQLGITNVLSLFCAALTEHKVLFLSRSYQRLADACRGLLALLFPLRYSFTYVPILPAQLLEVLSTPTPFIIGVNAAFQAETQELLDVIVADLDGGTVTIPECVHIPPLPEPLQSQTHSVLSMVLDPELELADLAFPPPTTSTSSLKMQDKELRAVFLRLFAQLLQGYRWCLHVVRIHPEPVIRFHKAAFLGQRGLVEDDFLMKVLEGMAFAGFVSERGVPYRPTDLFDELVAHEVARMRADENHPQRVLRHVQELAEQLYKNENPYPAVAMHKVQRPGESSHLRRVPRPFPRLDEGTVQWIVDQAAAKMQGAPPAVKAERRTTVPSGPPMTAILERCSGLHVNSARRLEVVRNCISYVFEGKMLEAKKLLPAVLRALKGRAARRCLAQELHLHVQQNRAVLDHQQFDFVVRMMNCCLQDCTSLDEHGIAAALLPLVTAFCRKLSPGVTQFAYSCVQEHVVWSTPQFWEAMFYGDVQTHIRALYLEPTEDLAPAQEVGEAPSQEDERSALDVASEQRRLWPTLSREKQQELVQKEESTVFSQAIHYANRMSYLLLPLDSSKSRLLRERAGLGDLESASNSLVTNSMAGSVAESYDTESGFEDAETCDVAGAVVRFINRFVDKVCTESGVTSDHLKGLHVMVPDIVQMHIETLEAVQRESRRLPPIQKPKLLRPRLLPGEECVLDGLRVYLLPDGREEGAGGSAGGPALLPAEGAVFLTTYRVIFTGMPTDPLVGEQVVVRSFPVAALTKEKRISVQTPVDQLLQDGLQLRSCTFQLLKMAFDEEVGSDSAELFRKQLHKLRYPPDIRATFAFTLGSAHTPGRPPRVTKDKGPSLRTLSRNLVKNAKKTIGRQHVTRKKYNPPSWEHRGQPPPEDQEDEISVSEELEPSTLTPSSALKPSDRMTMSSLVERACCRDYQRLGLGTLSSSLSRAKSEPFRISPVNRMYAICRSYPGLLIVPQSVQDNALQRVSRCYRQNRFPVVCWRSGRSKAVLLRSGGLHGKGVVGLFKAQNAPSPGQSQADSSSLEQEKYLQAVVSSMPRYADASGRNTLSGFSSAHMGSHVPSPRARVTTLSNPMAASASRRTAPRGKWGSVRTSGRSSGLGTDVGSRLAGRDALAPPQANGGPPDPGFLRPQRAALYILGDKAQLKGVRSDPLQQWELVPIEVFEARQVKASFKKLLKACVPGCPAAEPSPASFLRSLEDSEWLIQIHKLLQVSVLVVELLDSGSSVLVGLEDGWDITTQVVSLVQLLSDPFYRTLEGFRLLVEKEWLSFGHRFSHRGAHTLAGQSSGFTPVFLQFLDCVHQVHLQFPMEFEFSQFYLKFLGYHHVSRRFRTFLLDSDYERIELGLLYEEKGERRGQVPCRSVWEYVDRLSKRTPVFHNYMYAPEDAEVLRPYSNVSNLKVWDFYTEETLAEGPPYDWELAQGPPEPPEEERSDGGAPQSRRRVVWPCYDSCPRAQPDAISRLLEELQRLETELGQPAERWKDTWDRVKAAQRLEGRPDGRGTPSSLLVSTAPHHRRSLGVYLQEGPVGSTLSLSLDSDQSSGSTTSGSRQAARRSTSTLYSQFQTAESENRSYEGTLYNILTPGRYQ

SEQ ID NO: 860659 - protein, 961 aa, Homo sapiens
RGSPSFTGMPRTPCIGEQVVVRSFPVAALTKEKRISVQTPVDQLLQDGLQLRSCTFQLLKMAFDEEVGSDSAELFRKQLHKLRYPPDIRATFAFTLGSAHTPGRPPRVTKDKGPSLRTLSRNLVKNAKKTIGRQHVTRKKYNPPSWEHRGQPPPEDQEDEISVSEELEPSTLTPSSALKPSDRMTMSSLVERACCRDYQRLGLGTLSSSLSRAKSEPFRISPVNRMYAICRSYPGLLIVPQSVQDNALQRVSRCYRQNRFPVVCWRSGRSKAVLLRSGGLHGKGVVGLFKAQNAPSPGQSQADSSSLEQEKYLQAVVSSMPRYADASGRNTLSGFSSAHMGSHVPSPRARVTTLSNPMAASASRRTAPRGKWGSVRTSGRSSGLGTDVGSRLAGRDALAPPQANGGPPDPGFLRPQRAALYILGDKAQLKGVRSDPLQQWELVPIEVFEARQVKASFKKLLKACVPGCPAAEPSPASFLRSLEDSEWLIQIHKLLQVSVLVVELLDSGSSVLVGLEDGWDITTQVVSLVQLLSDPFYRTLEGFRLLVEKEWLSFGHRFSHRGAHTLAGQSSGFTPVFLQFLDCVHQVHLQFPMEFEFSQFYLKFLGYHHVSRRFRTFLLDSDYERIELGLLYEEKGERRGQVPCRSVWEYVDRLSKRTPVFHNYMYAPEDAEVLRPYSNVSNLKVWDFYTEETLAEGPPYDWELAQGPPEPPEEERSDGGAPQSRRRVVWPCYDSCPRAQPDAISRLLEELQRLETELGQPAERWKDTWDRVKAAQRLEGRPDGRGTPSSLLVSTAPHHRRSLGVYLQEGPVGSTLSLSLDSDQSSGSTTSGSRQAARRSTSTLYSQFQTAESENRSYEGTLYKKGAFMKPWKARWFVLDKTKHQLRYYDHRVDTECKGVIDLAEVEAVAPGTPTMGAPKTVDEKAFFDVKTTRRVYNFCAQDVPSAQQWVDRIQSCLSDA

SEQ ID NO: 860660 - protein, 533 aa, Homo sapiens
GTFLLDSDYERIELGLLYEEKGERRGQVPCRSVWEYVDRLSKRTPVFHNYTLLWGRRSVGGRIHKLLQVSVLVVELLDSGSSVLVGLEDGWDITTQVVSLVQLLSDPFYRTLEGFRLLVEKEWLSFGHRFSHRGAHTLAGQSSGFTPVFLQFLDCVHQVHLQFPMEFEFSQFYLKFLGYHHVSRRFRTFLLDSDYERIELGLLYEEKGERRGQVPCRSVWEYVDRLSKRTPVFHNYMYAPEDAEVLRPYSNVSNLKVWDFYTEETLAEGPPYDWELAQGPPEPPEEERSDGGAPQSRRRVVWPCYDSCPRAQPDAISRLLEELQRLETELGQPAERWKDTWDRVKAAQRLEGRPDGRGTPSSLLVSTAPHHRRSLGVYLQEGPVGSTLSLSLDSDQSSGSTTSGSRQAARRSTSTLYSQFQTAESENRSYEGTLYKKGAFMKPWKARWFVLDKTKHQLRYYDHRVDTECKGVIDLAEVEAVAPGTPTMGAPKTVDEKAFFDVKTTRRVYNFCAQDVPSAQQWVDRIQSCLSDA

SEQ ID NO: 860661 - protein, 155 aa, Homo sapiens
  misc_feature (2)..(2): Xaa can be any naturally occurring amino acid
AXPTLSNGPSCRYTPSDQSSGSTTSGSRQAARRSTSTLYSQFQTAESENRSYEGTLYKKGAFMKPWKARWFVLDKTKHQLRYYDHRVDTECKGVIDLAEVEAVAPGTPTMGAPKTVDEKAFFDVKTTRRVYNFCAQDVPSAQQWVDRIQSCLSDA

SEQ ID NO: 860662 - protein, 114 aa, Homo sapiens
RPRLLPGEECVLDGLRVYLLPDGREEGAGGSAGGPALLPAEGAVFLTTYRVIFTGMPTDPLGEPADSLALSPPLPQVFGMDGLSLPPSPFSRGFWVPVGNGPLSAPSPPTWDSP

SEQ ID NO: 860663 - protein, 87 aa, Homo sapiens
VSDQVVGGTHGGGGSADSGLLQLRYYDHRVDTECKGVIDLAEVEAVAPGTPTMGAPKTVDEKAFFDVSLGRGLGEGRGSAVWGLRSQ

SEQ ID NO: 860664 - protein, 1923 aa, Homo sapiens; identical to SEQ ID NO: 860648

SEQ ID NO: 860665 - protein, 1486 aa, Homo sapiens
NRLERLGYRPRRSLSSRLHKAAFLGQRGLVEDDFLMKVLEGMAFAGFVSERGVPYRPTDLFDELVAHEVARMRADENHPQRVLRHVQELAEQLYKNENPYPAVAMHKVQRPGESSHLRRVPRPFPRLDEGTVQWIVDQAAAKMQGAPPAVKAERRTTVPSGPPMTAILERCSGLHVNSARRLEVVRNCISYVFEGKMLEAKKLLPAVLRALKGRAARRCLAQELHLHVQQNRAVLDHQQFDFVVRMMNCCLQDCTSLDEHGIAAALLPLVTAFCRKLSPGVTQFAYSCVQEHVVWSTPQFWEAMFYGDVQTHIRALYLEPTEDLAPAQEVGEAPSQEDERSALDVASEQRRLWPTLSREKQQELVQKEESTVFSQAIHYANRMSYLLLPLDSSKSRLLRERAGLGDLESASNSLVTNSMAGSVAESYDTESGFEDAETCDVAGAVVRFINRFVDKVCTESGVTSDHLKGLHVMVPDIVQMHIETLEAVQRESRRLPPIQKPKLLRPRLLPGEECVLDGLRVYLLPDGREEGAGGSAGGPALLPAEGAVFLTTYRVIFTGMPTDPLVGEQVVVRSFPVAALTKEKRISVQTPVDQLLQDGLQLRSCTFQLLKMAFDEEVGSDSAELFRKQLHKLRYPPDIRATFAFTLGSAHTPGRPPRVTKDKGPSLRTLSRNLVKNAKKTIGRQHVTRKKYNPPSWEHRGQPPPEDQEDEISVSEELEPSTLTPSSALKPSDRMTMSSLVERACCRDYQRLGLGTLSSSLSRAKSEPFRISPVNRMYAICRSYPGLLIVPQSVQDNALQRVSRCYRQNRFPVVCWRSGRSKAVLLRSGGLHGKGVVGLFKAQNAPSPGQSQADSSSLEQEKYLQAVVSSMPRYADASGRNTLSGFSSAHMGSHGKWGSVRTSGRSSGLGTDVGSRLAGRDALAPPQANGGPPDPGFLRPQRAALYILGDKAQLKGVRSDPLQQWELVPIEVFEARQVKASFKKLLKACVPGCPAAEPSPASFLRSLEDSEWLIQIHKLLQVSVLVVELLDSGSSVLVGLEDGWDITTQVVSLVQLLSDPFYRTLEGFRLLVEKEWLSFGHRFSHRGAHTLAGQSSGFTPVFLQFLDCVHQVHLQFPMEFEFSQFYLKFLGYHHVSRRFRTFLLDSDYERIELGLLYEEKGERRGQVPCRSVWEYVDRLSKRTPVFHNYMYAPEDAEVLRPYSNVSNLKVWDFYTEETLAEGPPYDWELAQGPPEPPEEERSDGGAPQSRRRVVWPCYDSCPRAQPDAISRLLEELQRLETELGQPAERWKDTWDRVKAAQRLEGRPDGRGTPSSLLVSTAPHHRRSLGVYLQEGPVGSTLSLSLDSDQSSGSTTSGSRQAARRSTSTLYSQFQTAESENRSYEGTLYKKGAFMKPWKARWFVLDKTKHQLRYYDHRVDTECKGVIDLAEVEAVAPGTPTMGAPKTVDEKAFFDVKTTRRVYNFCAQDVPSAQQWVDRIQSCLSDA

SEQ ID NO: 860666 - protein, 1949 aa, Homo sapiens; identical to SEQ ID NO: 860654

SEQ ID NO: 860667 - protein, 1938 aa, Homo sapiens
MAAGTWSPCRRAAAAERTRGVRGARSRPGPGHERAVLESPSRGARPRPSGRPASLAMARLADYFVLVAFGPHPRGSGEGQGQILQRFPEKDWEDNPFPQGIELFCQPSGWQLCPERNPPTFFVAVLTDINSERHYCACLTFWEPAEPSQETTRVEDATEREEEGDEGGQTHLSPTAPAPSAQLFAPKTLVLVSRLDHTEVFRNSLGLIYAIHVEGLNVCLENVIGNLLTCTVPLAGGSQRTISLGAGDRQVIQTPLADSLPVSRCSVALLFRQLGITNVLSLFCAALTEHKVLFLSRSYQRLADACRGLLALLFPLRYSFTYVPILPAQLLEVLSTPTPFIIGVNAAFQAETQELLDVIVADLDGGTVTIPECVHIPPLPEPLQSQTHSVLSMVLDPELELADLAFPPPTTSTSSLKMQDKELRAVFLRLFAQLLQGYRWCLHVVRIHPEPVIRFHKAAFLGQRGLVEDDFLMKVLEGMAFAGFVSERGVPYRPTDLFDELVAHEVARMRADENHPQRVLRHVQELAEQLYKNENPYPAVAMHKVQRPGESSHLRRVPRPFPRLDEGTVQWIVDQAAAKMQGAPPAVKAERRTTVPSGPPMTAILERCSGLHVNSARRLEVVRNCISYVFEGKMLEAKKLLPAVLRALKGRAARRCLAQELHLHVQQNRAVLDHQQFDFVVRMMNCCLQDCTSLDEHGIAAALLPLVTAFCRKLSPGVTQFAYSCVQEHVVWSTPQFWEAMFYGDVQTHIRALYLEPTEDLAPAQEVGEAPSQEDERSALDVASEQRRLWPTLSREKQQELVQKEESTVFSQAIHYANRMSYLLLPLDSSKSRLLRERAGLGDLESASNSLVTNSMAGSVAESYDTESGFEDAETCDVAGAVVRFINRFVDKVCTESGVTSDHLKGLHVMVPDIVQMHIETLEAVQRESRRLPPIQKPKLLRPRLLPGEECVLDGLRVYLLPDGREEGAGGSAGGPALLPAEGAVFLTTYRVIFTGMPTDPLVGEQVVVRSFPVAALTKEKRISVQTPVDQLLQDGLQLRSCTFQLLKMAFDEEVGSDSAELFRKQLHKLRYPPDIRATFAFTLGSAHTPGRPPRVTKDKGPSLRTLSRNLVKNAKKTIGRQHVTRKKYNPPSWEHRGQPPPEDQEDEISVSEELEPSTLTPSSALKPSDRMTMSSLVERACCRDYQRLGLGTLSSSLSRAKSEPFRISPVNRMYAICRSYPGLLIVPQSVQDNALQRVSRCYRQNRFPVVCWRSGRSKAVLLRSGGLHGKGVVGLFKAQNAPSPGQSQADSSSLEQEKYLQAVVSSMPRYADASGRNTLSGFSSAHMGSHVPSPRARVTTLSNPMAASASRRTAPRGKWGSVRTSGRSSGLGTDVGSRLAGRDALAPPQANGGPPDPGFLRPQRAALYILGDKAQLKGVRSDPLQQWELVPIEVFEARQVKASFKKLLKACVPGCPAAEPSPASFLRSLEDSEWLIQIHKLLQVSVLVVELLDSGSSVLVGLEDGWDITTQVVSLVQLLSDPFYRTLEGFRLLVEKEWLSFGHRFSHRGAHTLAGQSSGFTPVFLQFLDCVHQVHLQFPMEFEFSQFYLKFLGYHHVSRRFRTFLLDSDYERIELGLLYEEKGERRGQVPCRSVWEYVDRLSKRTPVFHNYMYAPEDAEVLRPYSNVSNLKVWDFYTEETLAEGPPYDWELAQGPPEPPEEERSDGGAPQSRRRVVWPCYDSCPRAQPDAISRLLEELQRLETELGQPAERWKDTWDRVKAAQRLEGRPDGRGTPSSLLVSTAPHHRRSLGVYLQEGPVGSTLSLSLDSDQSSGSTTSGSRQAARRSTSTLYSQFQTAESENRSYEGTLYKKGAFMKPWKARWFVLDKTKHQLRYYDHRVDTECKGVIDLAEVEAVAPGTPTMGAPKTVDEKAFFDVSLGRGLGEGRGSAVWGLRSQ

SEQ ID NO: 860668 - protein, 1949 aa, Homo sapiens; identical to SEQ ID NO: 860654

SEQ ID NO: 860669 - protein, 1949 aa, Homo sapiens; identical to SEQ ID NO: 860654

SEQ ID NO: 860670 - protein, 1886 aa, Homo sapiens
MAAGTWSPCRRAAAAERTRGVRGARSRPGPGHERAVLESPSRGARPRPSGRPASLAMARLADYFVLVAFGPHPRGSGEGQGQILQRFPEKDWEDNPFPQGIELFCQPSGWQLCPERNPPTFFVAVLTDINSERHYCACLTFWEPAEPSQETTRVEDATEREEEGDEGGQTHLSPTAPAPSAQLFAPKTLVLVSRLDHTEVFRNSLGLIYAIHVEGLNVCLENVIGNLLTCTVPLAGGSQRTISLGAGDRQVIQTPLADSLPVSRCSVALLFRQLGITNVLSLFCAALTEHKVLFLSRSYQRLADACRGLLALLFPLRYSFTYVPILPAQLLEVLSTPTPFIIGVNAAFQAETQELLDVIVADLDGGTVTIPECVHIPPLPEPLQSQTHSVLSMVLDPELELADLAFPPPTTSTSSLKMQDKELRAVFLRLFAQLLQGYRWCLHVVRIHPEPVIRFHKAAFLGQRGLVEDDFLMKVLEGMAFAGFVSERGVPYRPTDLFDELVAHEVARMRADENHPQRVLRHVQELAEQLYKNENPYPAVAMHKVQRPGESSHLRRVPRPFPRLDEGTVQWIVDQAAAKMQGAPPAVKAERRTTVPSGPPMTAILERCSGLHVNSARRLEVVRNCISYVFEGKMLEAKKLLPAVLRALKGRAARRCLAQELHLHVQQNRAVLDHQQFDFVVRMMNCCLQDCTSLDEHGIAAALLPLVTAFCRKLSPGVTQFAYSCVQEHVVWSTPQFWEAMFYGDVQTHIRALYLEPTEDLAPAQEVGEAPSQEDERSALDVASEQRRLWPTLSREKQQELVQKEESTVFSQAIHYANRMSYLLLPLDSSKSRLLRERAGLGDLESASNSLVTNSMAGSVAESYDTESGFEDAETCDVAGAVVRFINRFVDKVCTESGVTSDHLKGLHVMVPDIVQMHIETLEAVQRESRRLPPIQKPKLLRPRLLPGEECVLDGLRVYLLPDGREEGAGGSAGGPALLPAEGAVFLTTYRVIFTGMPTDPLVGEQVVVRSFPVAALTKEKRISVQTPVDQLLQDGLQLRSCTFQLLKMAFDEEVGSDSAELFRKQLHKLRYPPDIRATFAFTLGSAHTPGRPPRVTKDKGPSLRTLSRNLVKNAKKTIGRQHVTRKKYNPPSWEHRGQPPPEDQEDEISVSEELEPSTLTPSSALKPSDRMTMSSLVERACCRDYQRLGLGTLSSSLSRAKSEPFRISPVNRMYAICRSYPGLLIVPQSVQDNALQRVSRCYRQNRFPVVCWRSGRSKAVLLRSGGLHGKGVVGLFKAQNAPSPGQSQADSSSLEQEKYLQAVVSSMPRYADASGRNTLSGFSSAHMGSHVPSPRARVTTLSNPMAASASRRTAPRGKWGSVRTSGRSSGLGTDVGSRLAGRDALAPPQANGGPPDPGFLRPQRAALYILGDKAQLKGVRSDPLQQWELVPIEVFEARQVKASFKKLLKACVPGCPAAEPSPASFLRSLEDSEWLIQIHKLLQVSVLVVELLDSGSSVLVGLEDGWDITTQVVSLVQLLSDPFYRTLEGFRLLVEKEWLSFGHRFSHRGAHTLAGQSSGFTPVFLQFLDCVHQVHLQFPMEFEFSQFYLKFLGYHHVSRRFRTFLLDSDYERIELGLLYEEKGERRGQVPCRSVWEYVDRLSKRTPVFHNYMYAPEDAEVLRPYSNVSNLKVWDFYTEETLAEGPPYDWELAQGPPEPPEEERSDGGAPQSRRRVVWPCYDSCPRAQPDAISRLLEELQRLETELGQPAERWKDTWDRVKAAQRLEGRPDGRGTPSSLLVSTAPHHRRSLGVYLQEGPVGSTLSLSLDSDQSSGSTTSGSRQAARRSTSTLYSQFQTAESENRSYEGTLYKKGAFMKPWKARWFVLDKTKHQLRYYDHSRKTGIL

SEQ ID NO: 860671 - protein, 1380 aa, Homo sapiens
EDGGGNLVPCRRAAAAERTRGVRGARSRPGPGHERAVLESPSRGARPRPSGRPASLAMARLADYFVLVAFGPHPRGSGEGQGQILQRFPEKDWEDNPFPQGIELFCQPSGWQLCPERNPPTFFVAVLTDINSERHYCACLTFWEPAEPSQETTRVEDATEREEEGDEGGQTHLSPTAPAPSAQLFAPKTLVLVSRLDHTEVFRNSLGLIYAIHVEGLNVCLENVIGNLLTCTVPLAGGSQRTISLGAGDRQVIQTPLADSLPVSRCSVALLFRQLGITNVLSLFCAALTEHKVLFLSRSYQRLADACRGLLALLFPLRYSFTYVPILPAQLLEVLSTPTPFIIGVNAAFQAETQELLDVIVADLDGGTVTIPECVHIPPLPEPLQSQTHSVLSMVLDPELELADLAFPPPTTSTSSLKMQDKELRAVFLRLFAQLLQGYRWCLHVVRIHPEPVIRFHKAAFLGQRGLVEDDFLMKVLEGMAFAGFVSERGVPYRPTDLFDELVAHEVARMRADENHPQRVLRHVQELAEQLYKNENPYPAVAMHKVQRPGESSHLRRVPRPFPRLDEGTVQWIVDQAAAKMQGAPPAVKAERRTTVPSGPPMTAILERCSGLHVNSARRLEVVRNCISYVFEGKMLEAKKLLPAVLRALKGRAARRCLAQELHLHVQQNRAVLDHQQFDFVVRMMNCCLQDCTSLDEHGIAAALLPLVTAFCRKLSPGVTQFAYSCVQEHVVWSTPQFWEAMFYGDVQTHIRALYLEPTEDLAPAQEVGEAPSQEDERSALDVASEQRRLWPTLSREKQQELVQKEESTVFSQAIHYANRMSYLLLPLDSSKSRLLRERAGLGDLESASNSLVTNSMAGSVAESYDTESGFEDAETCDVAGAVVRFINRFVDKVCTESGVTSDHLKGLHVMVPDIVQMHIETLEAVQRESRRLPPIQKPKLLRPRLLPGEECVLDGLRVYLLPDGREEGAGGSAGGPALLPAEGAVFLTTYRVIFTGMPTDPLVGEQVVVRSFPVAALTKEKRISVQTPVDQLLQDGLQLRSCTFQLLKMAFDEEVGSDSAELFRKQLHKLRYPPDIRATFAFTLGSAHTPGRPPRVTKDKGPSLRTLSRNLVKNAKKTIGRQHVTRKKYNPPSWEHRGQPPPEDQEDEISVSEELEPSTLTPSSALKPSDRMTMSSLVERACCRDYQRLGLGTLSSSLSRAKSEPFRISPVNRMYAICRSYPGLLIVPQSVQDNALQRVSRCYRQNRFPVVCWRSGRSKAVLLRSGGLHGKGVVGLFKAQNAPSPGQSQADSSSLEQEKYLQAVVSSMPRYADASGRNTLSGFSSAHMGSHVPSPRARSPRCPTPWRPRPPDGPHPEVSGAVSGPVDAAVALAPMWAPG

SEQ ID NO: 860672 - protein, 786 aa, Homo sapiens
SQAVTASKDMSTGPPGRACCRDYQRLGLGTLSSSLSRAKSEPFRISPVNRMYAICRSYPGLLIVPQSVQDNALQRVSRCYRQNRFPVVCWRSGRSKAVLLRSGGLHGKGVVGLFKAQNAPSPGQSQADSSSLEQEKYLQAVVSSMPRYADASGRNTLSGFSSAHMGSHVPSPRARVTTLSNPMAASASRRTAPRGKWGSVRTSGRSSGLGTDVGSRLAGRDALAPPQANGGPPDPGFLRPQRAALYILGDKAQLKGVRSDPLQQWELVPIEVFEARQVKASFKKLLKACVPGCPAAEPSPASFLRSLEDSEWLIQIHKLLQVSVLVVELLDSGSSVLVGLEDGWDITTQVVSLVQLLSDPFYRTLEGFRLLVEKEWLSFGHRFSHRGAHTLAGQSSGFTPVFLQFLDCVHQVHLQFPMEFEFSQFYLKFLGYHHVSRRFRTFLLDSDYERIELGLLYEEKGERRGQVPCRSVWEYVDRLSKRTPVFHNYMYAPEDAEVLRPYSNVSNLKVWDFYTEETLAEGPPYDWELAQGPPEPPEEERSDGGAPQSRRRVVWPCYDSCPRAQPDAISRLLEELQRLETELGQPAERWKDTWDRVKAAQRLEGRPDGRGTPSSLLVSTAPHHRRSLGVYLQEGPVGSTLSLSLDSDQSSGSTTSGSRQAARRSTSTLYSQFQTAESENRSYEGTLYKKGAFMKPWKARWFVLDKTKHQLRYYDHRVDTECKGVIDLAEVEAVAPGTPTMGAPKTVDEKAFFDVKTTRRVYNFCAQDVPSAQQWVDRIQSCLSDA

SEQ ID NO: 860673 - protein, 1115 aa, Homo sapiens
MAAGTWSPCRRAAAAERTRGVRGARSRPGPGHERAVLESPSRGARPRPSGRPASLAMARLADYFVLVAFGPHPRGSGEGQGQILQRFPEKDWEDNPFPQGIELFCQPSGWQLCPERNPPTFFVAVLTDINSERHYCACLTFWEPAEPSQETTRVEDATEREEEGDEGGQTHLSPTAPAPSAQLFAPKTLVLVSRLDHTEVFRNSLGLIYAIHVEGLNVCLENVIGNLLTCTVPLAGGSQRTISLGAGDRQVIQTPLADSLPVSRCSVALLFRQLGITNVLSLFCAALTEHKVLFLSRSYQRLADACRGLLALLFPLRYSFTYVPILPAQLLEVLSTPTPFIIGVNAAFQAETQELLDVIVADLDGGTVTIPECVHIPPLPEPLQSQTHSVLSMVLDPELELADLAFPPPTTSTSSLKMQDKELRAVFLRLFAQLLQGYRWCLHVVRIHPEPVIRFHKAAFLGQRGLVEDDFLMKVLEGMAFAGFVSERGVPYRPTDLFDELVAHEVARMRADENHPQRVLRHVQELAEQLYKNENPYPAVAMHKVQRPGESSHLRRVPRPFPRLDEGTVQWIVDQAAAKMQGAPPAVKAERRTTVPSGPPMTAILERCSGLHVNSARRLEVVRNCISYVFEGKMLEAKKLLPAVLRALKGRAARRCLAQELHLHVQQNRAVLDHQQFDFVVRMMNCCLQDCTSLDEHGIAAALLPLVTAFCRKLSPGVTQFAYSCVQEHVVWSTPQFWEAMFYGDVQTHIRALYLEPTEDLAPAQEVGEAPSQEDERSALDVASEQRRLWPTLSREKQQELVQKEESTVFSQAIHYANRMSYLLLPLDSSKSRLLRERAGLGDLESASNSLVTNSMAGSVAESYDTESGFEDAETCDVAGAVVRFINRFVDKVCTESGVTSDHLKGLHVMVPDIVQMHIETLEAVQRESRRLPPIQKPKLLRPRLLPGEECVLDGLRVYLLPDGREEGAGGSAGGPALLPAEGAVFLTTYRVIFTGMPTDPLVGEQVVVRSFPVAALTKEKRISVQTPVDQLLQDGLQLRSCTFQLLKMAFDEEVGSDSAELFRKQLHKLRYPPDIRATFAFTLGSAHTPGRPPRVTAEHRAGRWPRYSPQWACK

SEQ ID NO: 860674 - protein, 113 aa, Homo sapiens
ALYLEPTEDLAPAQVRRDSLGWGLGARGWGSVAPAHACGAVEEVGEAPSQEDERSALDVASEQRRLWPTLSREKQQELVQKEESTVFSQAIHYANRMSYLLLPLDSSKSRLLR

SEQ ID NO: 860675 - protein, 156 aa, Homo sapiens
GGAWGVGVLPREEREAQQGPGSPNQAEVQPGWSRLPCPPRWASSVRCPLLCVRGLLFLTGCFWDNGHLYREDQTSPAPGLRCLNWLDAQSGLASAPVSGAGNHSYCRNPDEDPRGPWCYVSGEAGVPEKRPCEDLRCPGTCPGPRESPLLALTGSG

SEQ ID NO: 860676 - protein, 173 aa, Homo sapiens
MLLAWVQAFLVSNMLLAEAYGSGGCFWDNGHLYREDQTSPAPGLRCLNWLDAQSGLASAPVSGAGNHSYCRNPDEDPRGPWCYVSGEAGVPEKRPCEDLRCPETTSQALPAFTTEIQEASEGPGADEVQVFAPANALPARSEAAAVQPVIGISQRVRMNSKEKKDLGTLGGRI

SEQ ID NO: 860677 - protein, 202 aa, Homo sapiens
ASTPELTASTSCGYIGRGLQRSCNREGPWEIARIWTDKDVGETTSQALPAFTTEIQEASEGPGADEVQVFAPANALPARSEAAAVQPVIGISQRVRMNSKEKKDLGTLGYVLGITMMVIIIAIGAGIILGYSYKRGKDLKEQHDQKVCEREMQRITLPLSAFTNPTCEIVDEKTVVVHTSQTPVDPQEGSTPLMGQAGTPGA

SEQ ID NO: 860678 - protein, 263 aa, Homo sapiens
MLLAWVQAFLVSNMLLAEAYGSGGCFWDNGHLYREDQTSPAPGLRCLNWLDAQSGLASAPVSGAGNHSYCRNPDEDPRGPWCYVSGEAGVPEKRPCEDLRCPETTSQALPAFTTEIQEASEGPGADEVQVFAPANALPARSEAAAVQPVIGISQRVRMNSKEKKDLGTLGYVLGITMMVIIIAIGAGIILGYSYKRGKDLKEQHDQKVCEREMQRITLPLSAFTNPTCEIVDEKTVVVHTSQTPVDPQEGSTPLMGQAGTPGA

SEQ ID NO: 860679 - protein, 263 aa, Homo sapiens; identical to SEQ ID NO: 860678

SEQ ID NO: 860680 - protein, 263 aa, Homo sapiens; identical to SEQ ID NO: 860678

SEQ ID NO: 860681 - protein, 263 aa, Homo sapiens; identical to SEQ ID NO: 860678

SEQ ID NO: 860682 - protein, 263 aa, Homo sapiens; identical to SEQ ID NO: 860678

SEQ ID NO: 860683 - protein, 331 aa, Homo sapiens
GGAWGVGVLPREEREAQQGPGSPNQAEVQPGWSRLPCPPRWASSVRCPLLCVRGLLFLTGCFWDNGHLYREDQTSPAPGLRCLNWLDAQSGLASAPVSGKCPPGDGAGAGGRRPRSRCQPRQHISFSPLLGAGNHSYCRNPDEDPRGPWCYVSGEAGVPEKRPCEDLRCPETTSQALPAFTTEIQEASEGPGADEVQVFAPANALPARSEAAAVQPVIGISQRVRMNSKEKKDLGTLGYVLGITMMVIIIAIGAGIILGYSYKRGKDLKEQHDQKVCEREMQRITLPLSAFTNPTCEIVDEKTVVVHTSQTPVDPQEGSTPLMGQAGTPGA

SEQ ID NO: 860684 - protein, 263 aa, Homo sapiens; identical to SEQ ID NO: 860678

SEQ ID NO: 860685 - protein, 120 aa, Homo sapiens
MLLAWVQAFLVSNMLLAEAYGSGGCFWDNGHLYREDQTSPAPGLRCLNWLDAQSGLASAPVSGAGNHSYCRNPDEDPRGPWCYVSGEAGVPEKRPCEDLRCPGTCPGPRESPLLALTGSG

SEQ ID NO: 860686 - protein, 690 aa, Homo sapiens
MEKILQMAEGIDIGEMPSYDLVLSKPSKGQKRHLSTCDGQNPPKKQAGSKFHARPRFEPVHFVASSSKDERQEDPYGPQTKEVNEQTHFASMPRDIYQDYTQDSFSIQDGNSQYCDSSGFILTKDQPVTANMYFDSGNPAPSTTSQQANSQSTPEPSPSQTFPESVVAEKQYFIEKLTATIWKNLSNPEMTSGSDKINYTYMLTRCIQACKTNPEYIYAPLKEIPPADIPKNKKLLTDGYACEVRCQNIYLTTGYAGSKNGSRDRATELAVKLLQKRIEVRVVRRKFKHTFGEDLVVCQIGMSSYEFPPALKPPEDLVVLGKDASGQPIFNASAKHWTNFVITENANDAIGILNNSASFNKMSIEYKYEMMPNRTWRCRVFLQDHCLAEGYGTKKTSKHAAADEALKILQKTQPTYPSVKSSQCHTGSSPRGSGKKKDIKDLVVYENSSNPVCTLNDTAQFNRMTVEYVYERMTGLRWKCKVILESEVIAEAVGVKKTVKYEAAGEAVKTLKKTQPTVINNLKKGAVEDVISRNEIQGRSAEEAYKQQIKEDNIGNQLLRKMGWTGGGLGKSGEGIREPISVKEQHKREGLGLDVERVNKIAKRDIEQIIRNYARSESHTDLTFSRELTNDERKQIHQIAQKYGLKSKSHGVGHDRYLVVGRKRRKEDLLDQLKQEGQVGHYELVMPQAN

SEQ ID NO: 860687 - protein, 705 aa, Homo sapiens
MGFMLPLIFRYSPRLMEKILQMAEGIDIGEMPSYDLVLSKPSKGQKRHLSTCDGQNPPKKQAGSKFHARPRFEPVHFVASSSKDERQEDPYGPQTKEVNEQTHFASMPRDIYQDYTQDSFSIQDGNSQYCDSSGFILTKDQPVTANMYFDSGNPAPSTTSQQANSQSTPEPSPSQTFPESVVAEKQYFIEKLTATIWKNLSNPEMTSGSDKINYTYMLTRCIQACKTNPEYIYAPLKEIPPADIPKNKKLLTDGYACEVRCQNIYLTTGYAGSKNGSRDRATELAVKLLQKRIEVRVVRRKFKHTFGEDLVVCQIGMSSYEFPPALKPPEDLVVLGKDASGQPIFNASAKHWTNFVITENANDAIGILNNSASFNKMSIEYKYEMMPNRTWRCRVFLQDHCLAEGYGTKKTSKHAAADEALKILQKTQPTYPSVKSSQCHTGSSPRGSGKKKDIKDLVVYENSSNPVCTLNDTAQFNRMTVEYVYERMTGLRWKCKVILESEVIAEAVGVKKTVKYEAAGEAVKTLKKTQPTVINNLKKGAVEDVISRNEIQGRSAEEAYKQQIKEDNIGNQLLRKMGWTGGGLGKSGEGIREPISVKEQHKREGLGLDVERVNKIAKRDIEQIIRNYARSESHTDLTFSRELTNDERKQIHQIAQKYGLKSKSHGVGHDRYLVVGRKRRKEDLLDQLKQEGQVGHYELVMPQAN

SEQ ID NO: 860688 - protein, 750 aa, Homo sapiens
EPVLEQWRYSHESDWQWALRRSFICRHLHSYPGAALDQLLALSAAWTNHVFLGCRYSPRLMEKILQMAEGIDIGEMPSYDLVLSKPSKGQKRHLSTCDGQNPPKKQAGSKFHARPRFEPVHFVASSSKDERQEDPYGPQTKEVNEQTHFASMPRDIYQDYTQDSFSIQDGNSQYCDSSGFILTKDQPVTANMYFDSGNPAPSTTSQQANSQSTPEPSPSQTFPESVVAEKQYFIEKLTATIWKNLSNPEMTSGSDKINYTYMLTRCIQACKTNPEYIYAPLKEIPPADIPKNKKLLTDGYACEVRCQNIYLTTGYAGSKNGSRDRATELAVKLLQKRIEVRVVRRKFKHTFGEDLVVCQIGMSSYEFPPALKPPEDLVVLGKDASGQPIFNASAKHWTNFVITENANDAIGILNNSASFNKMSIEYKYEMMPNRTWRCRVFLQDHCLAEGYGTKKTSKHAAADEALKILQKTQPTYPSVKSSQCHTGSSPRGSGKKKDIKDLVVYENSSNPVCTLNDTAQFNRMTVEYVYERMTGLRWKCKVILESEVIAEAVGVKKTVKYEAAGEAVKTLKKTQPTVINNLKKGAVEDVISRNEIQGRSAEEAYKQQIKEDNIGNQLLRKMGWTGGGLGKSGEGIREPISVKEQHKREGLGLDVERVNKIAKRDIEQIIRNYARSESHTDLTFSRELTNDERKQIHQIAQKYGLKSKSHGVGHDRYLVVGRKRRKEDLLDQLKQEGQVGHYELVMPQAN

SEQ ID NO: 860689 - protein, 193 aa, Homo sapiens
EPVLEQWRYSHESDWQWALRRSFICRHLHSYPGAALDQLLALSAAWTNHVFLGCRYSPRLMEKILQMAEGIDIGEMPSYDLVLSKPSKGQKRHLSTCDGQNPPKKQAGSKFHARPRFEPVHFVASSSKDERQEDPYGPQTKEVNEQTHFASMPRDIYQDYTQDSFSIQDGNSQYCDSSGPSLKKLIKPEKPTL

SEQ ID NO: 860690 - protein, 390 aa, Homo sapiens
MVEADRPGKLFIGGLNTETNEKALETVFGKYGRIVEVLLIKDRETNKSRGFAFVTFESPADAKDAARDMNGKSLDGKAIKVEQATKPSFERGRHGPPPPPRSRGPPRGFGAGRGGSGGTRGPPSRGGHMDDGGYSMNFNMSSSRGPLPVKRGPPPRSGGPSPKRSAPSGLVRSSSGMGGRAPLSRGRDSYGGPPRREPLPSRRDVYLSPRDDGYSTKDSYSSRDYPSSRDTRDYAPPPRDYTYRDYGHSSSRDDYPSRGYGDRDGYGRDRDYSDHPSGGSYRDSYESYGNSRSAPLTRGPPPSYGGSSRYDDYSSSRDGYGGSRDSYSSSRSDLYSSCDRVGRQERGLPPSVERGYPSSRDSYSSSSRGAPRGAGPGGSRSDRGGGRSRY

SEQ ID NO: 860691 - protein, 322 aa, Homo sapiens
MNGKSLDGKAIKVEQATKPSFERGRHGPPPPPRSRGPPRGFGAGRGGSGGTRGPPSRGGHMDDGGYSMNFNMSSSRGPLPVKRGPPPRSGGPSPKRSAPSGLVRSSSGMGGRAPLSRGRDSYGGPPRREPLPSRRDVYLSPRDDGYSTKDSYSSRDYPSSRDTRDYAPPPRDYTYRDYGHSSSRDDYPSRGYGDRDGYGRDRDYSDHPSGGSYRDSYESYGNSRSAPLTRGPPPSYGGSSRYDDYSSSRDGYGGSRDSYSSSRSDLYSSCDRVGRQERGLPPSVERGYPSSRDSYSSSSRGAPRGAGPGGSRSDRGGGRSRY

SEQ ID NO: 860692 - protein, 291 aa, Homo sapiens
MVEADRPGKLFIGGLNTETNEKALETVFGKYGRIVEVLLIKDRETNKSRGFAFVTFESPADAKDAARDMNGKSTFTGNFLGREKPSRWQQATKPSFESALYVTRLGGIPAPSHRCFRPKEGRITKNLRWGGAARSQAFFNATVPSHSTWLPFFQSGPKNRGAWGTPQGAGVAPSFGGGNTMAPVPPPPHRRATVGTPNGRGGGWENPPPGFFPRPPPFPTGGAGNDPHFGAPTSWSKPPGRWPLRAVTRPPTLLYTTSFFYVRTAQIRAESTKQTPQMQAHIYSKYDDHSY

SEQ ID NO: 860693 - protein, 390 aa, Homo sapiens; identical to SEQ ID NO: 860690

SEQ ID NO: 860694 - protein, 286 aa, Homo sapiens
KKQAGQLWERGVSDSCCQQAPGQSEKEGQIPSKSQRRQLTLSANAQVLSDSVPPVPVPRMACTKTLQQSQPISAGATTTTTAVAPAGGHSGSTECDLECLVCREPYSCPRLPKLLACQHAFCAICLKLLLCVQDNTWSITCPLCRKVTAVPGGLICSLRDHEAVVGQLAQPCTEVSLCPQGLVDPADLAAGHPSLVGEDGQDEVSANHVAARRLAAHLLLLALLIILIGPFIYPGVLRWVLTFIIALALLMSTLFCCLPSTRGSCWPSSRTLFCREQKHSHISSIA

SEQ ID NO: 860695 - protein, 649 aa, Homo sapiens
MASVSALTEELDSITSELHAVEIQIQELTERQQELIQKKKVLTKKIKQCLEDSDAGASNEYDSSPAAWNKEDFPWSGKVKDILQNVFKLEKFRPLQLETINVTMAGKEVFLVMPTGGGKSLCYQLPALCSDGFTLVICPLISLMEDQLMVLKQLGISATMLNASSSKEHVKWVHAEMVNKNSELKLIYVTPEKIAKSKMFMSRLEKAYEARRFTRIAVDEVHCCSQWGHDFRPDYKALGILKRQFPNASLIGLTATATNHVLTDAQKILCIEKCFTFTASFNRPNLYYEVRQKPSNTEDFIEDIVKLINGRYKGQSGIIYCFSQKDSEQVTVSLQNLGIHAGAYHANLEPEDKTTVHRKWSANEIQVVVATVAFGMGIDKPDVRFVIHHSMSKSMENYYQESGRAGRDDMKADCILYYGFGDIFRISSMVVMENVGQQKLYEMVSYCQNISKCRRVLMAQHFDEVWNSEACNKMCDNCCKDSAFERKNITEYCRDLIKILKQAEELNEKLTPLKLIDSWMGKGAAKLRVAGVVAPTLPREDLEKIIAHFLIQQYLKEDYSFTAYATISYLKIGPKANLLNNEAHAITMQVTKSTQNSFRAESSQTCHSEQGDKKMEEKNSGNFQKKAANMLQQSGSKNTGAKKRKIDDA

SEQ ID NO: 860696 - protein, 649 aa, Homo sapiens; identical to SEQ ID NO: 860695

SEQ ID NO: 860697 - protein, 649 aa, Homo sapiens; identical to SEQ ID NO: 860695

SEQ ID NO: 860698 - protein, 649 aa, Homo sapiens; identical to SEQ ID NO: 860695

SEQ ID NO: 860699 - protein, 649 aa, Homo sapiens; identical to SEQ ID NO: 860695

SEQ ID NO: 860700 - protein, 649 aa, Homo sapiens; identical to SEQ ID NO: 860695

SEQ ID NO: 860701 - protein, 649 aa, Homo sapiens; identical to SEQ ID NO: 860695

SEQ ID NO: 860702 - protein, 603 aa, Homo sapiens [sequence omitted]

SEQ ID NO: 860703 - protein, 1231 aa, Homo sapiens
MIAAPEIPTDFNLLQESETHFSSDTDFEDIEGKNQKQGKGKTCKKGKKGPAEKGKGGNGGGKPPSGPNRMNGHHQQNGVENMMLFEVVKMGKSAMQSVVDDWIESYKHDRDIALLDLINFFIQCSGCKGVVTAEMFRHMQNSEIIRKMTEEFDEDSGDYPLTMAGPQWKKFKSSFCEFIGVLVRQCQYSIIYDEYMMDTVISLLTGLSDSQVRAFRHTSTLAAMKLMTALVNVALNLSINMDNTQRQYEAERNKMIGKRANERLELLLQKRKELQENQDEIENMMNAIFKGVFVHRYRDAIAEIRAICIEEIGIWMKMYSDAFLNDSYLKYVGWTMHDKQGEVRLKCLTALQGLYYNKELNSKLELFTSRFKDRIVSMTLDKEYDVAVQAIKLLTLVLQSSEEVLTAEDCENVYHLVYSAHRPVAVAAGEFLYKKLFSRRDPEEDGMMKRRGRQGPNANLVKTLVFFFLESELHEHAAYLVDSMWDCATELLKDWECMNSLLLEEPLSGEEALTDRQESALIEIMLCTIRQAAECHPPVGRGTGKRVLTAKEKKTQLDDRTKITELFAVALPQLLAKYSVDAEKVTNLLQLPQYFDLEIYTTGRLEKHLDALLRQIRNIVEKHTDTDVLEACSKTYHALCNEEFTIFNRVDISRSQLIDELADKFNRLLEDFLQEGEEPDEDDAYQVLSTLKRITAFHNAHDLSKWDLFACNYKLLKTGIENGDMPEQIVIHALQCTHYVILWQLAKITESSSTKEDLLRLKKQMRVFCQICQHYLTNVNTTVKEQAFTILCDILMIFSHQIMSGGRDMLEPLVYTPDSSLQSELLSFILDHVFIEQDDDNNSADGQQEDEASKIEALHKRRNLLAAFCKLIVYTVVEMNTAADIFKQYMKYYNDYGDIIKETMSKTRQIDKIQCAKTLILSLQQLFNEMIQENGYNFDRSSSTFSGIKELARRFALTFGLDQLKTREAIAMLHKDGIEFAFKEPNPQGESHPPLNLAFLDILSEFSSKLLRQDKRTVYVYLEKFMTFQMSLRREDVWLPLMSYRNSLLAGGDDDTMSVISGISSRGSTVRSKKSKPSTGKRKVVEGMQLSLTEESSSSDSMWLSREQTLHTPVMMQTPQLTSTIMREPKRLRPEDSFMSVYPMQTEHHQTPLDYNRRGTSLMEDDEEPIVEDVMMSSEGRIEDLNEGMDFDTMDIDLPPSKNRRERTELKPDFFDPASIMDESVLGVSMF

SEQ ID NO: 860704 - protein, 1231 aa, Homo sapiens; identical to SEQ ID NO: 860703

SEQ ID NO: 860705 - protein, 1223 aa, Homo sapiens
SSSSFHHSILLWISTTEELFVEKFSSCYCYWRITCKKGKKGPAEKGKGGNGGGKPPSGPNRMNGHHQQNGVENMMLFEVVKMGKSAMQSVVDDWIESYKHDRDIALLDLINFFIQCSGCKGVVTAEMFRHMQNSEIIRKMTEEFDEDSGDYPLTMAGPQWKKFKSSFCEFIGVLVRQCQYSIIYDEYMMDTVISLLTGLSDSQVRAFRHTSTLAAMKLMTALVNVALNLSINMDNTQRQYEAERNKMIGKRANERLELLLQKRKELQENQDEIENMMNAIFKGVFVHRYRDAIAEIRAICIEEIGIWMKMYSDAFLNDSYLKYVGWTMHDKQGEVRLKCLTALQGLYYNKELNSKLELFTSRFKDRIVSMTLDKEYDVAVQAIKLLTLVLQSSEEVLTAEDCENVYHLVYSAHRPVAVAAGEFLYKKLFSRRDPEEDGMMKRRGRQGPNANLVKTLVFFFLESELHEHAAYLVDSMWDCATELLKDWECMNSLLLEEPLSGEEALTDRQESALIEIMLCTIRQAAECHPPVGRGTGKRVLTAKEKKTQLDDRTKITELFAVALPQLLAKYSVDAEKVTNLLQLPQYFDLEIYTTGRLEKHLDALLRQIRNIVEKHTDTDVLEACSKTYHALCNEEFTIFNRVDISRSQLIDELADKFNRLLEDFLQEGEEPDEDDAYQVLSTLKRITAFHNAHDLSKWDLFACNYKLLKTGIENGDMPEQIVIHALQCTHYVILWQLAKITESSSTKEDLLRLKKQMRVFCQICQHYLTNVNTTVKEQAFTILCDILMIFSHQIMSGGRDMLEPLVYTPDSSLQSELLSFILDHVFIEQDDDNNSADGQQEDEASKIEALHKRRNLLAAFCKLIVYTVVEMNTAADIFKQYMKYYNDYGDIIKETMSKTRQIDKIQCAKTLILSLQQLFNEMIQENGYNFDRSSSTFSGIKELARRFALTFGLDQLKTREAIAMLHKDGIEFAFKEPNPQGESHPPLNLAFLDILSEFSSKLLRQDKRTVYVYLEKFMTFQMSLRREDVWLPLMSYRNSLLAGGDDDTMSVISGISSRGSTVRSKKSKPSTGKRKVVEGMQLSLTEESSSSDSMWLSREQTLHTPVMMQTPQLTSTIMREPKRLRPEDSFMSVYPMQTEHHQTPLDYNRRGTSLMEDDEEPIVEDVMMSSEGRIEDLNEGMDFDTMDIDLPPSKNRRERTELKPDFFDPASIMDESVLGVSMF

SEQ ID NO: 860706 - protein, 1231 aa, Homo sapiens; identical to SEQ ID NO: 860703

SEQ ID NO: 860707 - protein, 873 aa, Homo sapiens
LLLPRPIISSAWWGNCWGRRLASISPSLPRPDFGQFSSGNKSSEEVLTAEDCENVYHLVYSAHRPVAVAAGEFLYKKLFSRRDPEEDGMMKRRGRQGPNANLVKTLVFFFLESELHEHAAYLVDSMWDCATELLKDWECMNSLLLEEPLSGEEALTDRQESALIEIMLCTIRQAAECHPPVGRGTGKRVLTAKEKKTQLDDRTKITELFAVALPQLLAKYSVDAEKVTNLLQLPQYFDLEIYTTGRLEKHLDALLRQIRNIVEKHTDTDVLEACSKTYHALCNEEFTIFNRVDISRSQLIDELADKFNRLLEDFLQEGEEPDEDDAYQVLSTLKRITAFHNAHDLSKWDLFACNYKLLKTGIENGDMPEQIVIHALQCTHYVILWQLAKITESSSTKEDLLRLKKQMRVFCQICQHYLTNVNTTVKEQAFTILCDILMIFSHQIMSGGRDMLEPLVYTPDSSLQSELLSFILDHVFIEQDDDNNSADGQQEDEASKIEALHKRRNLLAAFCKLIVYTVVEMNTAADIFKQYMKYYNDYGDIIKETMSKTRQIDKIQCAKTLILSLQQLFNEMIQENGYNFDRSSSTFSGIKELARRFALTFGLDQLKTREAIAMLHKDGIEFAFKEPNPQGESHPPLNLAFLDILSEFSSKLLRQDKRTVYVYLEKFMTFQMSLRREDVWLPLMSYRNSLLAGGDDDTMSVISGISSRGSTVRSKKSKPSTGKRKVVEGMQLSLTEESSSSDSMWLSREQTLHTPVMMQTPQLTSTIMREPKRLRPEDSFMSVYPMQTEHHQTPLDYNRRGTSLMEDDEEPIVEDVMMSSEGRIEDLNEGMDFDTMDIDLPPSKNRRERTELKPDFFDPASIMDESVLGVSMF

SEQ ID NO: 860708 - protein, 859 aa, Homo sapiens
DLSIPSEARLRHELSCSCPRNSLRRKKSSEEVLTAEDCENVYHLVYSAHRPVAVAAGEFLYKKLFSRRDPEEDGMMKRRGRQGPNANLVKTLVFFFLESELHEHAAYLVDSMWDCATELLKDWECMNSLLLEEPLSGEEALTDRQESALIEIMLCTIRQAAECHPPVGRGTGKRVLTAKEKKTQLDDRTKITELFAVALPQLLAKYSVDAEKVTNLLQLPQYFDLEIYTTGRLEKHLDALLRQIRNIVEKHTDTDVLEACSKTYHALCNEEFTIFNRVDISRSQLIDELADKFNRLLEDFLQEGEEPDEDDAYQVLSTLKRITAFHNAHDLSKWDLFACNYKLLKTGIENGDMPEQIVIHALQCTHYVILWQLAKITESSSTKEDLLRLKKQMRVFCQICQHYLTNVNTTVKEQAFTILCDILMIFSHQIMSGGRDMLEPLVYTPDSSLQSELLSFILDHVFIEQDDDNNSADGQQEDEASKIEALHKRRNLLAAFCKLIVYTVVEMNTAADIFKQYMKYYNDYGDIIKETMSKTRQIDKIQCAKTLILSLQQLFNEMIQENGYNFDRSSSTFSGIKELARRFALTFGLDQLKTREAIAMLHKDGIEFAFKEPNPQGESHPPLNLAFLDILSEFSSKLLRQDKRTVYVYLEKFMTFQMSLRREDVWLPLMSYRNSLLAGGDDDTMSVISGISSRGSTVRSKKSKPSTGKRKVVEGMQLSLTEESSSSDSMWLSREQTLHTPVMMQTPQLTSTIMREPKRLRPEDSFMSVYPMQTEHHQTPLDYNRRGTSLMEDDEEPIVEDVMMSSEGRIEDLNEGMDFDTMDIDLPPSKNRRERTELKPDFFDPASIMDESVLGVSMF

SEQ ID NO: 860709 - protein, 1213 aa, Homo sapiens
MIAAPEIPTDFNLLQESETHFSSDTDFEDIEGKNQKQGKGKTCKKGKKGPAEKGKGGNGGGKPPSGPNRMNGHHQQNGVENMMLFEVVKMGKSAMQSVVDDWIESYKHDRDIALLDLINFFIQCSGCKGVVTAEMFRHMQNSEIIRKMTEEFDEDSGDYPLTMAGPQWKKFKSSFCEFIGVLVRQCQYSIIYDEYMMDTVISLLTGLSDSQVRAFRHTSTLAAMKLMTALVNVALNLSINMDNTQRQYEAERNKMIGKRANERLELLLQKRKELQENQDEIENMMNAIFKGVFVHRYRDAIAEIRAICIEEIGIWMKMYSDAFLNDSYLKYVGWTMHDKQGEVRLKCLTALQGLYYNKELNSKLELFTSRFKDRIVSMTLDKEYDVAVQAIKLLTLVLQSSEEVLTAEDCENVYHLVYSAHRPVAVAAGEFLYKKLFSRRDPEEDGMMKRRGRQGPNANLVKTLVFFFLESELHEHAAYLVDSMWDCATELLKDWECMNSLLLEEPLSGEEALTDRQESALIEIMLCTIRQAAECHPPVGRGTGKRVLTAKEKKTQLDDRTKITELFAVALPQLLAKYSVDAEKVTNLLQLPQYFDLEIYTTGRLEKHLDALLRQIRNIVEKHTDTDVLEACSKTYHALCNEEFTIFNRVDISRSQLIDELADKFNRLLEDFLQEGEEPDEDDAYQVLSTLKRITAFHNAHDLSKWDLFACNYKLLKTGIENGDMPEQIVIHALQCTHYVILWQLAKITESSSTKEDLLRLKKQMRVFCQICQHYLTNVNTTVKEQAFTILCDILMIFSHQIMSGGRDMLEPLVYTPDSSLQSELLSFILDHVFIEQDDDNNSADGQQEDEASKIEALHKRRNLLAAFCKLIVYTVVEMNTAADIFKQYMKYYNDYGDIIKETMSKTRQIDKIQCAKTLILSLQQLFNEMIQENGYNFDRSSSTFSGIKELARRFALTFGLDQLKTREAIAMLHKDGIEFAFKEPNPQGESHPPLNLAFLDILSEFSSKLLRQDKRTVYVYLEKFMTFQMSLRREDVWLPLMSYRNSLLAGGDDDTMSVISGISSRGSTVRSKKSKPSTGKRKVVEGMQLSLTEESSSSDSMWLSREQTLHTPVMMQTPQLTSTIMREPNHQTPLDYNRRGTSLMEDDEEPIVEDVMMSSEGRIEDLNEGMDFDTMDIDLPPSKNRRERTELKPDFFDPASIMDESVLGVSMF

SEQ ID NO: 860710 - protein, 1162 aa, Homo sapiens
MNGHHQQNGVENMMLFEVVKMGKSAMQSVVDDWIESYKHDRDIALLDLINFFIQCSGCKGVVTAEMFRHMQNSEIIRKMTEEFDEDSGDYPLTMAGPQWKKFKSSFCEFIGVLVRQCQYSIIYDEYMMDTVISLLTGLSDSQVRAFRHTSTLAAMKLMTALVNVALNLSINMDNTQRQYEAERNKMIGKRANERLELLLQKRKELQENQDEIENMMNAIFKGVFVHRYRDAIAEIRAICIEEIGIWMKMYSDAFLNDSYLKYVGWTMHDKQGEVRLKCLTALQGLYYNKELNSKLELFTSRFKDRIVSMTLDKEYDVAVQAIKLLTLVLQSSEEVLTAEDCENVYHLVYSAHRPVAVAAGEFLYKKLFSRRDPEEDGMMKRRGRQGPNANLVKTLVFFFLESELHEHAAYLVDSMWDCATELLKDWECMNSLLLEEPLSGEEALTDRQESALIEIMLCTIRQAAECHPPVGRGTGKRVLTAKEKKTQLDDRTKITELFAVALPQLLAKYSVDAEKVTNLLQLPQYFDLEIYTTGRLEKHLDALLRQIRNIVEKHTDTDVLEACSKTYHALCNEEFTIFNRVDISRSQLIDELADKFNRLLEDFLQEGEEPDEDDAYQVLSTLKRITAFHNAHDLSKWDLFACNYKLLKTGIENGDMPEQIVIHALQCTHYVILWQLAKITESSSTKEDLLRLKKQMRVFCQICQHYLTNVNTTVKEQAFTILCDILMIFSHQIMSGGRDMLEPLVYTPDSSLQSELLSFILDHVFIEQDDDNNSADGQQEDEASKIEALHKRRNLLAAFCKLIVYTVVEMNTAADIFKQYMKYYNDYGDIIKETMSKTRQIDKIQCAKTLILSLQQLFNEMIQENGYNFDRSSSTFSGIKELARRFALTFGLDQLKTREAIAMLHKDGIEFAFKEPNPQGESHPPLNLAFLDILSEFSSKLLRQDKRTVYVYLEKFMTFQMSLRREDVWLPLMSYRNSLLAGGDDDTMSVISGISSRGSTVRSKKSKPSTGKRKVVEGMQLSLTEESSSSDSMWLSREQTLHTPVMMQTPQLTSTIMREPKRLRPEDSFMSVYPMQTEHHQTPLDYNRRGTSLMEDDEEPIVEDVMMSSEGRIEDLNEGMDFDTMDIDLPPSKNRRERTELKPDFFDPASIMDESVLGVSMF

SEQ ID NO: 860711 - protein, 869 aa, Homo sapiens
MIAAPEIPTDFNLLQESETHFSSDTDFEDIEGKNQKQGKGKTCKKGKKGPAEKGKGGNGGGKPPSGPNRMNGHHQQNGVENMMLFEVVKMGKSAMQSVVDDWIESYKHDRDIALLDLINFFIQCSGCKGVVTAEMFRHMQNSEIIRKMTEEFDEDSGDYPLTMAGPQWKKFKSSFCEFIGVLVRQCQYSIIYDEYMMDTVISLLTGLSDSQVRAFRHTSTLAAMKLMTALVNVALNLSINMDNTQRQYEAERNKMIGKRANERLELLLQKRKELQENQDEIENMMNAIFKGVFVHRYRDAIAEIRAICIEEIGIWMKMYSDAFLNDSYLKYVGWTMHDKQGEVRLKCLTALQGLYYNKELNSKLELFTSRFKDRIVSMTLDKEYDVAVQAIKLLTLVLQSSEEVLTAEDCENVYHLVYSAHRPVAVAAGEFLYKKLFSRRDPEEDGMMKRRGRQGPNANLVKTLVFFFLESELHEHAAYLVDSMWDCATELLKDWECMNSLLLEEPLSGEEALTDRQESALIEIMLCTIRQAAECHPPVGRGTGKRVLTAKEKKTQLDDRTKITELFAVALPQLLAKYSVDAEKVTNLLQLPQYFDLEIYTTGRLEKHLDALLRQIRNIVEKHTDTDVLEACSKTYHALCNEEFTIFNRVDISRSQLIDELADKFNRLLEDFLQEGEEPDEDDAYQVLSTLKRITAFHNAHDLSKWDLFACNYKLLKTGIENGDMPEQIVIHALQCTHYVILWQLAKITESSSTKEDLLRLKKQMRVFCQICQHYLTNVNTTVKEQAFTILCDILMIFSHQIMSGGRDMLEPLVYTPDSSLQSELLSFILDHVFIEQDDDNNSADGTKTGASCSHQVVILYCWVLRNQG

SEQ ID NO: 860712 - protein, 615 aa, Homo sapiens
MIAAPEIPTDFNLLQESETHFSSDTDFEDIEGKNQKQGKGKTCKKGKKGPAEKGKGGNGGGKPPSGPNRMNGHHQQNGVENMMLFEVVKMGKSAMQSVVDDWIESYKHDRDIALLDLINFFIQCSGCKGVVTAEMFRHMQNSEIIRKMTEEFDEDSGDYPLTMAGPQWKKFKSSFCEFIGVLVRQCQYSIIYDEYMMDTVISLLTGLSDSQVRAFRHTSTLAAMKLMTALVNVALNLSINMDNTQRQYEAERNKMIGKRANERLELLLQKRKELQENQDEIENMMNAIFKGVFVHRYRDAIAEIRAICIEEIGIWMKMYSDAFLNDSYLKYVGWTMHDKQGEVRLKCLTALQGLYYNKELNSKLELFTSRFKDRIVSMTLDKEYDVAVQAIKLLTLVLQSSEEVLTAEDCENVYHLVYSAHRPVAVAAGEFLYKKLFSRRDPEEDGMMKRRGRQGPNANLVKTLVFFFLESELHEHAAYLVDSMWDCATELLKDWECMNSLLLEEPLSGEEALTDRQESALIEIMLCTIRQAAECHPPVGRGTGKRVLTAKEKKTQLDDRTKITELFAVALPQLLAKYSLWGISRDPPYRVEYYLTNYKGQLYLPSPISKQFLNN

SEQ ID NO: 860713 - protein, 1162 aa, Homo sapiens; identical to SEQ ID NO: 860710

SEQ ID NO: 860714 - protein, 1162 aa, Homo sapiens; identical to SEQ ID NO: 860710

SEQ ID NO: 860715 - protein, 1162 aa, Homo sapiens; identical to SEQ ID NO: 860710

SEQ ID NO: 860716 - protein, 1231 aa, Homo sapiens; identical to SEQ ID NO: 860703

SEQ ID NO: 860717 - protein, 1268 aa, Homo sapiens
MIAAPEIPTDFNLLQESETHFSSDTDFEDIEGKNQKQGKGKTCKKGKKGPAEKGKGGNGGGKPPSGPNRMNGHHQQNGVENMMLFEVVKMGKSAMQSVVDDWIESYKHDRDIALLDLINFFIQCSGCKGVVTAEMFRHMQNSEIIRKMTEEFDEDSGDYPLTMAGPQWKKFKSSFCEFIGVLVRQCQYSIIYDEYMMDTVISLLTGLSDSQVRAFRHTSTLAAMKLMTALVNVALNLSINMDNTQRQYEAERNKMIGKRANERLELLLQKRKELQENQDEIENMMNAIFKGVFVHRYRDAIAEIRAICIEEIGIWMKMYSDAFLNDSYLKYVGWTMHDKQGEVRLKCLTALQGLYYNKELNSKLELFTSRFKDRIVSMTLDKEYDVAVQAIKLLTLVLQSSEEVLTAEDCENVYHLVYSAHRPVAVAAGEFLYKKLFSRRDPEEDGMMKRRGRQGPNANLVKTLVFFFLESELHEHAAYLVDSMWDCATELLKDWECMNSLLLEEPLSGEEALTDRQESALIEIMLCTIRQAAECHPPVGRGTGKRVLTAKEKKTQLDDRTKITELFAVALPQLLAKYSVDAEKVTNLLQLPQYFDLEIYTTGRLEKHLDALLRQIRNIVEKHTDTDVLEACSKTYHALCNEEFTIFNRVDISRSQLIDELADKFNRLLEDFLQEGEEPDEDDAYQVLSTLKRITAFHNAHDLSKWDLFACNYKLLKTGIENGDMPEQIVIHALQCTHYVILWQLAKITESSSTKEDLLRLKKQMRVFCQICQHYLTNVNTTVKEQAFTILCDILMIFSHQIMSGGRDMLEPLVYTPDSSLQSELLSFILDHVFIEQDDDNNSADGQQEDEASKIEALHKRRNLLAAFCKLIVYTVVEMNTAADIFKQYMKYYNDYGDIIKETMSKTRQIDKIQCAKTLILSLQQLFNEMIQENGYNFDRSSSTFSGIKELARRFALTFGLDQLKTREAIAMLHKDGIEFAFKEPNPQGESHPPLNLAFLDILSEFSSKLLRQDKRTVYVYLEKFMTFQMSLRREDVWLPLMSYRNSLLAGGDDDTMSVISGISSRGSTVRSKKSKPSTGKRKVVEGMQLSLTEESSSSDSMWLSREQTLHTPVMMQTPQLTSTIMREPKRLRPEDSFMSVYPMQTEHHQTPLDYNTQVTWMLAQRQQEEARQQQERAAMSYVKLRTNLQHAIRRGTSLMEDDEEPIVEDVMMSSEGRIEDLNEGMDFDTMDIDLPPSKNRRERTELKPDFFDPASIMDESVLGVSMF

SEQ ID NO: 860718 - protein, 280 aa, Homo sapiens
MASKRPGYSDEVRTQEINIAMLHKDGIEFAFKEPNPQGESHPPLNLAFLDILSEFSSKLLRQDKRTVYVYLEKFMTFQMSLRREDVWLPLMSYRNSLLAGGDDDTMSVISGISSRGSTVRSKKSKPSTGKRKVVEGMQLSLTEESSSSDSMWLSREQTLHTPVMMQTPQLTSTIMREPKRLRPEDSFMSVYPMQTEHHQTPLDYNRRGTSLMEDDEEPIVEDVMMSSEGRIEDLNEGMDFDTMDIDLPPSKNRRERTELKPDFFDPASIMDESVLGVSMF

SEQ ID NO: 860719 - protein, 1162 aa, Homo sapiens; identical to SEQ ID NO: 860710

SEQ ID NO: 860720 - protein, 172 aa, Homo sapiens
METRPRLGATCLLGFSFLLLVISSDGHNGLGKGFGDHIHWRTLEDGKKEAAASGLPLMVIIHKSWCGACKALKPKFAESTEISELSHNFVMVNLEDEEEPKDEDFSPDGGYIPRILFLDPSGKVHPEIINENGNPSYKYFYVSAEQVVQGMKEAQERLTGDAFRKKHLEDEL

SEQ ID NO: 860721 - protein, 172 aa, Homo sapiens; identical to SEQ ID NO: 860720

SEQ ID NO: 860722 - protein, 172 aa, Homo sapiens; identical to SEQ ID NO: 860720

SEQ ID NO: 860723 - protein, 172 aa, Homo sapiens; identical to SEQ ID NO: 860720

SEQ ID NO: 860724 - protein, 71 aa, Homo sapiens
AGDLEDPGSSMHGESFWDPSGKVHPEIINENGNPSYKYFYVSAEQVVQGMKEAQERLTGDAFRKKHLEDEL

SEQ ID NO: 860725 - protein, 172 aa, Homo sapiens; identical to SEQ ID NO: 860720

SEQ ID NO: 860726 - protein, 172 aa, Homo sapiens; identical to SEQ ID NO: 860720

SEQ ID NO: 860727 - protein, 172 aa, Homo sapiens; identical to SEQ ID NO: 860720

SEQ ID NO: 860728 - protein, 205 aa, Homo sapiens
QTDVTSVDHSGLYFQFRAWVCHMSLSVPLDLQDKKTRPRLGATCLLGFSFLLLVISSDGHNGLGKGFGDHIHWRTLEDGKKEAAASGLPLMVIIHKSWCGACKALKPKFAESTEISELSHNFVMVNLEDEEEPKDEDFSPDGGYIPRILFLDPSGKVHPEIINENGNPSYKYFYVSAEQVVQGMKEAQERLTGDAFRKKHLEDEL

SEQ ID NO: 860729 - protein, 2036 aa, Homo sapiens
VSGVSVAMETRSSKTRRSLASRTNECQGTMWAPTSPPAGSSSPSQPTWKSSLYSSLAYSEAFHYSFAARPRRLTQLALAQRPEPQLLRLRPSSLRTQDISHLLTGVFRNLYSAEVIGDEVSASLIKARGSENERHEEFVDQLQQIRELYKQRLDEFEMLERHITQAQARAIAENERVMSQAGVQDLESLVRLPPVKSVSRWCIDSELLRKHHLISPEDYYTDTVPFHSAPKGISLPGCSKLTFSCEKRSVQKKELNKKLEDSCRKKLAEFEDELDHTVDSLTWNLTPKAKERTREPLKKASQPRNKNWMNHLRVPQRELDRLLLARMESRNHFLKNPRFFPPNTRYGGKSLVFPPKKPAPIGEFQSTEPEQSCADTPVFLAKPPIGFFTDYEIGPVYEMVIALQNTTTTSRYLRVLPPSTPYFALGLGMFPGKGGMVAPGMTCQYIVQFFPDCLGDFDDFILVETQSAHTLLIPLQARRPPPVLTLSPVLDCGYCLIGGVKMTRFICKNVGFSVGRFCIMPKTSWPPLSFKAIATVGFVEQPPFGILPSVFELAPGHAILVEVLFSPKSLGKAEQTFIIMCDNCQIKELVTIGIGQLIALDLIYISGEKSQPDPGELTDLTAQHFIRFEPENLRSTARKQLIIRNATHVELAFYWQIMKPNLQPLMPGETFSMDSIKCYPDKETAFSIMPRKGVLSPHTDHEFILSFSPHEVQMVSSQYATHGWIMYLDPPPVFLNHTEATAGPTEVLSCPGQHLAELGWSTHLVCRVKQLILSGPDPRLTPSAARPLAGFLRSGCLPHVYYGKKHYHPHPYHSIPRESEVQGPEGQVSTALAPAWREALWATVGKKGIRAGHEKDAPGAIVSGFGAEMSDPASGPSIQLPRCLSWEGVVLLDTLRGFVSIRKAFASCTQAQLRQAPESWLMFWQQTSLFLRREEGGSREATLGFQKVLLMARLRGGRIPAMPQPSPGQPAGTQWCFQGTVFALQLRDFHSVLQMVLEEVPEPVSSEAESLGHSSYSVDDVIVLEIEVKGSVEPFQVLLEPYALIIPGENYIGINVKKAFKMWNNSKSPIRYLWGKISDCHIIEVEPGTGVIEPSEVGDFELNFTGGVPGPTSQDLLCEIEDSPSPVVLHIEAVFKGPALIINVSALQFGLLRLGQKATNSIQIRNVSQLPATWRMKESPVSLQERPEDVSPFDIEPSSGQLHSLGECRVDITLEALHCQHLETVLELEVENGAWSYLPVYAEVQKPHVYLQSSQVEVRNLYLGVPTKTTITLINGTLLPTQFHWGKLLGHQAEFCMVTVSPKHGLLGPSEECQLKLELTAHTQEELTHLALPCHVSGMKKPLVLGISGKPQGLQVAITISKESSDCSTEQWPGHPKELRLDFGSAVPLRTRVTRQLILTNRSPIRTRFSLKFEYFGSPQNSLSKKTSLPNMPPALLKTVRMQEHLAKREQLDFMESMLSHGKGAAFFPHFSQGMLGPYQQLCIDITGCANMWGEYWDNLICTVGDLLPEVIPVHMAAVGCPISSLRTTSYTIDQAQKEPAMRFGTQVSGGDTVTRTLRLNNSSPCDIRLDWETYVPEDKEDRLVELLVFYGPPFPLRDQAGNELVCPDTPEGGCLLWSPGPSSSSEFSHETDSSVEGSSSASNRVAQKLISVILQAHEGVPSGHLYCISPKQVVVPAGGSSTIYISFTPMVLSPEILHKVECTGYALGFMSLDSKVEREIPRKRHRLQDFAVGPLKLDLHSYVRPAQLSVELDYGGSMEFQCQASDLIPEQPCSGVLSELVTTHHLKLTNTTEIPHYFRLMVSRPFSVSQDGASQDHRAPGPGQKQECEEETASADKQLVLQAQENMLVNVSFSLSLELLSYQKLPADQTLPGVDIQQSASGEREMVFTQNLLLEYTNQTTQVVPLRAVVAVPELQLSTSWVDFGTCFVSQQRVREVYLMNLSGCRSYWTMLMGQQEPAKAAVAFRVSPNSGLLEARSANAPPTSIALQVFFTARSSELYESTMVVEGVLGEKSCTLRLRGQGSYDERYMLPHQP

SEQ ID NO: 860730 - protein, 1698 aa, Homo sapiens
VSGVSVAMETRSSKTRRSLASRTNECQGTMWAPTSPPAGSSSPSQPTWKSSLYSSLAYSEAFHYSFAARPRRLTQLALAQRPEPQLLRLRPSSLRTQDISHLLTGVFRNLYSAEVIGDEVSASLIKARGSENERHEEFVDQLQQIRELYKQRLDEFEMLERHITQAQARAIAENERVMSQAGVQDLESLVRLPPVKSVSRWCIDSELLRKHHLISPEDYYTDTVPFHSAPKGISLPGCSKLTFSCEKRSVQKKELNKKLEDSCRKKLAEFEDELDHTVDSLTWNLTPKAKERTREPLKKASQPRNKNWMNHLRVPQRELDRLLLARMESRNHFLKNPRFFPPNTRYGGKSLVFPPKKPAPIGEFQSTEPEQSCADTPVFLAKPPIGFFTDYEIGPVYEMVIALQNTTTTSRYLRVLPPSTPYFALGLGMFPGKGGMVAPGMTCQYIVQFFPDCLGDFDDFILVETQSAHTLLIPLQARRPPPVLTLSPVLDCGYCLIGGVKMTRFICKNVGFSVGRFCIMPKTSWPPLSFKAIATVGFVEQPPFGILPSVFELAPGHAILVEVLFSPKSLGKAEQTFIIMCDNCQIKELVTIGIGQLIALDLIYISGEKSQPDPGELTDLTAQHFIRFEPENLRSTARKQLIIRNAYLRDFHSVLQMVLEEVPEPVSSEAESLGHSSYSVDDVIVLEIEVKGSVEPFQVLLEPYALIIPGENYIGINVKKAFKMWNNSKSPIRYLWGKISDCHIIEVEPGTGVIEPSEVGDFELNFTGGVPGPTSQDLLCEIEDSPSPVVLHIEAVFKGPALIINVSALQFGLLRLGQKATNSIQIRNVSQLPATWRMKESPVSLQERPEDVSPFDIEPSSGQLHSLGECRVDITLEALHCQHLETVLELEVENGAWSYLPVYAEVQKPHVYLQSSQVEVRNLYLGVPTKTTITLINGTLLPTQFHWGKLLGHQAEFCMVTVSPKHGLLGPSEECQLKLELTAHTQEELTHLALPCHVSGMKKPLVLGISGKPQGLQVAITISKESSDCSTEQWPGHPKELRLDFGSAVPLRTRVTRQLILTNRSPIRTRFSLKFEYFGSPQNSLSKKTSLPNMPPALLKTVRMQEHLAKREQLDFMESMLSHGKGAAFFPHFSQGMLGPYQQLCIDITGCANMWGEYWDNLICTVGDLLPEVIPVHMAAVGCPISSLRTTSYTIDQAQKEPAMRFGTQVSGGDTVTRTLRLNNSSPCDIRLDWETYVPEDKEDRLVELLVFYGPPFPLRDQAGNELVCPDTPEGGCLLWSPGPSSSSEFSHETDSSVEGSSSASNRVAQKLISVILQAHEGVPSGHLYCISPKQVVVPAGGSSTIYISFTPMVLSPEILHKVECTGYALGFMSLDSKVEREIPRKRHRLQDFAVGPLKLDLHSYVRPAQLSVELDYGGSMEFQCQASDLIPEQPCSGVLSELVTTHHLKLTNTTEIPHYFRLMVSRPFSVSQDGASQDHRAPGPGQKQECEEETASADKQLVLQAQENMLVNVSFSLSLELLSYQKLPADQTLPGVDIQQSASGEREMVFTQNLLLEYTNQTTQVVPLRAVVAVPELQLSTSWVDFGTCFVSQQRVREVYLMNLSGCRSYWTMLMGQQEPAKAAVAFRVSPNSGLLEARSANAPPTSIALQVFFTARSSELYESTMVVEGVLGEKSCTLRLRGQGSYDERYMLPHQP

SEQ ID NO: 860731 - protein, 126 aa, Homo sapiens
LPPTSVAAQVLSELVTTHHLKLTNTTEIPHYFRLMVSRPFSVSQDGASQDHRAPGPGQKQECEEETASADKQLVLQAQENMLVSGGVCSPCLNGTPSHVYRQHPCTPPSGACTQTQTACLTLPYPA

SEQ ID NO: 860732 - protein, 1992 aa, Homo sapiens
VSGVSVAMETRSSKTRRSLASRTNECQGTMWAPTSPPAGSSSPSQPTWKSSLYSSLAYSEAFHYSFAARPRRLTQLALAQRPEPQLLRLRPSSLRTQDISHLLTGVFRNLYSAEVIGDEVSASLIKARGSENERHEEFVDQLQQIRELYKQRLDEFEMLERHITQAQARAIAENERVMSQAGVQDLESLVRLPPVKSVSRWCIDSELLRKHHLISPEDYYTDTVPFHSAPKGISLPGCSKLTFSCEKRSVQKKELNKKLEDSCRKKLAEFEDELDHTVDSLTWNLTPKAKERTREPLKKASQPRNKNWMNHLRVPQRELDRLLLARMESRNHFLKNPRFFPPNTRYGGKSLVFPPKKPAPIGEFQSTEPEQSCADTPVFLAKPPIGFFTDYEIGPVYEMVIALQNTTTTSRYLRVLPPSTPYFALGLGMFPGKGGMVAPGMTCQYIVQFFPDCLGDFDDFILVETQSAHTLLIPLQARRPPPVLTLSPVLDCGYCLIGGVKMTRFICKNVGFSVGRFCIMPKTSWPPLSFKAIATVGFVEQPPFGILPSVFELAPGHAILVEVLFSPKSLGKAEQTFIIMCDNCQIKELVTIGIGQLIALDLIYISGEKSQPDPGELTDLTAQHFIRFEPENLRSTARKQLIIRNATHVELAFYWQIMKPNLQPLMPGETFSMDSIKCYPDKETAFSIMPRKGVLSPHTDHEFILSFSPHEVQMVSSQYATHGWIMYLDPPPVFLNHTEATAGPTEVLSCPGQHLAELGWSTHLVCRVKQLILSGPDPRLTPSAARPLAGFLRSGCLPHVYYGKKHYHPHPYHSIPRESEVQGPEGQVSTALAPAWREALWATVGKKGIRAGHEKDAPGAIVSGFGAEMSDPASGPSIQLPRCLSWEGVVLLDTLRGFVSIRKAFASCTQAQLRQAPESWLMFWQQTSLFLRREEGGSREATLGFQKVLLMARLRGGRIPAMPQPSPGQPAGTQWCFQGTVFALQLRDFHSVLQMVLEEVPEPVSSEAESLGHSSYSVDDVIVLEIEVKGSVEPFQVLLEPYALIIPGENYIGINVKKAFKMWNNSKSPIRYLWGKISDCHIIEVEPGTGVIEPSEVGDFELNFTGGVPGPTSQDLLCEIEDSPSPVVLHIEAVFKPFSLVLLRLGQKATNSIQIRNVSQLPATWRMKESPVSLQERPEDVSPFDIEPSSGQLHSLGECRVDITLEALHCQHLETVLELEVENGAWSYLPVYAEVQKPHVYLQSSQVEVRNLYLGVPTKTTITLINGTLLPTQFHWGKLLGHQAEFCMVTVSPKHGLLGPSEECQLKLELTAHTQEELTHLALPCHVSGMKKPLVLGISGKPQGLQVAITISKESSDCSTEQWPGHPKELRLDFGSAVPLRTRVTRQLILTNRSPIRTRFSLKFEYFGSPQNSLSKKTSLPNMPPALLKTVRMQEHLAKREQLGCANMWGEYWDNLICTVGDLLPEVIPVHMAAVGCPISSLRTTSYTIDQAQKEPAMRFGTQVSGGDTVTRTLRLNNSSPCDIRLDWETYVPEDKEDRLVELLVFYGPPFPLRDQAGNELVCPDTPEGGCLLWSPGPSSSSEFSHETDSSVEGSSSASNRVAQKLISVILQAHEGVPSGHLYCISPKQVVVPAGGSSTIYISFTPMVLSPEILHKVECTGYALGFMSLDSKVEREIPRKRHRLQDFAVGPLKLDLHSYVRPAQLSVELDYGGSMEFQCQASDLIPEQPCSGVLSELVTTHHLKLTNTTEIPHYFRLMVSRPFSVSQDGASQDHRAPGPGQKQECEEETASADKQLVLQAQENMLVNVSFSLSLELLSYQKLPADQTLPGVDIQQSASGEREMVFTQNLLLEYTNQTTQVVPLRAVVAVPELQLSTSWVDFGTCFVSQQRVREVYLMNLSGCRSYWTMLMGQQEPAKAAVAFRVSPNSGLLEARSANAPPTSIALQVFFTARSSELYESTMVVEGVLGEKSCTLRLRGQGSYDERYMLPHQP

SEQ ID NO: 860733 - protein, 899 aa, Homo sapiens
RGQGCRYPGLAHMRPSNWEPCQHAAGQGRFVQSLRPLSASWVGRKGGSVVGSSMKQESEDEAWCLGSFCMPTQDGSLGRAKGGVLHSTNGQQDSVFSTEQWPGHPKELRLDFGSAVPLRTRVTRQLILTNRSPIRTRFSLKFEYFGSPQNSLSKKTSLPNMPPALLKTVRMQEHLAKREQLDFMESMLSHGKGAAFFPHFSQGMLGPYQQLCIDITGCANMWGEYWDNLICTVGDLLPEVIPVHMAAVGCPISSLRTTSYTIDQAQKEPAMRFGTQVSGGDTVTRTLRLNNSSPCDIRLDWETYVPEDKEDRLVELLVFYGPPFPLRDQAGNELVCPDTPEGGCLLWSPGPSSSSEFSHETDSSVEGSSSASNRVAQKLISVILQAHEGVPSGHLYCISPKQVVVPAGGSSTIYISFTPMVLSPEILHKVECTGYALGFMSLDSKVSSSGLGWGPQPLLPPGEHAAYSAQGSAVIRLGLSEVEREIPRKRHRLQDFAVGPLKLDLHSYVRPAQWSQLGCPISFHPHGVHPHQALVEPGRVLRAKGRAWVEKSAEEPRERLARGWMSRVGAARRPQAPGLPQQCLLLGRLSVELDYGGSMEFQCQASDLIPEQPCSGVLSELVTTHHLKLTNTTEIPHYFRLMVSRPFSVSQDGASQDHRAPGPGQKQECEEETASADKQLVLQAQENMLVNVSFSLSLELLSYQKLPADQTLPGVDIQQSASGEREMVFTQNLLLEYTNQTTQVVPLRAVVAVPELQLSTSWVDFGTCFVSQQRVREVYLMNLSGCRSYWTMLMGVVSCTSPRWWWKVCSVRSPAPCGSGAKAPMMRDTCCLTSPEAPPQPSAPGPSWRKNIAQGLGAALQHKDTDLGTWGPLGSSWNGRTPFHNGLSLGPHDLSSELT

SEQ ID NO: 860734 - protein, 1762 aa, Homo sapiens
VSGVSVAMETRSSKTRRSLASRTNECQGTMWAPTSPPAGSSSPSQPTWKSSLYSSLAYSEAFHYSFAARPRRLTQLALAQRPEPQLLRLRPSSLRTQDISHLLTGVFRNLYSAEVIGDEVSASLIKARGSENERHEEFVDQLQQIRELYKQRLDEFEMLERHITQAQARAIAENERVMSQAGVQDLESLVRLPPVKSVSRWCIDSELLRKHHLISPEDYYTDTVPFHSAPKGISLPGCSKLTFSCEKRSVQKKELNKKLEDSCRKKLAEFEDELDHTVDSLTWNLTPKAKERTREPLKKASQPRNKNWMNHLRVPQRELDRLLLARMESRNHFLKNPRFFPPNTRYGGKSLVFPPKKPAPIGEFQSTEPEQSCADTPVFLAKPPIGFFTDYEIGPVYEMVIALQNTTTTSRYLRVLPPSTPYFALGLGMFPGKGGMVAPGMTCQYIVQFFPDCLGDFDDFILVETQSAHTLLIPLQARRPPPVLTLSPVLDCGYCLIGGVKMTRFICKNVGFSVGRFCIMPKTSWPPLSFKAIATVGFVEQPPFGILPSVFELAPGHAILVEVLFSPKSLGKAEQTFIIMCDNCQIKELVTIGIGQLIALDLIYISGEKSQPDPGELTDLTAQHFIRFEPENLRSTARKQLIIRNATHVELAFYWQIMKPNLQPLMPGETFSMDSIKCYPDKETAFSIMPRKGVLSPHTDHEFILSFSPHELRDFHSVLQMVLEEVPEPVSSEAESLGHSSYSVDDVIVLEIEVKGSVEPFQVLLEPYALIIPGENYIGINVKKAFKMWNNSKSPIRYLWGKISDCHIIEVEPGTGVIEPSEVGDFELNFTGGVPGPTSQDLLCEIEDSPSPVVLHIEAVFKGPALIINVSALQFGLLRLGQKATNSIQIRNVSQLPATWRMKESPVSLQERPEDVSPFDIEPSSGQLHSLGECRVDITLEALHCQHLETVLELEVENGAWSYLPVYAEVQKPHVYLQSSQVEVRNLYLGVPTKTTITLINGTLLPTQFHWGKLLGHQAEFCMVTVSPKHGLLGPSEECQLKLELTAHTQEELTHLALPCHVSGMKKPLVLGISGKPQGLQVAITISKESSDCSTEQWPGHPKELRLDFGSAVPLRTRVTRQLILTNRSPIRTRFSLKFEYFGSPQNSLSKKTSLPNMPPALLKTVRMQEHLAKREQLDFMESMLSHGKGAAFFPHFSQGMLGPYQQLCIDITGCANMWGEYWDNLICTVGDLLPEVIPVHMAAVGCPISSLRTTSYTIDQAQKEPAMRFGTQVSGGDTVTRTLRLNNSSPCDIRLDWETYVPEDKEDRLVELLVFYGPPFPLRDQAGNELVCPDTPEGGCLLWSPGPSSSSEFSHETDSSVEGSSSASNRVAQKLISVILQAHEGVPSGHLYCISPKQVVVPAGGSSTIYISFTPMVLSPEILHKVECTGYALGFMSLDSKVEREIPRKRHRLQDFAVGPLKLDLHSYVRPAQLSVELDYGGSMEFQCQASDLIPEQPCSGVLSELVTTHHLKLTNTTEIPHYFRLMVSRPFSVSQDGASQDHRAPGPGQKQECEEETASADKQLVLQAQENMLVNVSFSLSLELLSYQKLPADQTLPGVDIQQSASGEREMVFTQNLLLEYTNQTTQVVPLRAVVAVPELQLSTSWVDFGTCFVSQQRVREVYLMNLSGCRSYWTMLMGQQEPAKAAVAFRVSPNSGLLEARSANAPPTSIALQVFFTARSSELYESTMVVEGVLGEKSCTLRLRGQGSYDERYMLPHQP

SEQ ID NO: 860735 - protein, 1732 aa, Homo sapiens
VSGVSVAMETRSSKTRRSLASRTNECQGTMWAPTSPPAGSSSPSQPTWKSSLYSSLAYSEAFHYSFAARPRRLTQLALAQRPEPQLLRLRPSSLRTQDISHLLTGVFRNLYSAEVIGDEVSASLIKARGSENERHEEFVDQLQQIRELYKQRLDEFEMLERHITQAQARAIAENERVMSQAGVQDLESLVRLPPVKSVSRWCIDSELLRKHHLISPEDYYTDTVPFHSAPKGISLPGCSKLTFSCEKRSVQKKELNKKLEDSCRKKLAEFEDELDHTVDSLTWNLTPKAKERTREPLKKASQPRNKNWMNHLRVPQRELDRLLLARMESRNHFLKNPRFFPPNTRYGGKSLVFPPKKPAPIGEFQSTEPEQSCADTPVFLAKPPIGFFTDYEIGPVYEMVIALQNTTTTSRYLRVLPPSTPYFALGLGMFPGKGGMVAPGMTCQYIVQFFPDCLGDFDDFILVETQSAHTLLIPLQARRPPPVLTLSPVLDCGYCLIGGVKMTRFICKNVGFSVGRFCIMPKTSWPPLSFKAIATVGFVEQPPFGILPSVFELAPGHAILVEEIGQLIALDLIYISGEKSQPDPGELTDLTAQHFIRFEPENLRSTARKQLIIRNATHVELAFYWQIMKPNLQPLMPGETFSMDSIKCYPDKETAFSIMPRKGVLSPHTDHEFILSFSPHELRDFHSVLQMVLEEVPEPVSSEAESLGHSSYSVDDVIVLEIEVKGSVEPFQVLLEPYALIIPGENYIGINVKKAFKMWNNSKSPIRYLWGKISDCHIIEVEPGTGVIEPSEVGDFELNFTGGVPGPTSQDLLCEIEDSPSPVVLHIEAVFKGPALIINVSALQFGLLRLGQKATNSIQIRNVSQLPATWRMKESPVSLQERPEDVSPFDIEPSSGQLHSLGECRVDITLEALHCQHLETVLELEVENGAWSYLPVYAEVQKPHVYLQSSQVEVRNLYLGVPTKTTITLINGTLLPTQFHWGKLLGHQAEFCMVTVSPKHGLLGPSEECQLKLELTAHTQEELTHLALPCHVSGMKKPLVLGISGKPQGLQVAITISKESSDCSTEQWPGHPKELRLDFGSAVPLRTRVTRQLILTNRSPIRTRFSLKFEYFGSPQNSLSKKTSLPNMPPALLKTVRMQEHLAKREQLDFMESMLSHGKGAAFFPHFSQGMLGPYQQLCIDITGCANMWGEYWDNLICTVGDLLPEVIPVHMAAVGCPISSLRTTSYTIDQAQKEPAMRFGTQVSGGDTVTRTLRLNNSSPCDIRLDWETYVPEDKEDRLVELLVFYGPPFPLRDQAGNELVCPDTPEGGCLLWSPGPSSSSEFSHETDSSVEGSSSASNRVAQKLISVILQAHEGVPSGHLYCISPKQVVVPAGGSSTIYISFTPMVLSPEILHKVECTGYALGFMSLDSKVEREIPRKRHRLQDFAVGPLKLDLHSYVRPAQLSVELDYGGSMEFQCQASDLIPEQPCSGVLSELVTTHHLKLTNTTEIPHYFRLMVSRPFSVSQDGASQDHRAPGPGQKQECEEETASADKQLVLQAQENMLVNVSFSLSLELLSYQKLPADQTLPGVDIQQSASGEREMVFTQNLLLEYTNQTTQVVPLRAVVAVPELQLSTSWVDFGTCFVSQQRVREVYLMNLSGCRSYWTMLMGQQEPAKAAVAFRVSPNSGLLEARSANAPPTSIALQVFFTARSSELYESTMVVEGVLGEKSCTLRLRGQGSYDERYMLPHQP

SEQ ID NO: 860736 - protein, 1785 aa, Homo sapiens
VSGVSVAMETRSSKTRRSLASRTNECQGTMWAPTSPPAGSSSPSQPTWKSSLYSSLAYSEAFHYSFAARPRRLTQLALAQRPEPQLLRLRPSSLRTQDISHLLTGVFRNLYSAEVIGDEVSASLIKARGSENERHEEFVDQLQQIRELYKQRLDEFEMLERHITQAQARAIAENERVMSQAGVQDLESLVRLPPVKSVSRWCIDSELLRKHHLISPEDYYTDTVPFHSAPKGISLPGCSKLTFSCEKRSVQKKELNKKLEDSCRKKLAEFEDELDHTVDSLTWNLTPKAKERTREPLKKASQPRNKNWMNHLRVPQRELDRLLLARMESRNHFLKNPRFFPPNTRYGGKSLVFPPKKPAPIGEFQSTEPEQSCADTPVFLAKPPIGFFTDYEIGPVYEMVIALQNTTTTSRYLRVLPPSTPYFALGLGMFPGKGGMVAPGMTCQYIVQFFPDCLGDFDDFILVETQSAHTLLIPLQARRPPPVLTLSPVLDCGYCLIGGVKMTRFICKNVGFSVGRFCIMPKTSWPPLSFKAIATVGFVEQPPFGILPSVFELAPGHAILVEVLFSPKSLGKAEQTFIIMCDNCQIKELVTIGIGQLIALDLIYISGEKSQPDPGELTDLTAQHFIRFEPENLRSTARKQLIIRNATHVELAFYWQIMKPNLQPLMPGETFSMDSIKCYPDKETAFSIMPRKGVLSPHTDHEFILSFSPHELRDFHSVLQMVLEEVPEPVSSEAESLGHSSYSVDDVIVLEIEVKGSVEPFQVLLEPYALIIPGENYIGINVKKAFKMWNNSKSPIRYLWGKISDCHIIEVEPGTGVIEPSEVGDFELNFTGGVPGPTSQDLLCEIEDSPSPVVLHIEAVFKGPALIINVSALQFGLLRLGQKATNSIQIRNVSQLPATWRMKESPVSLQERPEDVSPFDIEPSSGQLHSLGECRVDITLEALHCQHLETVLELEVENGAWSYLPVYAEVQKPHVYLQSSQVEVRNLYLGVPTKTTITLINGTLLPTQFHWGKLLGHQAEFCMVTVSPKHGLLGPSEECQLKLELTAHTQEELTHLALPCHVSGMKKPLVLGISGKPQGLQVAITISKESSDCSTEQWPGHPKELRLDFGSAVPLRTRVTRQLILTNRSPIRTRFSLKFEYFGSPQNSLSKKTSLPNMPPALLKTVRMQEHLAKREQLDFMESMLSHGKGAAFFPHFSQGMLGPYQQLCIDITGCANMWGEYWDNLICTVGDLLPEVIPVHMAAVGCPISSLRTTSYTIDQAQKEPAMRFGTQVSGGDTVTRTLRLNNSSPCDIRLDWETYVPEDKEDRLVELLVFYGPPFPLRDQAGNELVCPDTPEGGCLLWSPGPSSSSEFSHETDSSVEGSSSASNRVAQKLISVILQAHEGVPSGHLYCISPKQVVVPAGGSSTIYISFTPMVLSPEILHKVECTGYALGFMSLDSKVEREIPRKRHRLQDFAVGPLKLDLHSYVRPAQLSVELDYGGSMEFQCQASDLIPEQPCSGVLSELVTTHHLKLTNTTEIPHYFRLMVSRPFSVSQDGASQDHRAPGPGQKQECEEETASADKQLVLQAQENMLVNVSFSLSLELLSYQKLPADQTLPGVDIQQSASGEREMVFTQNLLLEYTNQTTQVVPLRAVVAVPELQLSTSWVDFGTCFVSQQRVREVYLMNLSGCRSYWTMLMGVVSCTSPRWWWKVCSVRSPAPCGSGAKAPMMRDTCCLTSPEAPPQPSAPGPSWRKNIAQGLGAALQHKDTDLGTWGPLGSSWNGRTPFHNGLSLGPHDLSSELT

SEQ ID NO: 860737 - protein, 2170 aa, Homo sapiens
VSGVSVAMETRSSKTRRSLASRTNECQGTMWAPTSPPAGSSSPSQPTWKSSLYSSLAYSEAFHYSFAARPRRLTQLALAQRPEPQLLRLRPSSLRTQDISHLLTGVFRNLYSAEVIGDEVSASLIKARGSENERHEEFVDQLQQIRELYKQRLDEFEMLERHITQAQARAIAENERVMSQAGVQDLESLVRLPPVKSVSRWCIDSELLRKHHLISPEDYYTDTVPFHSAPKGISLPGCSKLTFSCEKRSVQKKELNKKLEDSCRKKLAEFEDELDHTVDSLTWNLTPKAKERTREPLKKASQPRNKNWMNHLRVPQRELDRLLLARMESRNHFLKNPRFFPPNTRYGGKSLVFPPKKPAPIGEFQSTEPEQSCADTPVFLAKPPIGFFTDYEIGPVYEMVIALQNTTTTSRYLRVLPPSTPYFALGLGMFPGKGGMVAPGMTCQYIVQFFPDCLGDFDDFILVETQSAHTLLIPLQARRPPPVLTLSPVLDCGYCLIGGVKMTRFICKNVGFSVGRFCIMPKTSWPPLSFKAIATVGFVEQPPFGILPSVFELAPGHAILVEVLFSPKSLGKAEQTFIIMCDNCQIKELVTIGIGQLIALDLIYISGEKSQPDPGELTDLTAQHFIRFEPENLRSTARKQLIIRNATHVELAFYWQIMKPNLQPLMPGETFSMDSIKCYPDKETAFSIMPRKGVLSPHTDHEFILSFSPHEVQMVSSQYATHGWIMYLDPPPVFLNHTEATAGPTEVLSCPGQHLAELGWSTHLVCRVKQLILSGPDPRLTPSAARPLAGFLRSGCLPHVYYGKKHYHPHPYHSIPRESEVQGPEGQVSTALAPAWREALWATVGKKGIRAGHEKDAPGAIVSGFGAEMSDPASGPSIQLPRCLSWEGVVLLDTLRGFVSIRKAFASCTQAQLRQAPESWLMFWQQTSLFLRREEGGSREATLGFQKVLLMARLRGGRIPAMPQPSPGQPAGTQWCFQGTVFALQLRDFHSVLQMVLEEVPEPVSSEAESLGHSSYSVDDVIVLEIEVKGSVEPFQVLLEPYALIIPGENYIGINVKKAFKMWNNSKSPIRYLWGKISDCHIIEVEPGTGVIEPSEVGDFELNFTGGVPGPTSQDLLCEIEDSPSPVVLHIEAVFKGPALIINVSALQFGLLRLGQKATNSIQIRNVSQLPATWRMKESPVSLQERPEDVSPFDIEPSSGQLHSLGECRVDITLEALHCQHLETVLELEVENGAWSYLPVYAEVQKPHVYLQSSQVEVRNLYLGVPTKTTITLINGTLLPTQFHWGKLLGHQAEFCMVTVSPKHGLLGPSEECQLKLELTAHTQEELTHLALPCHVSGMKKPLVLGISGKPQGLQVAITISKESSDCSTEQWPGHPKELRLDFGSAVPLRTRVTRQLILTNRSPIRTRFSLKFEYFGSPQNSLSKKTSLPNMPPALLKTVRMQEHLAKREQLDFMESMLSHGKGAAFFPHFSQGMLGPYQQLCIDITGCANMWGEYWDNLICTVGDLLPEVIPVHMAAVGCPISSLRTTSYTIDQAQKEPAMRFGTQVSGGDTVTRTLRLNNSSPCDIRLDWETYVPEDKEDRLVELLVFYGPPFPLRDQAGNELVCPDTPEGGCLLWSPGPSSSSEFSHETDSSVEGSSSASNRVAQKLISVILQAHEGVPSGHLYCISPKQVVVPAGGSSTIYISFTPMVLSPEILHKVECTGYALGFMSLDSKVSSSGLGWGPQPLLPPGYHAAYSAQGSAVIRLGLSEVEREIPRKRHRLQDFAVGPLKLDLHSYVRPAQLSQLGCPISFHPHGVHPHQALVEPGRVLRAKGRAWVEKSAEEPRERLARGWMSRVGAARRPQAPGLPQQCLLLGRLSVELDYGGSMEFQCQASDLIPEQPCSGVLSELVTTHHLKLTNTTEIPHYFRLMVSRPFSVSQDGASQDHRAPGPGQKQECEEETASADKQLVLQAQENMLVNVSFSLSLELLSYQKLPADQTLPGVDIQQSASGEREMVFTQNLLLEYTNQTTQVVPLRAVVAVPELQLSTSWVDFGTCFVSQQRVREVYLMNLSGCRSYWTMLMGVVSCTSPRWWWKVCSVRSPAPCGSGAKAPMMRDTCCLTSPEAPPQPSAPGPSWRKNIAQGLGAALQHKDTDLGTWGPLGSSWNGRTPFHNGLSLGPHDLSSELT

SEQ ID NO: 860738 - protein, 43 aa, Homo sapiens
MGWELSALAGQWAWDSAKAAVSMPGGPCWGQQYHLHLLHPYGA

SEQ ID NO: 860739 - protein, 1637 aa, Homo sapiens
MAGVGPGGYAAEFVPPPECPVFEPSWEEFTDPLSFIGRIRPLAEKTGICKIRPPKDWQPPFACEVKSFRFTPRVQRLNELEAMTRVRLDFLDQLAKFWELQGSTLKIPVVERKILDLYALSKIVASKGGFEMVTKEKKWSKVGSRLGYLPGKGTGSLLKSHYERILYPYELFQSGVSLMGVQMPNLDLKEKVEPEVLSTDTQTSPEPGTRMNILPKRTRRVKTQSESGDVSRNTELKKLQIFGAGPKVVGLAMGTKDKEDEVTRRRKVTNRSDAFNMQMRQRKGTLSVNFVDLYVCMFCGRGNNEDKLLLCDGCDDSYHTFCLIPPLPDVPKGDWRCPKCVAEECSKPREAFGFEQAVREYTLQSFGEMADNFKSDYFNMPVHMVPTELVEKEFWRLVSSIEEDVIVEYGADISSKDFGSGFPVKDGRRKILPEEEEYALSGWNLNNMPVLEQSVLAHINVDISGMKVPWLYVGMCFSSFCWHIEDHWSYSINYLHWGEPKTWYGVPSHAAEQLEEVMRELAPELFESQPDLLHQLVTIMNPNVLMEHGVPVYRTNQCAGEFVVTFPRAYHSGFNQGYNFAEAVNFCTADWLPIGRQCVNHYRRLRRHCVFSHEELIFKMAADPECLDVGLAAMVCKELTLMTEEETRLRESVVQMGVLMSEEEVFELVPDDERQCSACRTTCFLSALTCSCNPERLVCLYHPTDLCPCPMQKKCLRYRYPLEDLPSLLYGVKVRAQSYDTWVSRVTEALSANFNHKKDLIELRVMLEDAEDRKYPENDLFRKLRDAVKEAETCASVAQLLLSKKQKHRQSPDSGRTRTKLTVEELKAFVQQLFSLPCVISQARQVKNLLDDVEEFHERAQEAMMDETPDSSKLQMLIDMGSSLYVELPELPRLKQELQQARWLDEVRLTLSDPQQVTLDVMKKLIDSGVGLAPHHAVEKAMAELQELLTVSERWEEKAKVCLQARPRHSVASLESIVNEAKNIPAFLPNVLSLKEALQKAREWTAKVEAIQSGSNYAYLEQLESLSAKGRPIPVRLEALPQVESQVAAARAWRERTGRTFLKKNSSHTLLQVLSPRTDIGVYGSGKNRRKKVKELIEKEKEKDLDLEPLSDLEEGLEETRDTAMVVAVFKEREQKEIEAMHSLRAANLAKMTMVDRIEEVKFCICRKTASGFMLQCELCKDWFHNSCVPLPKSSSQKKGSSWQAKEVKFLCPLCMRSRRPRLETILSLLVSLQKLPVRLPEGEALQCLTERAMSWQDRARQALATDELSSALAKLSVLSQRMVEQAAREKTEKIISAELQKAAANPDLQGHLPSFQQSAFNRVVSSVSSSPRQTMDYDDEETDSDEDIRETYGYDMKDTASVKSSSSLEPNLFCDEEIPIKSEEVVTHMWTAPSFCAEHAYSSASKSCSQGSSSTPRKQPRKSPLVPRSLEPPVLELSPGAKAQLEELMMVGDLLEVSLDETQHIWRILQATHPPSEDRFLHIMEDDSMEEKPLKVKGKDSSEKKRKRKLEKVEQLFGEGKQKSKELKKMDKPRKKKLKLGADKSKELNKLAKKLAKEEERKKKKEKAAAAKVELVKESTEKKREKKVLDIPSKYDWSGAEESDDENAVCAAQNCQRPCKDKGVVFVTEEEKNKKY

SEQ ID NO: 860740 - protein, 1629 aa, Homo sapiens
MAGVGPGGYAAEFVPPPECPVFEPSWEEFTDPLSFIGRIRPLAEKTGICKIRPPKDWQPPFACEVKSFRFTPRVQRLNELEAMTRVRLDFLDQLAKFWELQGSTLKIPVVERKILDLYALSKIVASKGGFEMVTKEKKWSKVGSRLGYLPGKGTGSLLKSHYERILYPYELFQSGVSLMGVQMPNLDLKEKVEPEVLSTDTQTSPEPGTRMNILPKRTRRVKTQSESGDVSRNTELKKLQIFGAGPKVVGLAMGTKDKEDEVTRRRKVTNRSDAFNMQMRQRKGTLSVNFVDLYVCMFCGRGNNEDKLLLCDGCDDSYHTFCLIPPLPDVPKGDWRCPKCVAEECSKPREAFGFEQAVREYTLQSFGEMADNFKSDYFNMPVHMVPTELVEKEFWRLVSSIEEDVIVEYGADISSKDFGSGFPVKDGRRKILPEEEEYALSGWNLNNMPVLEQSVLAHINVDISGMKVPWLYVGMCFSSFCWHIEDHWSYSINYLHWGEPKTWYGVPSHAAEQLEEVMRELAPELFESQPDLLHQLVTIMNPNVLMEHGVPVYRTNQCAGEFVVTFPRAYHSGFNQGYNFAEAVNFCTADWLPIGRQCVNHYRRLRRHCVFSHEELIFKMAADPECLDVGLAAMVCKELTLMTEEETRLRESVVQMGVLMSEEEVFELVPDDERQCSACRTTCFLSALTCSCNPERLVCLYHPTDLCPCPMQKKCLRYRYPLEDLPSLLYGVKVRAQSYDTWVSRVTEALSANFNHKKDLIELRVMLEDAEDRKYPENDLFRKLRDAVKEAETCASVAQLLLSKKQKHRQSPDSGRTRTKLTVEELKAFVQQLFSLPCVISQARQVKNLLDDVEEFHERAQEAMMDETPDSSKLQMLIDMGSSLYVELPELPRLKQELQQARWLDEVRLTLSDPQQVTLDVMKKLIDSGVGLAPHHAVEKAMAELQELLTVSERWEEKAKVCLQARPRHSVASLESIVNEAKNIPAFLPNVLSLKEALQKAREWTAKVEAIQSGSNYAYLEQLESLSAKGRPIPVRLEALPQVESQVAAARAWRERTGRTFLKKNSSHTLLQVLSPRTDIGVYGSGKNRRKKVKELIEKEKEKDLDLEPLSDLEEGLEETRDTAMVVAVFKEREQKEIEAMHSLRAANLAKMTMVDRIEEVKFCICRKTASGFMLQCELCKDWFHNSCVPLPKSSSQKKGSSWQAKEVKFLCPLCMRSRRPRLETILSLLVSLQKLPVRLPEGEALQCLTERAMSWQDRARQALATDELSSALAKLSVLSQRMVEQAAREKTEKIISAELQKAAANPDLQGHLPSFQQSAFNRVVSSVSSSPRQTMDYDDEETDSDEDIRETYGYDMKDTASVKSSSSLEPNLFCDEEIPIKSEEVVTHMWTAPSFCAEHAYSSASKSCSQGSSSTPRKQPRKSPLVPRSLEPPVLELSPGAKAQLEELMMVGDLLEVSLDETQHIWRILQATHPPSEDRFLHIMEDDSMEEKPLKVKGKDSSEKKRKRKLEKVEQLFGEGKQKSKELKKMDKPRKKKLKLGADKSKELNKLAKKLAKEEERKKKKEKAAAAKVELVKESTEKKREKKVLDIPSKYDWSGAEESDDENAVCAAQNCQRPCKDKVSSNCL

SEQ ID NO: 860741 - protein, 1412 aa, Homo sapiens
MAGVGPGGYAAEFVPPPECPVFEPSWEEFTDPLSFIGRIRPLAEKTGICKIRPPKDWQPPFACEVKSFRFTPRVQRLNELEAMTRVRLDFLDQLAKFWELQGSTLKIPVVERKILDLYALSKIVASKGGFEMVTKEKKWSKVGSRLGYLPGKGTGSLLKSHYERILYPYELFQSGVSLMGVQMPNLDLKEKVEPEVLSTDTQTSPEPGTRMNILPKRTRRVKTQSESGDVSRNTELKKLQIFGAGPKVVGLAMGTKDKEDEVTRRRKVTNRSDAFNMQMRQRKGTLSVNFVDLYVCMFCGRGNNEDKLLLCDGCDDSYHTFCLIPPLPDVPKGDWRCPKCVAEECSKPREAFGFEQAVREYTLQSFGEMADNFKSDYFNMPVHMVPTELVEKEFWRLVSSIEEDVIVEYGADISSKDFGSGFPVKDGRRKILPEEEEYALSGWNLNNMPVLEQSVLAHINVDISGMKVPWLYVGMCFSSFCWHIEDHWSYSINYLHWGEPKTWYGVPSHAAEQLEEVMRELAPELFESQPDLLHQLVTIMNPNVLMEHGVPVYRTNQCAGEFVVTFPRAYHSGFNQGYNFAEAVNFCTADWLPIGRQCVNHYRRLRRHCVFSHEELIFKMAADPECLDVGLAAMVCKELTLMTEEETRLRESVVQMGVLMSEEEVFELVPDDERQCSACRTTCFLSALTCSCNPERLVCLYHPTDLCPCPMQKKCLRYRYPLEDLPSLLYGVKVRAQSYDTWVSRVTEALSANFNHKKDLIELRVMLEDAEDRKYPENDLFRKLRDAVKEAETCASVAQLLLSKKQKHRQSPDSGRTRTKLTVEELKAFVQQLFSLPCVISQARQVKNLLDDVEEFHERAQEAMMDETPDSSKLQMLIDMGSSLYVELPELPRLKQELQQARWLDEVRLTLSDPQQVTLDVMKKLIDSGVGLAPHHAVEKAMAELQELLTVSERWEEKAKVCLQARPRHSVASLESIVNEAKNIPAFLPNVLSLKEALQKAREWTAKVEAIQSGSNYAYLEQLESLSAKGRPIPVRLEALPQVESQVAAARAWRERTGRTFLKKNSSHTLLQVLSPRTDIGVYGSGKNRRKKVKELIEKEKEKDLDLEPLSDLEEGLEETRDTAMVVAVFKEREQKEIEAMHSLRAANLAKMTMVDRIEEVKFCICRKTASGFMLQCELCKDWFHNSCVPLPKSSSQKKGSSWQAKEVKFLCPLCMRSRRPRLETILSLLVSLQKLPVRLPEGEALQCLTERAMSWQDRARQALATDELSSALAKLSVLSQRMVEQAAREKTEKIISAELQKAAANPDLQGHLPSFQQSAFNRVVSSVSSSPRQTMDYDDEETDSDEDIRETYGYDMKDTASVKSSSSLEPNLFCDEEIPIKSEEVVTHMWTAPSFCAEHAYSSASKSCSQV

SEQ ID NO: 860742 - protein, 608 aa, Homo sapiens
MAGVGPGGYAAEFVPPPECPVFEPSWEEFTDPLSFIGRIRPLAEKTGICKIRPPKDWQPPFACEVKSFRFTPRVQRLNELEAMTRVRLDFLDQLAKFWELQGSTLKIPVVERKILDLYALSKIVASKGGFEMVTKEKKWSKVGSRLGYLPGKGTGSLLKSHYERILYPYELFQSGVSLMGVQMPNLDLKEKVEPEVLSTDTQTSPEPGTRMNILPKRTRRVKTQSESGDVSRNTELKKLQIFGAGPKVVGLAMGTKDKEDEVTRRRKVTNRSDAFNMQMRQRKGTLSVNFVDLYVCMFCGRGNNEDKLLLCDGCDDSYHTFCLIPPLPDVPKGDWRCPKCVAEECSKPREAFGFEQAVREYTLQSFGEMADNFKSDYFNMPVHMVPTELVEKEFWRLVSSIEEDVIVEYGADISSKDFGSGFPVKDGRRKILPEEEEYALSGWNLNNMPVLEQSVLAHINVDISGMKVPWLYVGMCFSSFCWHIEDHWSYSINYLHWGEPKTWYGVPSHAAEQLEEVMRELAPELFESQPDLLHQLVTIMNPNVLMEHGVPVSLLVSSFSCLFVCLFFLFSFFLKQGLALLPRLECSGTMIAHCSLSLLSSSSSPASA

SEQ ID NO: 860743 - protein, 1691 aa, Homo sapiens
MAGVGPGGYAAEFVPPPECPVFEPSWEEFTDPLSFIGRIRPLAEKTGICKIRPPKDWQPPFACEVKSFRFTPRVQRLNELEAMTRVRLDFLDQLAKFWELQGSTLKIPVVERKILDLYALSKIVASKGGFEMVTKEKKWSKVGSRLGYLPGKGTGSLLKSHYERILYPYELFQSGVSLMGVQMPNLDLKEKVEPEVLSTDTQTSPEPGTRMNILPKRTRRVKTQSESGDVSRNTELKKLQIFGAGPKVVGLAMGTKDKEDEVTRRRKVTNRSDAFNMQMRQRKGTLSVNFVDLYVCMFCGRGNNEDKLLLCDGCDDSYHTFCLIPPLPDVPKGDWRCPKCVAEECSKPREAFGFEQAVREYTLQSFGEMADNFKSDYFNMPVHMVPTELVEKEFWRLVSSIEEDVIVEYGADISSKDFGSGFPVKDGRRKILPEEEEYALSGWNLNNMPVLEQSVLAHINVDISGMKVPWLYVGMCFSSFCWHIEDHWSYSINYLHWGEPKTWYGVPSHAAEQLEEVMRELAPELFESQPDLLHQLVTIMNPNVLMEHGVPVYRTNQCAGEFVVTFPRAYHSGFNQGYNFAEAVNFCTADWLPIGRQCVNHYRRLRRHCVFSHEELIFKMAADPECLDVGLAAMVCKELTLMTEEETRLRESVVQMGVLMSEEEVFELVPDDERQCSACRTTCFLSALTCSCNPERLVCLYHPTDLCPCPMQKKCLRYRYPLEDLPSLLYGVKVRAQSYDTWVSRVTEALSANFNHKKDLIELRVMLEDAEDRKYPENDLFRKLRDAVKEAETCASVAQLLLSKKQKHRQSPDSGRTRTKLTVEELKAFVQQLFSLPCVISQARQVKNLLDDVEEFHERAQEAMMDETPDSSKLQMLIDMGSSLYVELPELPRLKQELQQARWLDEVRLTLSDPQQVTLDVMKKLIDSGVGLAPHHAVEKAMAELQELLTVSERWEEKAKVCLQARPRHSVASLESIVNEAKNIPAFLPNVLSLKEALQKAREWTAKVEAIQSGSNYAYLEQLESLSAKGRPIPVRLEALPQVESQVAAARAWRERTGRTFLKKNSSHTLLQVLSPRTDIGVYGSGKNRRKKVKELIEKEKEKDLDLEPLSDLEEGLEETRDTAMVVAVFKEREQKEIEAMHSLRAANLAKMTMVDRIEEVKFCICRKTASGFMLQCELCKDWFHNSCVPLPKSSSQKKGSSWQAKEVKFLCPLCMRSRRPRLETILSLLVSLQKLPVRLPEGEALQCLTERAMSWQDRARQALATDELSSALAKLSVLSQRMVEQAAREKTEKIISAELQKAAANPDLQGHLPSFQQSAFNRVVSSVSSSPRQTMDYDDEETDSDEDIRETYGYDMKDTASVKSSSSLEPNLFCDEEIPIKSEEVVTHMWTAPSFCAEHAYSSASKSCSQGSSSTPRKQPRKSPLVPRSLEPPVLELSPGAKAQLEELMMVGDLLEVSLDETQHIWRILQATHPPSEDRFLHIMEDDSMEEKPLKVKGKDSSEKKRKRKLEKVEQLFGEGKQKSKELKKMDKPRKKKLKLGADKSKELNKLAKKLAKEEERKKKKEKAAAAKVELVKESTEKKREKKVLDIPSKYDWSGAEESDDENAVCAAQNCQRPCKDKVDWVQCDGGCDEWFHQVCVGVSPEMAENEDYICINCAKKQGPVSPGPAPPPSFIMSYKLPMEDLKETS

SEQ ID NO: 860744 - protein, 809 aa, Homo sapiens
MAGVGPGGYAAEFVPPPECPVFEPSWEEFTDPLSFIGRIRPLAEKTGICKIRPPKDWQPPFACEVKSFRFTPRVQRLNELEAMTRVRLDFLDQLAKFWELQGSTLKIPVVERKILDLYALSKIVASKGGFEMVTKEKKWSKVGSRLGYLPGKGTGSLLKSHYERILYPYELFQSGVSLMGVQMPNLDLKEKVEPEVLSTDTQTSPEPGTRMNILPKRTRRVKTQSESGDVSRNTELKKLQIFGAGPKVVGLAMGTKDKEDEVTRRRKVTNRSDAFNMQMRQRKGTLSVNFVDLYVCMFCGRGNNEDKLLLCDGCDDSYHTFCLIPPLPDVPKGDWRCPKCVAEECSKPREAFGFEQAVREYTLQSFGEMADNFKSDYFNMPVHMVPTELVEKEFWRLVSSIEEDVIVEYGADISSKDFGSGFPVKDGRRKILPEEEEYALSGWNLNNMPVLEQSVLAHINVDISGMKVPWLYVGMCFSSFCWHIEDHWSYSINYLHWGEPKTWYGVPSHAAEQLEEVMRELAPELFESQPDLLHQLVTIMNPNVLMEHGVPVYRTNQCAGEFVVTFPRAYHSGFNQGYNFAEAVNFCTADWLPIGRQCVNHYRRLRRHCVFSHEELIFKMAADPECLDVGLAAMVCKELTLMTEEETRLRESVVQMGVLMSEEEVFELVPDDERQCSACRTTCFLSALTCSCNPERLVCLYHPTDLCPCPMQKKCLRYRYPLEDLPSLLYGVKVRAQSYDTWVSRVTEALSANFNHKKDLIELRVMLEDAEDRKYPENDLFRKLRDAVKEAETCASVAQLLLSKKQKHR

SEQ ID NO: 860745 - protein, 496 aa, Homo sapiens
MAGVGPGGYAAEFVPPPECPVFEPSWEEFTDPLSFIGRIRPLAEKTGICKIRPPKDWQPPFACEVKSFRFTPRVQRLNELEAMTRVRLDFLDQLAKFWELQGSTLKIPVVERKILDLYALSKIVASKGGFEMVTKEKKWSKVGSRLGYLPGKGTGSLLKSHYERILYPYELFQSGVSLMGVQMPNLDLKEKVEPEVLSTDTQTSPEPGTRMNILPKRTRRVKTQSESGDVSRNTELKKLQIFGAGPKVVGLAMGTKDKEDEVTRRRKVTNRSDAFNMQMRQRKGTLSVNFVDLYVCMFCGRGNNEDKLLLCDGCDDSYHTFCLIPPLPDVPKGDWRCPKCVAEECSKPREAFGFEQAVREYTLQSFGEMADNFKSDYFNMPVHMVPTELVEKEFWRLVSSIEEDVIVEYGADISSKDFGSGFPVKDGRRKILPEEEEYALSGWNLNNMPVLEQSVLAHINVDISGMKVPWLYVGMCFSSFCWHIEDHWSYSINYLH

SEQ ID NO: 860746 - protein, 343 aa, Homo sapiens
MAEQLSPGKAVDQVCTFLFKKPGRKGAAGRRKRPACDPEPGESGSSSDEGCTVVRPEKKRVTHNPMIQKTRDSGKQKAAYGDLSSEEEEENEPESLGVVYKSTRSAKPVGPEDMGATAVYELDTEKERDAQAIFERSQKIQEELRGKEDDKIYRGINNYQKYMKPKDTSMGNASSGMVRKGPIRAPEHLRATVRWDYQPDICKDYKETGFCGFGDSCKFLHDRSDYKHGWQIERELDEGRYGVYEDENYEVGSDDEEIPFKCFICRQSFQNPVVTKCRHYFCESCALQHFRTTPRCYVCDQQTNGVFNPAKELIAKLEKHRATGEGGASDLPEDPDEDAIPIT

SEQ ID NO: 860747 - protein, 328 aa, Homo sapiens
MAEQLSPGKAVDQVCTFLFKKPGRKGAAGRRKRPACDPEPGESGSSSDEGCTVVRPEKKRVTHNPMIQKTRDSGKQKAAYGDLSSEEEEENEPESLGVVYKSTRSAKPVGPEDMGATAVYELDTEKERDAQAIFERSQKIQEELRGKEDDKIYRGINNYQKYMKPKDTSMGNASSGMVRKGPIRAPEHLRATVRWDYQPDICKDYKETGFCGFGDSCKFLHDRSDYKHGWQIERELDEGRYGVYEDENYEVGSDDEEIPFKCFICRQSFQNPVVTKCRHYFCESCALQHFRTTPRCYVCDQQTNGVFNPAKELIAKLEKHRATGEHPQ

SEQ ID NO: 860748 - protein, 343 aa, Homo sapiens; identical to SEQ ID NO: 860746

SEQ ID NO: 860749 - protein, 169 aa, Homo sapiens
MAEQLSPGKAVDQVCTFLFKKPGRKGAAGRRKRPACDPEPGESGSSSDEGCTVVRPEKKRVTHNPMIQKTRDSGKQKAAYGDLSSEEEEENEPESLGVVYKSTRSAKPVGPEDMGATAVYELDTEKERDAQAIFERSQKIQAGLSSQNQQGFQAVYIIIHANTNVTEFT

SEQ ID NO: 860750 - protein, 106 aa, Homo sapiens
MSTNNMSDPRRPNKVLRYKPPPSECNPALDDPTPDYMNLLGMIFSMCGLMLKLKWCAWVAVYCSFISFANSRSSEDTKQMMSSFMLSISAVVMSYLQNPQPMTPPW

SEQ ID NO: 860751 - protein, 85 aa, Homo sapiens
  misc_feature (3)..(3): Xaa can be any naturally occurring amino acid
  misc_feature (5)..(5): Xaa can be any naturally occurring amino acid
DKXSXPAAMYRLRRALNDCWHDLSMCGLMLKLKWCAWVAVYCSFISFANSRSSEDTKQMMSSFMLSISAVVMSYLQNPQPMTPPW

SEQ ID NO: 860752 - protein, 77 aa, Homo sapiens
  misc_feature (3)..(3): Xaa can be any naturally occurring amino acid
PRXEPAETDADNDCGMTACRLCELKWCAWVAVYCSFISFANSRSSEDTKQMMSSFMLSISAVVMSYLQNPQPMTPPW

SEQ ID NO: 860753 - protein, 106 aa, Homo sapiens; identical to SEQ ID NO: 860750

SEQ ID NO: 860754 - protein, 106 aa, Homo sapiens; identical to SEQ ID NO: 860750

SEQ ID NO: 860755 - protein, 106 aa, Homo sapiens; identical to SEQ ID NO: 860750

SEQ ID NO: 860756 - protein, 41 aa, Homo sapiens
LPTHLPFPSLKWCAWVAVYCSFISFANSRSSEDTKQMMSSF

SEQ ID NO: 860757 - protein, 106 aa, Homo sapiens; identical to SEQ ID NO: 860750

SEQ ID NO: 860758 - protein, 98 aa, Homo sapiens
EAGGGPGMKTKALTIKSYGSQLPPARSPASSTVSAAALEAAALAQGKPCSQDSFLAALNRSVRKIPRLRNPRLGVTLLLFFLTYFLFITSGFIILAFR

SEQ ID NO: 860759 - protein, 106 aa, Homo sapiens; identical to SEQ ID NO: 860750

SEQ ID NO: 860760 - protein, 106 aa, Homo sapiens; identical to SEQ ID NO: 860750

SEQ ID NO: 860761 - protein, 104 aa, Homo sapiens
MSDPRRPNKVLRYKPPPSECNPALDDPTPDYMNLLGMIFSMCGLMLKLKWCAWVAVYCSFISFANSRSSEDTKQMMSSFMCDLPYRTSDSLSKGWGDPSLAILD

SEQ ID NO: 860762 - protein, 597 aa, Homo sapiens
MQWPPPWRRSPLVSATPPPGPTRGLLCPRRVSEAGDSSTEGARTGHRHYVTPAESAMEGRSQPLPSLRPASPTNAPAHGRGSDCTAKEPPLANVCRQNYGAAQDPVEPAGRRSASHVTGSSLGKAEVACGRRWRWAELLADTSWSPAGRATEMKVKMLSRNPDNYVRETKLDLQRVPRNYDPALHPFEVPREYIRALNATKLERVFAKPFLASLDGHRDGVNCLAKHPEKLATVLSGACDGEVRIWNLTQRNCIRTIQAHEGFVRGICTRFCGTSFFTVGDDKTVKQWKMDGPGYGDEEEPLHTILGKTVYTGIDHHWKEAVFATCGQQVDIWDEQRTNPICSMTWGFDSISSVKFNPIETFLLGSCASDRNIVLYDMRQATPLKKVILDMRTNTICWNPMEAFIFTAANEDYNLYTFDMRALDTPVMVHMDHVSAVLDVDYSPTGKEFVSASFDKSIRIFPVDKSRSREVYHTKRMQHVICVKWTSDSKYIMCGSDEMNIRLWKANASEKLGVLTSREKAAKDYNQKLKEKFQHYPHIKRIARHRHLPKSIYSQIQEQRIMKEARRRKEVNRIKHSKPGSVPLVSEKKKHVVAVVK

SEQ ID NO: 860763 - protein, 337 aa, Homo sapiens
MQWPPPWRRSPLVSATPPPGPTRGLLCPRRVSEAGDSSTEGARTGHRHYVTPAESAMEGRSQPLPSLRPASPTNAPAHGRGSDCTAKEPPLANVCRQNYGAAQDPVEPAGRRSASHVTGSSLGKAEVACGRRWRWAELLADTSWSPAGRATEMKVKMLSRNPDNYVRETKLDLQRVPRNYDPALHPFEVPREYIRALNATKLERVFAKPFLASLDGHRDGVNCLAKHPEKLATVLSGACDGEVGDDKTVKQWKMDGPGYGDEEEPLHTILGKTVYTGIDHHWKEAVFATCGQQVDIWDEQRTNPICSMTWGFDSISSVKFNPIEVMFFFKYVLLIMA

SEQ ID NO: 860764 - protein, 285 aa, Homo sapiens
KDFNLELAIKTRIISDGLKYSLATGNWGDQKKAHQARAGVSQVLNRLTFASTLSHLRRLNSPIGRDGKLTPLKKVILDMRTNTICWNPMEAFIFTAANEDYNLYTFDMRALDTPVMVHMDHVSAVLDVDYSPTGKEFVSASFDKSIRIFPVDKSRSREVYHTKRMQHVICVKWTSDSKYIMCGSDEMNIRLWKANASEKLGVLTSREKAAKDYNQKLKEKFQHYPHIKRIARHRHLPKSIYSQIQEQRIMKEARRRKEVNRIKHSKPGSVPLVSEKKKHVVAVVK

SEQ ID NO: 860765 - protein, 337 aa, Homo sapiens; identical to SEQ ID NO: 860763

SEQ ID NO: 860766 - protein, 121 aa, Homo sapiens
MQHVICVKWTSDSKYIMCGSDEMNIRLWKANASEKLGVLTSREKAAKDYNQKLKEKFQHYPHIKRIARHRHLPKSIYSQIQEQRIMKEARRRKEVNRIKHSKPGSVPLVSEKKKHVVAVVK

SEQ ID NO: 860767 - protein, 373 aa, Homo sapiens
MQWPPPWRRSPLVSATPPPGPTRGLLCPRRVSEAGDSSTEGARTGHRHYVTPAESAMEGRSQPLPSLRPASPTNAPAHGRGSDCTAKEPPLANVCRQNYGAAQDPVEPAGRRSASHVTGSSLGKAEVACGRRWRWAELLADTSWSPAGRATEMKVKMLSRNPDNYVRETKLDLQRVPRNYDPALHPFEVPREYIRALNATKLERVFAKPFLASLDGHRDGVNCLAKHPEKLATVLSGACDGEVRIWNLTQRNCIRTIQAHEGFVRGICTRFCGTSFFTVGDDKTVKQWKMDGPGYGDEEEPLHTILGKTVYTGIDHHWKEAVFATCGQQVDIWDEQRTNPICSMTWGFDSISSVKFNPIEVMFFFKYVLLIMA

SEQ ID NO: 860768 - protein, 337 aa, Homo sapiens; identical to SEQ ID NO: 860763

SEQ ID NO: 860769 - protein, 337 aa, Homo sapiens; identical to SEQ ID NO: 860763

SEQ ID NO: 860770 - protein, 742 aa, Homo sapiens
LKKQFACDVDKRGPRWVRNPGRPPRFGPPALVPWAGGAGKAGAWRALRGPEAGAGGGGGLGAAAMPTWGARPASPDRFAVSAEAENKVREQQPHVERIFSVGVSVLPKDCPDNPHIWLQLEGPKENASRAKEYLKGLCSPELQDEIHYPPKLHCIFLGAQGFFLDCLAWSTSAHLVPRAPGSLMISGLTEAFVMAQSRVEELAERLSWDFTPGPSSGASQCTGVLRDFSALLQSPGDAHREALLQLPLAVQEELLSLVQEASSGQGPGALASWEGRSSALLGAQCQGVRAPPSDGRESLDTGSMGPGDCRGARGDTYAVEKEGGKQGGPREMDLGWKELPGEEAWEREVALRPQSVGGGARESAPLKGKALGKEEIALGGGGFCVHREPPGAHGSCHRAAQSRGASLLQRLHNGNASPPRVPSPPPAPEPPWHCGDRGDCGDRGDVGDRGDKQQGMARGRGPQWKRGARGGNLVTGTQRFKEALQDPFTLCLANVPGQPDLRHIVIDGSNVAMVHGLQHYFSSRGIAIAVQYFWDRGHRDITVFVPQWRFSKDAKVRESHFLQKLYSLSLLSLTPSRVMDGKRISSYDDRFMVKLAEETDGIIVSNDQFRDLAEESEKWMAIIRERLLPFTFVGNLFMVPDDPLGRNGPTLDEFLKKPARTQGSSKAQHPSRGFAEHGKQQQGREEEKGSGGIRKTRETERLRRQLLEVFWGQDHKVDFILQREPYCRDINQLSEALLSLNF

SEQ ID NO: 860771 - protein, 700 aa, Homo sapiens
TQETVCVRCGQERSPLGLGAAAMPTWGARPASPDRFAVSAEAENKVREQQPHVERIFSVGVSVLPKDCPDNPHIWLQLEGPKENASRAKEYLKGLCSPELQDEIHYPPKLHCIFLGAQGFFLDCLAWSTSAHLVPRAPGSLMISGLTEAFVMAQSRVEELAERLSWDFTPGPSSGASQCTGVLRDFSALLQSPGDAHREALLQLPLAVQEELLSLVQEASSGQGPGALASWEGRSSALLGAQCQGVRAPPSDGRESLDTGSMGPGDCRGARGDTYAVEKEGGKQGGPREMDLGWKELPGEEAWEREVALRPQSVGGGARESAPLKGKALGKEEIALGGGGFCVHREPPGAHGSCHRAAQSRGASLLQRLHNGNASPPRVPSPPPAPEPPWHCGDRGDCGDRGDVGDRGDKQQGMARGRGPQWKRGARGGNLVTGTQRFKEALQDPFTLCLANVPGQPDLRHIVIDGSNVAMVHGLQHYFSSRGIAIAVQYFWDRGHRDITVFVPQWRFSKDAKVRESHFLQKLYSLSLLSLTPSRVMDGKRISSYDDRFMVKLAEETDGIIVSNDQFRDLAEESEKWMAIIRERLLPFTFVGNLFMVPDDPLGRNGPTLDEFLKKPARTQGSSKAQHPSRGFAEHGKQQQGREEEKGSGGIRKTRETERLRRQLLEVFWGQDHKVDFILQREPYCRDINQLSEALLSLNF

SEQ ID NO: 860772 - protein, 742 aa, Homo sapiens; identical to SEQ ID NO: 860770

SEQ ID NO: 860773 - protein, 133 aa, Homo sapiens
SDRYEEELRSAWQYQRSLLPFTFVGNLFMVPDDPLGRNGPTLDEFLKKPARTQGSSKAQHPSRGFAEHGKQQQGREEEKGSGGIRKTRETERLRRQLLEVFWGQDHKVDFILQREPYCRDINQLSEALLSLNF

SEQ ID NO: 860774 - protein, 742 aa, Homo sapiens; identical to SEQ ID NO: 860770

SEQ ID NO: 860775 - protein, 724 aa, Homo sapiens
GEKGGMKPPAHWTGGLQPELQGSPAGWDSTEGWTWGDGEHGLGAAAMPTWGARPASPDRFAVSAEAENKVREQQPHVERIFSVGVSVLPKDCPDNPHIWLQLEGPKENASRAKEYLKGLCSPELQDEIHYPPKLHCIFLGAQGFFLDCLAWSTSAHLVPRAPGSLMISGLTEAFVMAQSRVEELAERLSWDFTPGPSSGASQCTGVLRDFSALLQSPGDAHREALLQLPLAVQEELLSLVQEASSGQGPGALASWEGRSSALLGAQCQGVRAPPSDGRESLDTGSMGPGDCRGARGDTYAVEKEGGKQGGPREMDLGWKELPGEEAWEREVALRPQSVGGGARESAPLKGKALGKEEIALGGGGFCVHREPPGAHGSCHRAAQSRGASLLQRLHNGNASPPRVPSPPPAPEPPWHCGDRGDCGDRGDVGDRGDKQQGMARGRGPQWKRGARGGNLVTGTQRFKEALQDPFTLCLANVPGQPDLRHIVIDGSNVAMVHGLQHYFSSRGIAIAVQYFWDRGHRDITVFVPQWRFSKDAKVRESHFLQKLYSLSLLSLTPSRVMDGKRISSYDDRFMVKLAEETDGIIVSNDQFRDLAEESEKWMAIIRERLLPFTFVGNLFMVPDDPLGRNGPTLDEFLKKPARTQGSSKAQHPSRGFAEHGKQQQGREEEKGSGGIRKTRETERLRRQLLEVFWGQDHKVDFILQREPYCRDINQLSEALLSLNF

SEQ ID NO: 860776 - protein, 742 aa, Homo sapiens; identical to SEQ ID NO: 860770

SEQ ID NO: 860777 - protein, 742 aa, Homo sapiens; identical to SEQ ID NO: 860770

SEQ ID NO: 860778 - protein, 599 aa, Homo sapiens
LKKQFACDVDKRGPRWVRNPGRPPRFGPPALVPWAGGAGKAGAWRALRGPEAGAGGGGGLGAAAMPTWGARPASPDRFAVSAEAENKVREQQPHVERIFSVGVSVLPKDCPDNPHIWLQLEGPKENASRAKEYLKGLCSPELQDEIHYPPKLHCIFLGAQGFFLDCLAWSTSAHLVPRAPGSLMISGLTEAFVMAQSRVEELAERLSWDFTPGPSSGASQCTGVLRDFSALLQSPGDAHREALLQLPLAVQEELLSLVQEASSGQGPGALASWEGRSSALLGAQCQGVRAPPSDGRESLDTGSMGPGDCRGARGDTYAVEKEGGKQGGPREMDLGWKELPGEEAWEREVALRPQSVGGGARESAPLKGKALGKEEIALGGGGFCVHREPPGAHGSCHRAAQSRGASLLQRLHNGNASPPRVPSPPPAPEPPWHCGDRGDCGDRGDVGDRGDKQQGMARGRGPQWKRGARGGNLVTGTQRFKEALQDPFTLCLANVPGQPDLRHIVIDGSNVAMVHGLQHYFSSRGIAIAVQYFWDRGHRDITVFVPQWRFSKDAKVRESHFLQKLYSLSLLSLTPSRVMDGKRISSYDDRYLLLSWPQA

SEQ ID NO: 860779 - protein, 2517 aa, Homo sapiens
MKEICRICARELCGNQRRWIFHTASKLNLQVLLSHVLGKDVPRDGKAEFACSKCAFMLDRIYRFDTVIARIEALSIERLQKLLLEKDRLKFCIASMYRKNNDDSGAEIKAGNGTVDMSVLPDARYSALLQEDFAYSGFECWVENEDQIQEPHSCHGSEGPGNRPRRCRGCAALRVADSDYEAICKVPRKVARSISCGPSSRWSTSICTEEPALSEVGPPDLASTKVPPDGESMEEETPGSSVESLDASVQASPPQQKDEETERSAKELGKCDCCSDDQAPQHGCNHKLELALSMIKGLDYKPIQSPRGSRLPIPVKSSLPGAKPGPSMTDGVSSGFLNRSLKPLYKTPVSYPLELSDLQELWDDLCEDYLPLRVQPMTEELLKQQKLNSHETTITQQSVSDSHLAELQEKIQQTEATNKILQEKLNEMSYELKCAQESSQKQDGTIQNLKETLKSRERETEELYQVIEGQNDTMAKLREMLHQSQLGQLHSSEGTSPAQQQVALLDLQSALFCSQLEIQKLQRVVRQKERQLADAKQCVQFVEAAAHESEQQKEASWKHNQELRKALQQLQEELQNKSQQLRAWEAEKYNEIRTQEQNIQHLNHSLSHKEQLLQEFRELLQYRDNSDKTLEANEMLLEKLRQRIHDKAVALERAIDEKFSALEEKEKELRQLRLAVRERDHDLERLRDVLSSNEATMQSMESLLRAKGLEVEQLSTTCQNLQWLKEEMETKFSRWQKEQESIIQQLQTSLHDRNKEVEDLSATLLCKLGPGQSEIAEELCQRLQRKERMLQDLLSDRNKQVLEHEMEIQGLLQSVSTREQESQAAAEKLVQALMERNSELQALRQYLGGRDSLMSQAPISNQQAEVTPTGRLGKQTDQGSMQIPSRDDSTSLTAKEDVSIPRSTLGDLDTVAGLEKELSNAKEELELMAKKERESQMELSALQSMMAVQEEELQVQAADMESLTRNIQIKEDLIKDLQMQLVDPEDIPAMERLTQEVLLLREKVASVESQGQEISGNRRQQLLLMLEGLVDERSRLNEALQAERQLYSSLVKFHAHPESSERDRTLQVELEGAQVLRSRLEEVLGRSLERLNRLETLAAIGGAAAGDDTEDTSTEFTDSIEEEAAHHSHQQLVKVALEKSLATVETQNPSFSPPSPMGGDSNRCLQEEMLHLRAEFHQHLEEKRKAEEELKELKAQIEEAGFSSVSHIRNTMLSLCLENAELKEQMGEAMSDGWEIEEDKEKGEVMVETVVTKEGLSESSLQAEFRKLQGKLKNAHNIINLLKEQLVLSSKEGNSKLTPELLVHLTSTIERINTELVGSPGKHQHQEEGNVTVRPFPRPQSLDLGATFTVDAHQLDNQSQPRDPGPQSAFSLPGSTQHLRSQLSQCKQRYQDLQEKLLLSEATVFAQANELEKYRVMLTGESLVKQDSKQIQVDLQDLGYETCGRSENEAEREETTSPECEEHNSLKEMVLMEGLCSEQGRRGSTLASSSERKPLENQLGKQEEFRVYGKSENILVLRKDIKDLKAQLQNANKVIQNLKSRVRSLSVTSDYSSSLERPRKLRAVGTLEGSSPHSVPDEDEGWLSDGTGAFYSPGLQAKKDLESLIQRVSQLEAQLPKNGLEEKLAEELRSASWPGKYDSLIQDQARELSYLRQKIREGRGICYLITRHAKDTVKSFEDLLRSNDIDYYLGQSFREQLAQGSQLTERLTSKLSTKDHKSEKDQAGLEPLALRLSRELQEKEKVIEVLQAKLDARSLTPSSSHALSDSHRSPSSTSFLSDELEACSDMDIVSEYTHYEEKKASPSHSDSIHHSSHSAVLSSKPSSTSASQGAKAESNSNPISLPTPQNTPKEANQAHSGFHFHSIPKLASLPQAPLPSAPSSFLPFSPTGPLLLGCCETPVVSLAEAQQELQMLQKQLGESASTVPPASTATLLSNDLEADSSYYLNSAQPHSPPRGTIELGRILEPGYLGSSGKWDVMRPQKGSVSGDLSSGSSVYQLNSKPTGADLLEEHLGEIRNLRQRLEESICINDRLREQLEHRLTSTARGRGSTSNFYSQGLESIPQLCNENRVLREDNRRLQAQLSHVSREHSQETESLREALLSSRSHLQELEKELEHQKVERQQLLEDLREKQQEVLHFREERLSLQENDSSGPCLSLVRLQHKLVLLQQQCEEKQQLFESLQSELQIYEALYGNSKKGLKAYSLDACHQIPLSSDLSHLVAEVRALRGQLEQSIQGNNCLRLQLQQQLESGAGKASLSPSSINQNFPASTDPGNKQLLLQDSAVSPPVRDVGMNSPALVFPSSASSTPGSETPIINRANGLGLDTSPVMKTPPKLEGDATDGSFANKHGRHVIGHIDDYSALRQQIAEGKLLVKKIVSLVRSACSFPGLEAQGTEVLGSKGIHELRSSTSALHHALEESASLLTMFWRAALPSTHIPVLPGKVGESTERELLELRTKVSKQERLLQSTTEHLKNANQQKESMEQFIVSQLTRTHDVLKKARTNLEVKSLRALPCTPAL

SEQ ID NO: 860780 - protein, 2141 aa, Homo sapiens
MTEELLKQQKLNSHETTITQQSVSDSHLAELQEKIQQTEATNKILQEKLNEMSYELKCAQESSQKQDGTIQNLKETLKSRERETEELYQVIEGQNDTMAKLREMLHQSQLGQLHSSEGTSPAQQQVALLDLQSALFCSQLEIQKLQRVVRQKERQLADAKQCVQFVEAAAHESEQQKEASWKHNQELRKALQQLQEELQNKSQQLRAWEAEKYNEIRTQEQNIQHLNHSLSHKEQLLQEFRELLQYRDNSDKTLEANEMLLEKLRQRIHDKAVALERAIDEKFSALEEKEKELRQLRLAVRERDHDLERLRDVLSSNEATMQSMESLLRAKGLEVEQLSTTCQNLQWLKEEMETKFSRWQKEQESIIQQLQTSLHDRNKEVEDLSATLLCKLGPGQSEIAEELCQRLQRKERMLQDLLSDRNKQVLEHEMEIQGLLQSVSTREQESQAAAEKLVQALMERNSELQALRQYLGGRDSLMSQAPISNQQAEVTPTGRLGKQTDQGSMQIPSRDDSTSLTAKEDVSIPRSTLGDLDTVAGLEKELSNAKEELELMAKKERESQMELSALQSMMAVQEEELQVQAADMESLTRNIQIKEDLIKDLQMQLVDPEDIPAMERLTQEVLLLREKVASVESQGQEISGNRRQQLLLMLEGLVDERSRLNEALQAERQLYSSLVKFHAHPESSERDRTLQVELEGAQVLRSRLEEVLGRSLERLNRLETLAAIGGAAAGDDTEDTSTEFTDSIEEEAAHHSHQQLVKVALEKSLATVETQNPSFSPPSPMGGDSNRCLQEEMLHLRAEFHQHLEEKRKAEEELKELKAQIEEAGFSSVSHIRNTMLSLCLENAELKEQMGEAMSDGWEIEEDKEKGEVMVETVVTKEGLSESSLQAEFRKLQGKLKNAHNIINLLKEQLVLSSKEGNSKLTPELLVHLTSTIERINTELVGSPGKHQHQEEGNVTVRPFPRPQSLDLGATFTVDAHQLDNQSQPRDPGPQSAFSLPGSTQHLRSQLSQCKQRYQDLQEKLLLSEATVFAQANELEKYRVMLTGESLVKQDSKQIQVDLQDLGYETCGRSENEAEREETTSPECEEHNSLKEMVLMEGLCSEQGRRGSTLASSSERKPLENQLGKQEEFRVYGKSENILVLRKDIKDLKAQLQNANKVIQNLKSRVRSLSVTSDYSSSLERPRKLRAVGTLEGSSPHSVPDEDEGWLSDGTGAFYSPGLQAKKDLESLIQRVSQLEAQLPKNGLEEKLAEELRSASWPGKYDSLIQDQARELSYLRQKIREGRGICYLITRHAKDTVKSFEDLLRSNDIDYYLGQSFREQLAQGSQLTERLTSKLSTKDHKSEKDQAGLEPLALRLSRELQEKEKVIEVLQAKLDARSLTPSSSHALSDSHRSPSSTSFLSDELEACSDMDIVSEYTHYEEKKASPSHSDSIHHSSHSAVLSSKPSSTSASQGAKAESNSNPISLPTPQNTPKEANQAHSGFHFHSIPKLASLPQAPLPSAPSSFLPFSPTGPLLLGCCETPVVSLAEAQQELQMLQKQLGESASTVPPASTATLLSNDLEADSSYYLNSAQPHSPPRGTIELGRILEPGYLGSSGKWDVMRPQKGSVSGDLSSGSSVYQLNSKPTGADLLEEHLGEIRNLRQRLEESICINDRLREQLEHRLTSTARGRGSTSNFYSQGLESIPQLCNENRVLREDNRRLQAQLSHVSREHSQETESLREALLSSRSHLQELEKELEHQKVERQQLLEDLREKQQEVLHFREERLSLQENDSSGPCLSLVRLQHKLVLLQQQCEEKQQLFESLQSELQIYEALYGNSKKGLKAYSLDACHQIPLSSDLSHLVAEVRALRGQLEQSIQGNNCLRLQLQQQLESGAGKASLSPSSINQNFPASTDPGNKQLLLQDSAVSPPVRDVGMNSPALVFPSSASSTPGSETPIINRANGLGLDTSPVMKTPPKLEGDATDGSFANKHGRHVIGHIDDYSALRQQIAEGKLLVKKIVSLVRSACSFPGLEAQGTEVLGSKGIHELRSSTSALHHALEESASLLTMFWRAALPSTHIPVLPGKVGESTERELLELRTKVSKQERLLQSTTEHLKNANQQKESMEQFIVSQLTRTHDVLKKARTNLEVKSLRALPCTPAL

SEQ ID NO: 860781 - protein, 2396 aa, Homo sapiens
MKEICRICARELCGNQRRWIFHTASKLNLQVLLSHVLGKDVPRDGKAEFACSKCAFMLDRIYRFDTVIARIEALSIERLQKLLLEKDRLKFCIASMYRKNNDDSGAEIKAGNGTVDMSVLPDARYSALLQEDFAYSGFECWVENEDQIQEPHSCHGSEGPGNRPRRCRGCAALRVADSDYEAICKVPRKVARSISCGPSSRWSTSICTEEPALSEVGPPDLASTKVPPDGESMEEETPGSSVESLDASVQASPPQQKDEETERSAKELGKCDCCSDDQAPQHGCNHKLELALSMIKGLDYKPIQSPRGSRLPIPVKSSLPGAKPGPSMTDGVSSGFLNRSLKPLYKTPVSYPLELSDLQELWDDLCEDYLPLRVQPMTEELLKQQKLNSHETTITQQSVSDSHLAELQEKIQQTEATNKILQEKLNEMSYELKCAQESSQKQDGTIQNLKETLKSRERETEELYQVIEGQNDTMAKLREMLHQSQLGQLHSSEGTSPAQQQVALLDLQSALFCSQLEIQKLQRVVRQKERQLADAKQCVQFVEAAAHESEQQKEASWKHNQELRKALQQLQEELQNKSQQLRAWEAEKYNEIRTQEQNIQHLNHSLSHKEQLLQEFRELLQYRDNSDKTLEANEMLLEKLRQRIHDKAVALERAIDEKFSALEEKEKELRQLRLAVRERDHDLERLRDVLSSNEATMQSMESLLRAKGLEVEQLSTTCQNLQWLKEEMETKFSRWQKEQESIIQQLQTSLHDRNKEVEDLSATLLCKLGPGQSEIAEELCQRLQRKERMLQDLLSDRNKQVLEHEMEIQGLLQSVSTREQESQAAAEKLVQALMERNSELQALRQYLGGRDSLMSQAPISNQQAEVTPTGRLGKQTDQGSMQIPSRDDSTSLTAKEDVSIPRSTLGDLDTVAGLEKELSNAKEELELMAKKERESQMELSALQSMMAVQEEELQVQAADMESLTRNIQIKEDLIKDLQMQLVDPEDIPAMERLTQEVLLLREKVASVESQGQEISGNRRQQLLLMLEGLVDERSRLNEALQAERQLYSSLVKFHAHPESSERDRTLQVELEGAQVLRSRLEEVLGRSLERLNRLETLAAIGGAAAGDDTEDTSTEFTDSIEEEAAHHSHQQLVKVALEKSLATVETQNPSFSPPSPMGGDSNRCLQEEMLHLRAEFHQHLEEKRKAEEELKELKAQIEEAGFSSVSHIRNTMLSLCLENAELKEQMGEAMSDGWEIEEDKEKGEVMVETVVTKEGLSESSLQAEFRKLQGKLKNAHNIINLLKEQLVLSSKEGNSKLTPELLVHLTSTIERINTELVGSPGKHQHQEEGNVTVRPFPRPQSLDLGATFTVDAHQLDNQSQPRDPGPQSAFSLPGSTQHLRSQLSQCKQRYQDLQEKLLLSEATVFAQANELEKYRVMLTGESLVKQDSKQIQVDLQDLGYETCGRSENEAEREETTSPECEEHNSLKEMVLMEGLCSEQGRRGSTLASSSERKPLENQLGKQEEFRVYGKSENILVLRKDIKDLKAQLQNANKVIQNLKSRVRSLSVTSDYSSSLERPRKLRAVGTLEGSSPHSVPDEDEGWLSDGTGAFYSPGLQAKKDLESLIQRVSQLEAQLPKNGLEEKLAEELRSASWPGKYDSLIQDQARELSYLRQKIREGRGICYLITRHAKDTVKSFEDLLRSNDIDYYLGQSFREQLAQGSQLTERLTSKLSTKDHKSEKDQAGLEPLALRLSRELQEKEKVIEVLQAKLDARSLTPSSSHALSDSHRSPSSTSFLSDELEACSDMDIVSEYTHYEEKKASPSHSGASTVPPASTATLLSNDLEADSSYYLNSAQPHSPPRGTIELGRILEPGYLGSSGKWDVMRPQKGSVSGDLSSGSSVYQLNSKPTGADLLEEHLGEIRNLRQRLEESICINDRLREQLEHRLTSTARGRGSTSNFYSQGLESIPQLCNENRVLREDNRRLQAQLSHVSREHSQETESLREALLSSRSHLQELEKELEHQKVERQQLLEDLREKQQEVLHFREERLSLQENDSRLQHKLVLLQQQCEEKQQLFESLQSELQIYEALYGNSKKGLKAYSLDACHQIPLSSDLSHLVAEVRALRGQLEQSIQGNNCLRLQLQQQLESGAGKASLSPSSINQNFPASTDPGNKQLLLQDSAVSPPVRDVGMNSPALVFPSSASSTPGSETPIINRANGLGLDTSPVMKTPPKLEGDATDGSFANKHGRHVIGHIDDYSALRQQIAEGKLLVKKIVSLVRSACSFPGLEAQGTEVLGSKGIHELRSSTSALHHALEESASLLTMFWRAALPSTHIPVLPGKVGESTERELLELRTKVSKQERLLQSTTEHLKNANQQKESMEQFIVSQLTRTHDVLKKARTNLEVKSLRALPCTPAL

SEQ ID NO: 860782 - protein, 2348 aa, Homo sapiens
MKEICRICARELCGNQRRWIFHTASKLNLQVLLSHVLGKDVPRDGKAEFACSKCAFMLDRIYRFDTVIARIEALSIERLQKLLLEKDRLKFCIASMYRKNNDDSGAEIKAGNGTVDMSVLPDARYSALLQEDFAYSGFECWVENEDQIQEPHSCHGSEGPGNRPRRCRGCAALRVADSDYEAICKVPRKVARSISCGPSSRWSTSICTEEPALSEVGPPDLASTKVPPDGESMEEETPGSSVESLDASVQASPPQQKDEETERSAKELGKCDCCSDDQAPQHGCNHKLELALSMIKGLDYKPIQSPRGSRLPIPVKSSLPGAKPGPSMTDGVSSGFLNRSLKPLYKTPVSYPLELSDLQELWDDLCEDYLPLRVQPMTEELLKQQKLNSHETTITQQSVSDSHLAELQEKIQQTEATNKILQEKLNEMSYELKCAQESSQKQDGTIQNLKETLKSRERETEELYQVIEGQNDTMAKLREMLHQSQLGQLHSSEGTSPAQQQVALLDLQSALFCSQLEIQKLQRVVRQKERQLADAKQCVQFVEAAAHESEQQKEASWKHNQELRKALQQLQEELQNKSQQLRAWEAEKYNEIRTQEQNIQHLNHSLSHKEQLLQEFRELLQYRDNSDKTLEANEMLLEKLRQRIHDKAVALERAIDEKFSALEEKEKELRQLRLAVRERDHDLERLRDVLSSNEATMQSMESLLRAKGLEVEQLSTTCQNLQWLKEEMETKFSRWQKEQESIIQQLQTSLHDRNKEVEDLSATLLCKLGPGQSEIAEELCQRLQRKERMLQDLLSDRNKQVLEHEMEIQGLLQSVSTREQESQAAAEKLVQALMERNSELQALRQYLGGRDSLMSQAPISNQQAEVTPTGRLGKQTDQGSMQIPSRDDSTSLTAKEDVSIPRSTLGDLDTVAGLEKELSNAKEELELMAKKERESQMELSALQSMMAVQEEELQVQAADMESLTRNIQIKEDLIKDLQMQLVDPEDIPAMERLTQEVLLLREKVASVESQGQEISGNRRQQLLLMLEGLVDERSRLNEALQAERQLYSSLVKFHAHPESSERDRTLQVELEGAQVLRSRLEEVLGRSLERLNRLETLAAIGGAAAGDDTEDTSTEFTDSIEEEAAHHSHQQLVKVALEKSLATVETQNPSFSPPSPMGGDSNRCLQEEMLHLRAEFHQHLEEKRKAEEELKELKAQIEEAGFSSVSHIRNTMLSLCLENAELKEQMGEAMSDGWEIEEDKEKGEVMVETVVTKEGLSESSLQAEFRKLQGKLKNAHNIINLLKEQLVLSSKEGNSKLTPELLVHLTSTIERINTELVGSPGKHQHQEEGNVTVRPFPRPQSLDLGATFTVDAHQLDNQSQPRDPGPQSAFSLPGSTQHLRSQLSQCKQRYQDLQEKLLLSEATVFAQANELEKYRVMLTGESLVKQDSKQIQVDLQDLGYETCGRSENEAEREETTSPECEEHNSLKEMVLMEGLCSEQGRRGSTLASSSERKPLENQLGKQEEFRVYGKSENILVLRKDIKDLKAQLQNANKVIQNLKSRVRSLSVTSDYSSSLERPRKLRAVGTLEGSSPHSVPDEDEGWLSDGTGAFYSPGLQAKKDLESLIQRVSQLEAQLPKNGLEEKLAEELRSASWPGKYDSLIQDQARELSYLRQKIREGRGICYLITRHAKDTVKSFEDLLRSNDIDYYLGQSFREQLAQGSQLTERLTSKLSTKDHKSEKDQAGLEPLALRLSRELQEKEKVIEVLQAKLDARSLTPSSSHALSDSHRSPSSTSFLSDELEACSDMDIVSEYTHYEEKKASPSHSDSIHHSSHSAVLSSKPSSTSASQGAKAESNSNPISLPTPQNTPKEANQAHSGFHFHSIPKLASLPQAPLPSAPSSFLPFSPTGPLLLGCCETPVVSLAEAQQELQMLQKQLGESASTVPPASTATLLSNDLEADSSYYLNSAQPHSPPRGTIELGRILEPGYLGSSGKWDVMRPQKGSVSGDLSSGSSVYQLNSKPTGADLLEEHLGEIRNLRQRLEESICINDRLREQLEHRLTSTARGRGSTSNFYSQGLESIPQLCNENRVLREDNRRLQAQLSHVSREHSQETESLREALLSSRSHLQELEKELEHQKVERQQLLEDLREKQQEVLHFREDVFPSRKTTPGLGLDTSPVMKTPPKLEGDATDGSFANKHGRHVIGHIDDYSALRQQIAEGKLLVKKIVSLVRSACSFPGLEAQGTEVLGSKGIHELRSSTSALHHALEESASLLTMFWRAALPSTHIPVLPGKVGESTERELLELRTKVSKQERLLQSTTEHLKNANQQKESMEQFIVSQLTRTHDVLKKARTNLEVKSLRALPCTPAL

SEQ ID NO: 860783 - protein, 1638 aa, Homo sapiens
RVGSCTSKRTHKGDPLPSLAQLGYTSHQAEVIPTRDLDTVAGLEKELSNAKEELELMAKKERESQMELSALQSMMAVQEEELQVQAADMESLTRNIQIKEDLIKDLQMQLVDPEDIPAMERLTQEVLLLREKVASVESQGQEISGNRRQQLLLMLEGLVDERSRLNEALQAERQLYSSLVKFHAHPESSERDRTLQVELEGAQVLRSRLEEVLGRSLERLNRLETLAAIGGAAAGDDTEDTSTEFTDSIEEEAAHHSHQQLVKVALEKSLATVETQNPSFSPPSPMGGDSNRCLQEEMLHLRAEFHQHLEEKRKAEEELKELKAQIEEAGFSSVSHIRNTMLSLCLENAELKEQMGEAMSDGWEIEEDKEKGEVMVETVVTKEGLSESSLQAEFRKLQGKLKNAHNIINLLKEQLVLSSKEGNSKLTPELLVHLTSTIERINTELVGSPGKHQHQEEGNVTVRPFPRPQSLDLGATFTVDAHQLDNQSQPRDPGPQSAFSLPGSTQHLRSQLSQCKQRYQDLQEKLLLSEATVFAQANELEKYRVMLTGESLVKQDSKQIQVDLQDLGYETCGRSENEAEREETTSPECEEHNSLKEMVLMEGLCSEQGRRGSTLASSSERKPLENQLGKQEEFRVYGKSENILVLRKDIKDLKAQLQNANKVIQNLKSRVRSLSVTSDYSSSLERPRKLRAVGTLEGSSPHSVPDEDEGWLSDGTGAFYSPGLQAKKDLESLIQRVSQLEAQLPKNGLEEKLAEELRSASWPGKYDSLIQDQARELSYLRQKIREGRGICYLITRHAKDTVKSFEDLLRSNDIDYYLGQSFREQLAQGSQLTERLTSKLSTKDHKSEKDQAGLEPLALRLSRELQEKEKVIEVLQAKLDARSLTPSSSHALSDSHRSPSSTSFLSDELEACSDMDIVSEYTHYEEKKASPSHSDSIHHSSHSAVLSSKPSSTSASQGAKAESNSNPISLPTPQNTPKEANQAHSGFHFHSIPKLASLPQAPLPSAPSSFLPFSPTGPLLLGCCETPVVSLAEAQQELQMLQKQLGESASTVPPASTATLLSNDLEADSSYYLNSAQPHSPPRGTIELGRILEPGYLGSSGKWDVMRPQKGSVSGDLSSGSSVYQLNSKPTGADLLEEHLGEIRNLRQRLEESICINDRLREQLEHRLTSTARGRGSTSNFYSQGLESIPQLCNENRVLREDNRRLQAQLSHVSREHSQETESLREALLSSRSHLQELEKELEHQKVERQQLLEDLREKQQEVLHFREERLSLQENDSRLQHKLVLLQQQCEEKQQLFESLQSELQIYEALYGNSKKGLKAYSLDACHQIPLSSDLSHLVAEVRALRGQLEQSIQGNNCLRLQLQQQLESGAGKASLSPSSINQNFPASTDPGNKQLLLQDSAVSPPVRDVGMNSPALVFPSSASSTPGSETPIINRANGLGLDTSPVMKTPPKLEGDATDGSFANKHGRHVIGHIDDYSALRQQIAEGKLLVKKIVSLVRSACSFPGLEAQGTEVLGSKGIHELRSSTSALHHALEESASLLTMFWRAALPSTHIPVLPGKVGESTERELLELRTKVSKQERLLQSTTEHLKNANQQKESMEQFIVSQLTRTHDVLKKARTNLEVKSLRALPCTPAL

SEQ ID NO: 860784 - protein, 1116 aa, Homo sapiens
MKEICRICARELCGNQRRWIFHTASKLNLQVLLSHVLGKDVPRDGKAEFACSKCAFMLDRIYRFDTVIARIEALSIERLQKLLLEKDRLKFCIASMYRKNNDDSGAEIKAGNGTVDMSVLPDARYSALLQEDFAYSGFECWVENEDQIQEPHSCHGSEGPGNRPRRCRGCAALRVADSDYEAICKVPRKVARSISCGPSSRWSTSICTEEPALSEVGPPDLASTKVPPDGESMEEETPGSSVESLDASVQASPPQQKDEETERSAKELGKCDCCSDDQAPQHGCNHKLELALSMIKGLDYKPIQSPRGSRLPIPVKSSLPGAKPGPSMTDGVSSGFLNRSLKPLYKTPVSYPLELSDLQELWDDLCEDYLPLRVQPMTEELLKQQKLNSHETTITQQSVSDSHLAELQEKIQQTEATNKILQEKLNEMSYELKCAQESSQKQDGTIQNLKETLKSRERETEELYQVIEGQNDTMAKLREMLHQSQLGQLHSSEGTSPAQQQVALLDLQSALFCSQLEIQKLQRVVRQKERQLADAKQCVQFVEAAAHESEQQKEASWKHNQELRKALQQLQEELQNKSQQLRAWEAEKYNEIRTQEQNIQHLNHSLSHKEQLLQEFRELLQYRDNSDKTLEANEMLLEKLRQRIHDKAVALERAIDEKFSALEEKEKELRQLRLAVRERDHDLERLRDVLSSNEATMQSMESLLRAKGLEVEQLSTTCQNLQWLKEEMETKFSRWQKEQESIIQQLQTSLHDRNKEVEDLSATLLCKLGPGQSEIAEELCQRLQRKERMLQDLLSDRNKQVLEHEMEIQGLLQSVSTREQESQAAAEKLVQALMERNSELQALRQYLGGRDSLMSQAPISNQQAEVTPTGRLGKQTDQGSMQIPSRDDSTSLTAKEDVSIPRSTLGDLDTVAGLEKELSNAKEELELMAKKERESQMELSALQSMMAVQEEELQVQAADMESLTRNIQIKEDLIKDLQMQLVDPEDIPAMERLTQEVLLLREKVASVESQGQEISGNRRQQLLLMLEGLVDERSRLNEALQAERQLYSSLVKFHAHPESSERDRTLQVELEGAQVLRSRLEEVLGRSLERLNRLETLAAIGGGELESVRIHHKHAY

SEQ ID NO: 860785 - protein, 1132 aa, Homo sapiens
MKEICRICARELCGNQRRWIFHTASKLNLQVLLSHVLGKDVPRDGKAEFACSKCAFMLDRIYRFDTVIARIEALSIERLQKLLLEKDRLKFCIASMYRKNNDDSGAEIKAGNGTVDMSVLPDARYSALLQEDFAYSGFECWVENEDQIQEPHSCHGSEGPGNRPRRCRGCAALRVADSDYEAICKVPRKVARSISCGPSSRWSTSICTEEPALSEVGPPDLASTKVPPDGESMEEETPGSSVESLDASVQASPPQQKDEETERSAKELGKCDCCSDDQAPQHGCNHKLELALSMIKGLDYKPIQSPRGSRLPIPVKSSLPGAKPGPSMTDGVSSGFLNRSLKPLYKTPVSYPLELSDLQELWDDLCEDYLPLRVQPMTEELLKQQKLNSHETTITQQSVSDSHLAELQEKIQQTEATNKILQEKLNEMSYELKCAQESSQKQDGTIQNLKETLKSRERETEELYQVIEGQNDTMAKLREMLHQSQLGQLHSSEGTSPAQQQVALLDLQSALFCSQLEIQKLQRVVRQKERQLADAKQCVQFVEAAAHESEQQKEASWKHNQELRKALQQLQEELQNKSQQLRAWEAEKYNEIRTQEQNIQHLNHSLSHKEQLLQEFRELLQYRDNSDKTLEANEMLLEKLRQRIHDKAVALERAIDEKFSALEEKEKELRQLRLAVRERDHDLERLRDVLSSNEATMQSMESLLRAKGLEVEQLSTTCQNLQWLKEEMETKFSRWQKEQESIIQQLQTSLHDRNKEVEDLSATLLCKLGPGQSEIAEELCQRLQRKERMLQDLLSDRNKQVLEHEMEIQGLLQSVSTREQESQAAAEKLVQALMERNSELQALRQYLGGRDSLMSQAPISNQQAEVTPTGRLGKQTDQGSMQIPSRDDSTSLTAKEDVSIPRSTLGDLDTVAGLEKELSNAKEELELMAKKERESQMELSALQSMMAVQEEELQVQAADMESLTRNIQIKEDLIKDLQMQLVDPEDIPAMERLTQEVLLLREKVASVESQGQEISGNRRQQLLLMLEGLVDERSRLNEALQAERQLYSSLVKFHAHPESSERDRTLQVELEGAQVLRSRLEEVLGRSLERLNRLETLAAIGGAAAGDDTEDTSTEFTDSIEEEAAHHSHQQL

SEQ ID NO: 860786 - protein, 1026 aa, Homo sapiens
MKEICRICARELCGNQRRWIFHTASKLNLQVLLSHVLGKDVPRDGKAEFACSKCAFMLDRIYRFDTVIARIEALSIERLQKLLLEKDRLKFCIASMYRKNNDDSGAEIKAGNGTVDMSVLPDARYSALLQEDFAYSGFECWVENEDQIQEPHSCHGSEGPGNRPRRCRGCAALRVADSDYEAICKVPRKVARSISCGPSSRWSTSICTEEPALSEVGPPDLASTKVPPDGESMEEETPGSSVESLDASVQASPPQQKDEETERSAKELGKCDCCSDDQAPQHGCNHKLELALSMIKGLDYKPIQSPRGSRLPIPVKSSLPGAKPGPSMTDGVSSGFLNRSLKPLYKTPVSYPLELSDLQELWDDLCEDYLPLRVQPMTEELLKQQKLNSHETTITQQSVSDSHLAELQEKIQQTEATNKILQEKLNEMSYELKCAQESSQKQDGTIQNLKETLKSRERETEELYQVIEGQNDTMAKLREMLHQSQLGQLHSSEGTSPAQQQVALLDLQSALFCSQLEIQKLQRVVRQKERQLADAKQCVQFVEAAAHESEQQKEASWKHNQELRKALQQLQEELQNKSQQLRAWEAEKYNEIRTQEQNIQHLNHSLSHKEQLLQEFRELLQYRDNSDKTLEANEMLLEKLRQRIHDKAVALERAIDEKFSALEEKEKELRQLRLAVRERDHDLERLRDVLSSNEATMQSMESLLRAKGLEVEQLSTTCQNLQWLKEEMETKFSRWQKEQESIIQQLQTSLHDRNKEVEDLSATLLCKLGPGQSEIAEELCQRLQRKERMLQDLLSDRNKQVLEHEMEIQGLLQSVSTREQESQAAAEKLVQALMERNSELQALRQYLGGRDSLMSQAPISNQQAEVTPTGRLGKQTDQGSMQIPSRDDSTSLTAKEDVSIPRSTLGDLDTVAGLEKELSNAKEELELMAKKERESQMELSALQSMMAVQEEELQVQAADMESLTRNIQIKEDLIKDLQMQLVDPEDIPAMERLTQEVLLLREKVASVESQGQEISGNRRQQEVTGI

SEQ ID NO: 860787 - protein, 1132 aa, Homo sapiens; identical to SEQ ID NO: 860785

SEQ ID NO: 860788 - protein, 2046 aa, Homo sapiens
SCCRAGEVPSDAVKVVQAGFGAAFLEAVQQVALLDLQSALFCSQLEIQKLQRVVRQKERQLADAKQCVQFVEAAAHESEQQKEASWKHNQELRKALQQLQEELQNKSQQLRAWEAEKYNEIRTQEQNIQHLNHSLSHKEQLLQEFRELLQYRDNSDKTLEANEMLLEKLRQRIHDKAVALERAIDEKFSALEEKEKELRQLRLAVRERDHDLERLRDVLSSNEATMQSMESLLRAKGLEVEQLSTTCQNLQWLKEEMETKFSRWQKEQESIIQQLQTSLHDRNKEVEDLSATLLCKLGPGQSEIAEELCQRLQRKERMLQDLLSDRNKQVLEHEMEIQGLLQSVSTREQESQAAAEKLVQALMERNSELQALRQYLGGRDSLMSQAPISNQQAEVTPTGRLGKQTDQGSMQIPSRDDSTSLTAKEDVSIPRSTLGDLDTVAGLEKELSNAKEELELMAKKERESQMELSALQSMMAVQEEELQVQAADMESLTRNIQIKEDLIKDLQMQLVDPEDIPAMERLTQEVLLLREKVASVESQGQEISGNRRQQLLLMLEGLVDERSRLNEALQAERQLYSSLVKFHAHPESSERDRTLQVELEGAQVLRSRLEEVLGRSLERLNRLETLAAIGGAAAGDDTEDTSTEFTDSIEEEAAHHSHQQLVKVALEKSLATVETQNPSFSPPSPMGGDSNRCLQEEMLHLRAEFHQHLEEKRKAEEELKELKAQIEEAGFSSVSHIRNTMLSLCLENAELKEQMGEAMSDGWEIEEDKEKGEVMVETVVTKEGLSESSLQAEFRKLQGKLKNAHNIINLLKEQLVLSSKEGNSKLTPELLVHLTSTIERINTELVGSPGKHQHQEEGNVTVRPFPRPQSLDLGATFTVDAHQLDNQSQPRDPGPQSAFSLPGSTQHLRSQLSQCKQRYQDLQEKLLLSEATVFAQANELEKYRVMLTGESLVKQDSKQIQVDLQDLGYETCGRSENEAEREETTSPECEEHNSLKEMVLMEGLCSEQGRRGSTLASSSERKPLENQLGKQEEFRVYGKSENILVLRKDIKDLKAQLQNANKVIQNLKSRVRSLSVTSDYSSSLERPRKLRAVGTLEGSSPHSVPDEDEGWLSDGTGAFYSPGLQAKKDLESLIQRVSQLEAQLPKNGLEEKLAEELRSASWPGKYDSLIQDQARELSYLRQKIREGRGICYLITRHAKDTVKSFEDLLRSNDIDYYLGQSFREQLAQGSQLTERLTSKLSTKDHKSEKDQAGLEPLALRLSRELQEKEKVIEVLQAKLDARSLTPSSSHALSDSHRSPSSTSFLSDELEACSDMDIVSEYTHYEEKKASPSHSDSIHHSSHSAVLSSKPSSTSASQGAKAESNSNPISLPTPQNTPKEANQAHSGFHFHSIPKLASLPQAPLPSAPSSFLPFSPTGPLLLGCCETPVVSLAEAQQELQMLQKQLGESASTVPPASTATLLSNDLEADSSYYLNSAQPHSPPRGTIELGRILEPGYLGSSGKWDVMRPQKGSVSGDLSSGSSVYQLNSKPTGADLLEEHLGEIRNLRQRLEESICINDRLREQLEHRLTSTARGRGSTSNFYSQGLESIPQLCNENRVLREDNRRLQAQLSHVSREHSQETESLREALLSSRSHLQELEKELEHQKVERQQLLEDLREKQQEVLHFREERLSLQENDSSGPCLSLVRLQHKLVLLQQQCEEKQQLFESLQSELQIYEALYGNSKKGLKAYSLDACHQIPLSSDLSHLVAEVRALRGQLEQSIQGNNCLRLQLQQQLESGAGKASLSPSSINQNFPASTDPGNKQLLLQDSAVSPPVRDVGMNSPALVFPSSASSTPGSETPIINRANGLGLDTSPVMKTPPKLEGDATDGSFANKHGRHVIGHIDDYSALRQQIAEGKLLVKKIVSLVRSACSFPGLEAQGTEVLGSKGIHELRSSTSALHHALEESASLLTMFWRAALPSTHIPVLPGKVGESTERELLELRTKVSKQERLLQSTTEHLKNANQQKESMEQFIVSQLTRTHDVLKKARTNLEVKSLRALPCTPAL

SEQ ID NO: 860789 - protein, 2509 aa, Homo sapiens
MKEICRICARELCGNQRRWIFHTASKLNLQVLLSHVLGKDVPRDGKAEFACSKCAFMLDRIYRFDTVIARIEALSIERLQKLLLEKDRLKFCIASMYRKNNDDSGAEIKAGNGTVDMSVLPDARYSALLQEDFAYSGFECWVENEDQIQEPHSCHGSEGPGNRPRRCRGCAALRVADSDYEAICKVPRKVARSISCGPSSRWSTSICTEEPALSEVGPPDLASTKVPPDGESMEEETPGSSVESLDASVQASPPQQKDEETERSAKELGKCDCCSDDQAPQHGCNHKLELALSMIKGLDYKPIQSPRGSRLPIPVKSSLPGAKPGPSMTDGVSSGFLNRSLKPLYKTPVSYPLELSDLQELWDDLCEDYLPLRVQPMTEELLKQQKLNSHETTITQQSVSDSHLAELQEKIQQTEATNKILQEKLNEMSYELKCAQESSQKQDGTIQNLKETLKSRERETEELYQVIEGQNDTMAKLREMLHQSQLGQLHSSEGTSPAQQQVALLDLQSALFCSQLEIQKLQRVVRQKERQLADAKQCVQFVEAAAHESEQQKEASWKHNQELRKALQQLQEELQNKSQQLRAWEAEKYNEIRTQEQNIQHLNHSLSHKEQLLQEFRELLQYRDNSDKTLEANEMLLEKLRQRIHDKAVALERAIDEKFSALEEKEKELRQLRLAVRERDHDLERLRDVLSSNEATMQSMESLLRAKGLEVEQLSTTCQNLQWLKEEMETKFSRWQKEQESIIQQLQTSLHDRNKEVEDLSATLLCKLGPGQSEIAEELCQRLQRKERMLQDLLSDRNKQVLEHEMEIQGLLQSVSTREQESQAAAEKLVQALMERNSELQALRQYLGGRDSLMSQAPISNQQAEVTPTGRLGKQTDQGSMQIPSRDDSTSLTAKEDVSIPRSTLGDLDTVAGLEKELSNAKEELELMAKKERESQMELSALQSMMAVQEEELQVQAADMESLTRNIQIKEDLIKDLQMQLVDPEDIPAMERLTQEVLLLREKVASVESQGQEISGNRRQQLLLMLEGLVDERSRLNEALQAERQLYSSLVKFHAHPESSERDRTLQVELEGAQVLRSRLEEVLGRSLERLNRLETLAAIGGAAAGDDTEDTSTEFTDSIEEEAAHHSHQQLVKVALEKSLATVETQNPSFSPPSPMGGDSNRCLQEEMLHLRAEFHQHLEEKRKAEEELKELKAQIEEAGFSSVSHIRNTMLSLCLENAELKEQMGEAMSDGWEIEEDKEKGEVMVETVVTKEGLSESSLQAEFRKLQGKLKNAHNIINLLKEQLVLSSKEGNSKLTPELLVHLTSTIERINTELVGSPGKHQHQEEGNVTVRPFPRPQSLDLGATFTVDAHQLDNQSQPRDPGPQSAFSLPGSTQHLRSQLSQCKQRYQDLQEKLLLSEATVFAQANELEKYRVMLTGESLVKQDSKQIQVDLQDLGYETCGRSENEAEREETTSPECEEHNSLKEMVLMEGLCSEQGRRGSTLASSSERKPLENQLGKQEEFRVYGKSENILVLRKDIKDLKAQLQNANKVIQNLKSRVRSLSVTSDYSSSLERPRKLRAVGTLEGSSPHSVPDEDEGWLSDGTGAFYSPGLQAKKDLESLIQRVSQLEAQLPKNGLEEKLAEELRSASWPGKYDSLIQDQARELSYLRQKIREGRGICYLITRHAKDTVKSFEDLLRSNDIDYYLGQSFREQLAQGSQLTERLTSKLSTKDHKSEKDQAGLEPLALRLSRELQEKEKVIEVLQAKLDARSLTPSSSHALSDSHRSPSSTSFLSDELEACSDMDIVSEYTHYEEKKASPSHSDSIHHSSHSAVLSSKPSSTSASQGAKAESNSNPISLPTPQNTPKEANQAHSGFHFHSIPKLASLPQAPLPSAPSSFLPFSPTGPLLLGCCETPVVSLAEAQQELQMLQKQLGESASTVPPASTATLLSNDLEADSSYYLNSAQPHSPPRGTIELGRILEPGYLGSSGKWDVMRPQKGSVSGDLSSGSSVYQLNSKPTGADLLEEHLGEIRNLRQRLEESICINDRLREQLEHRLTSTARGRGSTSNFYSQGLESIPQLCNENRVLREDNRRLQAQLSHVSREHSQETESLREALLSSRSHLQELEKELEHQKVERQQLLEDLREKQQEVLHFREERLSLQENDSRLQHKLVLLQQQCEEKQQLFESLQSELQIYEALYGNSKKGLKAYSLDACHQIPLSSDLSHLVAEVRALRGQLEQSIQGNNCLRLQLQQQLESGAGKASLSPSSINQNFPASTDPGNKQLLLQDSAVSPPVRDVGMNSPALVFPSSASSTPGSETPIINRANGLGLDTSPVMKTPPKLEGDATDGSFANKHGRHVIGHIDDYSALRQQIAEGKLLVKKIVSLVRSACSFPGLEAQGTEVLGSKGIHELRSSTSALHHALEESASLLTMFWRAALPSTHIPVLPGKVGESTERELLELRTKVSKQERLLQSTTEHLKNANQQKESMEQFIVSQLTRTHDVLKKARTNLEVKSLRALPCTPAL

SEQ ID NO: 860790 - protein, 2447 aa, Homo sapiens
MKEICRICARELCGNQRRWIFHTASKLNLQVLLSHVLGKDVPRDGKAEFACSKCAFMLDRIYRFDTVIARIEALSIERLQKLLLEKDRLKFCIASMYRKNNDDSGAEIKAGNGTVDMSVLPDARYSALLQEDFAYSGFECWVENEDQIQEPHSCHGSEGPGNRPRRCRGCAALRVADSDYEAICKVPRKVARSISCGPSSRWSTSICTEEPALSEVGPPDLASTKVPPDGESMEEETPGSSVESLDASVQASPPQQKDEETERSAKELGKCDCCSDDQAPQHGCNHKLELALSMIKGLDYKPIQSPRGSRLPIPVKSSLPGAKPGPSMTDGVSSGFLNRSLKPLYKTPVSYPLELSDLQELWDDLCEDYLPLRVQPMTEELLKQQKLNSHETTITQQSVSDSHLAELQEKIQQTEATNKILQEKLNEMSYELKCAQESSQKQDGTIQNLKETLKSRERETEELYQVIEGQNDTMAKLREMLHQSQLGQLHSSEGTSPAQQQVALLDLQSALFCSQLEIQKLQRVVRQKERQLADAKQCVQFVEAAAHESEQQKEASWKHNQELRKALQQLQEELQNKSQQLRAWEAEKYNEIRTQEQNIQHLNHSLSHKEQLLQEFRELLQYRDNSDKTLEANEMLLEKLRQRIHDKAVALERAIDEKFSALEEKEKELRQLRLAVRERDHDLERLRDVLSSNEATMQSMESLLRAKGLEVEQLSTTCQNLQWLKEEMETKFSRWQKEQESIIQQLQTSLHDRNKEVEDLSATLLCKLGPGQSEIAEELCQRLQRKERMLQDLLSDRNKQVLEHEMEIQGLLQSVSTREQESQAAAEKLVQALMERNSELQALRQYLGGRDSLMSQAPISNQQAEVTPTGRLGKQTDQGSMQIPSRDDSTSLTAKEDVSIPRSTLGDLDTVAGLEKELSNAKEELELMAKKERESQMELSALQSMMAVQEEELQVQAADMESLTRNIQIKEDLIKDLQMQLVDPEDIPAMERLTQEVLLLREKVASVESQGQEISGNRRQQLLLMLEGLVDERSRLNEALQAERQLYSSLVKFHAHPESSERDRTLQVELEGAQVLRSRLEEVLGRSLERLNRLETLAAIGGAAAGDDTEDTSTEFTDSIEEEAAHHSHQQLVKVALEKSLATVETQNPSFSPPSPMGGDSNRCLQEEMLHLRAEFHQHLEEKRKAEEELKELKAQIEEAGFSSVSHIRNTMLSLCLENAELKEQMGEAMSDGWEIEEDKEKGEVMVETVVTKEGLSESSLQAEFRKLQGKLKNAHNIINLLKEQLVLSSKEGNSKLTPELLVHLTSTIERINTELVGSPGKHQHQEEGNVTVRPFPRPQSLDLGATFTVDAHQLDNQSQPRDPGPQSAFSLPGSTQHLRSQLSQCKQRYQDLQEKLLLSEATVFAQANELEKYRVMLTGESLVKQDSKQIQVDLQDLGYETCGRSENEAEREETTSPECEEHNSLKEMVLMEGLCSEQGRRGSTLASSSERKPLENQLGKQEEFRVYGKSENILVLRKDIKDLKAQLQNANKVIQNLKSRVRSLSVTSDYSSSLERPRKLRAVGTLEGSSPHSVPDEDEGWLSDGTGAFYSPGLQAKKDLESLIQRVSQLEAQLPKNGLEEKLAEELRSASWPGKYDSLIQDQARELSYLRQKIREGRGICYLITRHAKDTVKSFEDLLRSNDIDYYLGQSFREQLAQGSQLTERLTSKLSTKDHKSEKDQAGLEPLALRLSRELQEKEKVIEVLQAKLDARSLTPSSSHALSDSHRSPSSTSFLSDELEACSDMDIVSEYTHYEEKKASPSHSDSIHHSSHSAVLSSKPSSTSASQGAKAESNSNPISLPTPQNTPKEANQAHSGASTVPPASTATLLSNDLEADSSYYLNSAQPHSPPRGTIELGRILEPGYLGSSGKWDVMRPQKGSVSGDLSSGSSVYQLNSKPTGADLLEEHLGEIRNLRQRLEESICINDRLREQLEHRLTSTARGRGSTSNFYSQGLESIPQLCNENRVLREDNRRLQAQLSHVSREHSQETESLREALLSSRSHLQELEKELEHQKVERQQLLEDLREKQQEVLHFREERLSLQENDSRLQHKLVLLQQQCEEKQQLFESLQSELQIYEALYGNSKKGLKAYSLDACHQIPLSSDLSHLVAEVRALRGQLEQSIQGNNCLRLQLQQQLESGAGKASLSPSSINQNFPASTDPGNKQLLLQDSAVSPPVRDVGMNSPALVFPSSASSTPGSETPIINRANGLGLDTSPVMKTPPKLEGDATDGSFANKHGRHVIGHIDDYSALRQQIAEGKLLVKKIVSLVRSACSFPGLEAQGTEVLGSKGIHELRSSTSALHHALEESASLLTMFWRAALPSTHIPVLPGKVGESTERELLELRTKVSKQERLLQSTTEHLKNANQQKESMEQFIVSQLTRTHDVLKKARTNLEVKSLRALPCTPAL

SEQ ID NO: 860791 - protein, 1531 aa, Homo sapiens
MQLVDPEDIPAMERLTQEVLLLREKVASVESQGQEISGNRRQQLLLMLEGLVDERSRLNEALQAERQLYSSLVKFHAHPESSERDRTLQVELEGAQVLRSRLEEVLGRSLERLNRLETLAAIGGAAAGDDTEDTSTEFTDSIEEEAAHHSHQQLVKVALEKSLATVETQNPSFSPPSPMGGDSNRCLQEEMLHLRAEFHQHLEEKRKAEEELKELKAQIEEAGFSSVSHIRNTMLSLCLENAELKEQMGEAMSDGWEIEEDKEKGEVMVETVVTKEGLSESSLQAEFRKLQGKLKNAHNIINLLKEQLVLSSKEGNSKLTPELLVHLTSTIERINTELVGSPGKHQHQEEGNVTVRPFPRPQSLDLGATFTVDAHQLDNQSQPRDPGPQSAFSLPGSTQHLRSQLSQCKQRYQDLQEKLLLSEATVFAQANELEKYRVMLTGESLVKQDSKQIQVDLQDLGYETCGRSENEAEREETTSPECEEHNSLKEMVLMEGLCSEQGRRGSTLASSSERKPLENQLGKQEEFRVYGKSENILVLRKDIKDLKAQLQNANKVIQNLKSRVRSLSVTSDYSSSLERPRKLRAVGTLEGSSPHSVPDEDEGWLSDGTGAFYSPGLQAKKDLESLIQRVSQLEAQLPKNGLEEKLAEELRSASWPGKYDSLIQDQARELSYLRQKIREGRGICYLITRHAKDTVKSFEDLLRSNDIDYYLGQSFREQLAQGSQLTERLTSKLSTKDHKSEKDQAGLEPLALRLSRELQEKEKVIEVLQAKLDARSLTPSSSHALSDSHRSPSSTSFLSDELEACSDMDIVSEYTHYEEKKASPSHSDSIHHSSHSAVLSSKPSSTSASQGAKAESNSNPISLPTPQNTPKEANQAHSGFHFHSIPKLASLPQAPLPSAPSSFLPFSPTGPLLLGCCETPVVSLAEAQQELQMLQKQLGESASTVPPASTATLLSNDLEADSSYYLNSAQPHSPPRGTIELGRILEPGYLGSSGKWDVMRPQKGSVSGDLSSGSSVYQLNSKPTGADLLEEHLGEIRNLRQRLEESICINDRLREQLEHRLTSTARGRGSTSNFYSQGLESIPQLCNENRVLREDNRRLQAQLSHVSREHSQETESLREALLSSRSHLQELEKELEHQKVERQQLLEDLREKQQEVLHFREERLSLQENDSRLQHKLVLLQQQCEEKQQLFESLQSELQIYEALYGNSKKGLKAYSLDACHQIPLSSDLSHLVAEVRALRGQLEQSIQGNNCLRLQLQQQLESGAGKASLSPSSINQNFPASTDPGNKQLLLQDSAVSPPVRDVGMNSPALVFPSSASSTPGSETPIINRANGLGLDTSPVMKTPPKLEGDATDGSFANKHGRHVIGHIDDYSALRQQIAEGKLLVKKIVSLVRSACSFPGLEAQGTEVLGSKGIHELRSSTSALHHALEESASLLTMFWRAALPSTHIPVLPGKVGESTERELLELRTKVSKQERLLQSTTEHLKNANQQKESMEQFIVSQLTRTHDVLKKARTNLEVKSLRALPCTPAL

SEQ ID NO: 860792 - protein, 1181 aa, Homo sapiens
MKEICRICARELCGNQRRWIFHTASKLNLQVLLSHVLGKDVPRDGKAEFACSKCAFMLDRIYRFDTVIARIEALSIERLQKLLLEKDRLKFCIASMYRKNNDDSGAEIKAGNGTVDMSVLPDARYSALLQEDFAYSGFECWVENEDQIQEPHSCHGSEGPGNRPRRCRGCAALRVADSDYEAICKVPRKVARSISCGPSSRWSTSICTEEPALSEVGPPDLASTKVPPDGESMEEETPGSSVESLDASVQASPPQQKDEETERSAKELGKCDCCSDDQAPQHGCNHKLELALSMIKGLDYKPIQSPRGSRLPIPVKSSLPGAKPGPSMTDGVSSGFLNRSLKPLYKTPVSYPLELSDLQELWDDLCEDYLPLRVQPMTEELLKQQKLNSHETTITQQSVSDSHLAELQEKIQQTEATNKILQEKLNEMSYELKCAQESSQKQDGTIQNLKETLKSRERETEELYQVIEGQNDTMAKLREMLHQSQLGQLHSSEGTSPAQQQVALLDLQSALFCSQLEIQKLQRVVRQKERQLADAKQCVQFVEAAAHESEQQKEASWKHNQELRKALQQLQEELQNKSQQLRAWEAEKYNEIRTQEQNIQHLNHSLSHKEQLLQEFRELLQYRDNSDKTLEANEMLLEKLRQRIHDKAVALERAIDEKFSALEEKEKELRQLRLAVRERDHDLERLRDVLSSNEATMQSMESLLRAKGLEVEQLSTTCQNLQWLKEEMETKFSRWQKEQESIIQQLQTSLHDRNKEVEDLSATLLCKLGPGQSEIAEELCQRLQRKERMLQDLLSDRNKQVLEHEMEIQGLLQSVSTREQESQAAAEKLVQALMERNSELQALRQYLGGRDSLMSQAPISNQQAEVTPTGRLGKQTDQGSMQIPSRDDSTSLTAKEDVSIPRSTLGDLDTVAGLEKELSNAKEELELMAKKERESQMELSALQSMMAVQEEELQVQAADMESLTRNIQIKEDLIKDLQMQLVDPEDIPAMERLTQEVLLLREKVASVESQGQEISGNRRQQLLLMLEGLVDERSRLNEALQAERQLYSSLVKFHAHPESSERDRTLQVELEGAQVLRSRLEEVLGRSLERLNRLETLAAIGGAAAGDDTEDTSTEFTDSIEEEAAHHSHQQLVKVALEKSLATVETQNPSFSPPSPMGGDSNRCLQEEMLHLRAEFHQQHY

SEQ ID NO: 860793 - protein, 127 aa, Homo sapiens [sequence omitted]

SEQ ID NO: 860794 - protein, 106 aa, Homo sapiens
WNLGESDVRAVEMKEAKAGAEGREGEACGTVGLLLEHSFEIDDSANFRKRGSLLWNQQDGTLSLSQRQLSEEERGRLRDVAALNGLYRVRIPRRPGALDGPPCKSI

SEQ ID NO: 860795 - protein, 286 aa, Homo sapiens
QHKTQTTESSHKIEAGGFIGEEAEMAAASAGATRLLLLLLMAVAAPSRARGSGCRAGTGARGAGAEGREGEACGTVGLLLEHSFEIDDSANFRKRGSLLWNQQDGTLSLSQRQLSEEERGRLRDVAALNGLYRVRIPRRPGALDGLEAGGYVSSFVPACSLVESHLSDQLTLHVDVAGNVVGVSVVTHPGGCRGHEVEDVDLELFNTSVQLQPPTTAPGPETAAFIERLEMEQAQKAKNPQEQKSFFAKYWMYIIPVVLFLMMSGAPDTGGQGGGGGGGGGGGSGR

SEQ ID NO: 860796 - protein, 310 aa, Homo sapiens
RPQVRTGASAQVPGPSAGARASGCGLFLPACSAALGSQPSLRWWEEAEMAAASAGATRLLLLLLMAVAAPSRARGSGCRAGTGARGAGAEGREGEACGTVGLLLEHSFEIDDSANFRKRGSLLWNQQDGTLSLSQRQLSEEERGRLRDVAALNGLYRVRIPRRPGALDGLEAGGYVSSFVPACSLVESHLSDQLTLHVDVAGNVVGVSVVTHPGGCRGHEVEDVDLELFNTSVQLQPPTTAPGPETAAFIERLEMEQAQKAKNPQEQKSFFAKYWMYIIPVVLFLMMSGAPDTGGQGGGGGGGGGGGSGR

SEQ ID NO: 860797 - protein, 358 aa, Homo sapiens
QAPGADGCQCAGAGAQRRRTGVRMRPVPPGVLRGSWLTAVPSLVGRSRDGGSQRWGNPAAPALADGGSSAQSSPGQRLPGRDWCARGECSLAVHSGRGLRMSQVLGLQAGAEGREGEACGTVGLLLEHSFEIDDSANFRKRGSLLWNQQDGTLSLSQRQLSEEERGRLRDVAALNGLYRVRIPRRPGALDGLEAGGYVSSFVPACSLVESHLSDQLTLHVDVAGNVVGVSVVTHPGGCRGHEVEDVDLELFNTSVQLQPPTTAPGPETAAFIERLEMEQAQKAKNPQEQKSFFAKYWHIILGGGRVAHSPASCCARARATATGGLMDVHHSRRPVPHDVRSARHRGPGWGWGWGWWWG

SEQ ID NO: 860798 - protein, 332 aa, Homo sapiens
QAPGADGCQCAGAGAQRRRTGVRMRPVPPGVLRGSWLTAVPSLVGRSRDGGSQRWGNPAAPALADGGSSAQSSPGQRLPGRDWCARGECSLAVHSGRGLRMSQVLGLQAGAEGREGEACGTVGLLLEHSFEIDDSANFRKRGSLLWNQQDGTLSLSQRQLSEEERGRLRDVAALNGLYRVRIPRRPGALDGLEAGGYVSSFVPACSLVESHLSDQLTLHVDVAGNVVGVSVVTHPGGCRGHEVEDVDLELFNTSVQLQPPTTAPGPETAAFIERLEMEQAQKAKNPQEQKSFFAKYWMYIIPVVLFLMMSGAPDTGGQGGGGGGGGGGGSGR

SEQ ID NO: 860799 - protein, 188 aa, Homo sapiens
AVLISLRAGRFHCYITCGGPTIYIRDVAALNGLYRVRIPRRPGALDGLEAGGYVSSFVPACSLVESHLSDQLTLHVDVAGNVVGVSVVTHPGGCRGHEVEDVDLELFNTSVQLQPPTTAPGPETAAFIERLEMEQAQKAKNPQEQKSFFAKYWMYIIPVVLFLMMSGAPDTGGQGGGGGGGGGGGSGR

SEQ ID NO: 860800 - protein, 310 aa, Homo sapiens; identical to SEQ ID NO: 860796

SEQ ID NO: 860801 - protein, 194 aa, Homo sapiens
QAPGADGCQCAGAGAQRRRTGVRMRPVPPGVLRGSWLTAVPSLVGRSRDGGSQRWGNPAAPALADGDDSANFRKRGSLLWNQQDGTLSSAFCWQRSSWTGAFGTAAGVSCARLPHGPMQPQGLPPCPWSRARDPGHYASSDLASPYPEPMQSGNMPPSLQPLCLCSRWSHPPVPGWARWSCPGSCSAPLTLTLD

SEQ ID NO: 860802 - protein, 66 aa, Homo sapiens
NTKHKQQKVVIKIEAGGFIGEEAEMAAASAGATRLLLLLLMAVAAPSRARGSGCRAGTGARGVSAL

SEQ ID NO: 860803 - protein, 267 aa, Homo sapiens
QHKTQTTESSHKIEAGGFIGEEAEMAAASAGATRLLLLLLMAVAAPSRARGSGCRAGTGARGAGAEGREGEACGTVGLLLEHSFEIDDSANFRKRGSLLWNQQDGTLSLSQRQLSEEERGRLRDVAALNGLYRVRIPRRPGALDGLEAGGYVSSFVPACSLVESHLSDQLTLHVDVAGNVVGVSVVTHPGGCRGHEVEDVDLELFNTSVQLQPPTTAPGPETAAFIERLEMEQAQKAKNPQEQKSFFAKYYEGLRAFAVCHPPCKSI

SEQ ID NO: 860804 - protein, 187 aa, Homo sapiens
QHKTQTTESSHKIEAGGFIGEEAEMAAASAGATRLLLLLLMAVAAPSRARGSGCRAGTGARGAGAEGREGEACGTVGLLLEHSFEIDDSANFRKRGSLLWNQQDGTLSLSQRQLSEEERGRLRDVAALNGLYRVRIPRRPGALDGLEAGGYVSSFVPACSLVESHLSDQLTLHVRGPAGLCCVPPSL

SEQ ID NO: 860805 - protein, 151 aa, Homo sapiens
MAAASAGATRLLLLLLMAVAAPSRARGSGCRAGTGARGAGAEGREGEACGTVGLLLEHSFEIDDSANFRKRGSLLWNQQDGTLSLSQRQLSEEERGRLRDVAALNGLYRVRIPRRPGALDGLEAGGYVSSFVPAYEGLRAFAVCHPPCKSI

SEQ ID NO: 860806 - protein, 310 aa, Homo sapiens; identical to SEQ ID NO: 860796

SEQ ID NO: 860807 - protein, 288 aa, Homo sapiens
MAAASAGATRLLLLLLMAVAAPSRARGSGCRAGTGARGAGAEGREGEACGTVGLLLEHSFEIDDSANFRKRGSLLWNQQDGTLSLSQRQLSEEERGRLRDVAALNGLYRVRIPRRPGALDGLEAGGYVSSFVPACSLVESHLSDQLTLHVDVAGNVVGVSVVTHPGGCRGHEVEDVDLELFNTSVQLQPPTTAPGPETAAFIERLEMEQAQKAKNPQEQKSFFAKYWHIILGGGRVAHSPASCCARARATATGGLMDVHHSRRPVPHDVRSARHRGPGWGWGWGWWWG

SEQ ID NO: 860808 - protein, 310 aa, Homo sapiens; identical to SEQ ID NO: 860796

SEQ ID NO: 860809 - protein, 310 aa, Homo sapiens; identical to SEQ ID NO: 860796

SEQ ID NO: 860810 - protein, 243 aa, Homo sapiens
QHKTQTTESSHKIEAGGFIGEEAEMAAASAGATRLLLLLLMAVAAPSRARGSGCRAGTGARGAGAEGREGEACGTVGLLLEHSFEIDDSANFRKRGSLLWNQQDGTLSLSQRQLSEEERGRLRDVAALNGLYRVRIPRRPGALDGLEAGGYVSSFVPACSLVESHLSDQLTLHVDVAGNVVGVSVVTHPGDGTGPEGQEPPGAEVLLRQILDVHHSRRPVPHDVRSARHRGPGWGWGWGWWWG

SEQ ID NO: 860811 - protein, 310 aa, Homo sapiens; identical to SEQ ID NO: 860796

SEQ ID NO: 860812 - protein, 310 aa, Homo sapiens; identical to SEQ ID NO: 860796

SEQ ID NO: 860813 - protein, 249 aa, Homo sapiens
MAAASAGATRLLLLLLMAVAAPSRARGSGCRAGTGARGAGAEGREGEACGTVGLLLEHSFEIDDSANFRKRGSLLWNQQDGTLSLSQRQLSEEERGRLRDVAALNGLYRVRIPRRPGALDGLEAGGYVSSFVPACSLVESHLSDQLTLHVDVAGNVVGVSVVTHPGGCRGHEVEDVDLELFNTSVQLQPPTTAPGPETAAFIERLEMEQAQKAKNPQEQKSFFAKYWMYIIPVVCSMMSRRRNRARGRG

SEQ ID NO: 860814 - protein, 605 aa, Homo sapiens
MEDVEARFAHLLQPIRDLTKNWEVDVAAQLGEYLEELDQICISFDEGKTTMNFIEAALLIQGSACVYSKKVEYLYSLVYQALDFISGKRRAKQLSSVQEDRANGVASSGVPQEAENEFLSLDDFPDSRTNVDLKNDQTPSEVLIIPLLPMALVAPDEMEKNNNPLYSRQGEVLASRKDFRMNTCVPHPRGAFMLEPEGMSPMEPAGVSPMPGTQKDTGRTEEQPMEVSVCRSPVPALGFSQEPGPSPEGPMPLGGGEDEDAEEAVELPEASAPKAALEPKESRSPQQSAALPRRYMLREREGAPEPASCVKETPDPWQSLDPFDSLESKPFKKGRPYSVPPCVEEALGQKRKRKGAAKLQDFHQWYLAAYADHADSRRLRRKGPSFADMEVLYWTHVKEQLETLRKLQRREVAEQWLRPAEEDHLEDSLEDLGAADDFLEPEEYMEPEGADPREAADLDAVPMSLSYEELVRRNVELFIATSQKFVQETELSQRIRDWEDTVQPLLQEQEQHVPFDIHTYGDQLVSRFPQLNEWCPFAELVAGQPAFEVCRSMLASLQLANDYTVEITQQPGLEMAVDTMSLRLLTHQRAHKRFQTYAAPSMAQP

SEQ ID NO: 860815 - protein, 299 aa, Homo sapiens
MEDVEARFAHLLQPIRDLTKNWEVDVAAQLGEYLEELDQICISFDEGKTTMNFIEAALLIQGSACVYSKKVEYLYSLVYQALDFISGKRRAKQLSSVQEDRANGVASSGVPQEAENEFLSLDDFPDSRTNVDLKNDQTPSEVLIIPLLPMALVAPDEMEKNNNPLYSRQGEVLASRKDFRMNTCVPHPRGAFMLEPEGMSPMEPAGVSPMPGTQKDTGRTEEQPMEVSVCRSPVPALGFSQEPGPSPEGPMPLGGGEDEDAEEAVELPEASAPKAALEPKESRSPQQVGPTWRPAEPEL

SEQ ID NO: 860816 - protein, 250 aa, Homo sapiens
MEDVEARFAHLLQPIRDLTKNWEVDVAAQLGEYLEELDQICISFDEGKTTMNFIEAALLIQGSACVYSKKVEYLYSLVYQALDFISGKRRAKQLSSVQEDRANGVASSGVPQEAENEFLSLDDFPDSRTNVDLKNDQTPSEVLIIPLLPMALVAPDEMEKNNNPLYSRQGEVLASRKDFRMNTCVPHPRGAFMLEPEGMSPMEQGVPMQDQRTRRLGSRNSGRPVKTRFQSKASEAVRGVEQLRESEAQG

SEQ ID NO: 860817 - protein, 605 aa, Homo sapiens; identical to SEQ ID NO: 860814

SEQ ID NO: 860818 - protein, 452 aa, Homo sapiens
MEDVEARFAHLLQPIRDLTKNWEVDVAAQLGEYLEELDQICISFDEGKTTMNFIEAALLIQGSACVYSKKVEYLYSLVYQALDFISGKRRAKQLSSVQEDRANGVASSGVPQEAENEFLSLDDFPDSRTNVDLKNDQTPSEVLIIPLLPMALVAPDEMEKNNNPLYSRQGEVLASRKDFRMNTCVPHPRGAFMLEPEGMSPMEPAGVSPMPGTQKDTGRTEEQPMEVSVCRSPVPALGFSQEPGPSPEGPMPLGGGEDEDAEEAVELPEASAPKAALEPKESRSPQQSAALPRRYMLREREGAPEPASCVKETPDPWQSLDPFDSLESKPFKKGRPYSVPPCVEEALGQKRKRKGAAKLQDFHQWYLAAYADHADSRRLRRKGPSFADMEVLYWTHVKEQLETLRKLQRREVAEQWLRPAEEDHLEDSLEDLGAADDFLEPNKAVLPSQKKK

SEQ ID NO: 860819 - protein, 623 aa, Homo sapiens
MEDVEARFAHLLQPIRDLTKNWEVDVAAQLGEYLEECHLLEGIQEMSQRWGRCWLDQICISFDEGKTTMNFIEAALLIQGSACVYSKKVEYLYSLVYQALDFISGKRRAKQLSSVQEDRANGVASSGVPQEAENEFLSLDDFPDSRTNVDLKNDQTPSEVLIIPLLPMALVAPDEMEKNNNPLYSRQGEVLASRKDFRMNTCVPHPRGAFMLEPEGMSPMEPAGVSPMPGTQKDTGRTEEQPMEVSVCRSPVPALGFSQEPGPSPEGPMPLGGGEDEDAEEAVELPEASAPKAALEPKESRSPQQSAALPRRYMLREREGAPEPASCVKETPDPWQSLDPFDSLESKPFKKGRPYSVPPCVEEALGQKRKRKGAAKLQDFHQWYLAAYADHADSRRLRRKGPSFADMEVLYWTHVKEQLETLRKLQRREVAEQWLRPAEEDHLEDSLEDLGAADDFLEPEEYMEPEGADPREAADLDAVPMSLSYEELVRRNVELFIATSQKFVQETELSQRIRDWEDTVQPLLQEQEQHVPFDIHTYGDQLVSRFPQLNEWCPFAELVAGQPAFEVCRSMLASLQLANDYTVEITQQPGLEMAVDTMSLRLLTHQRAHKRFQTYAAPSMAQP

SEQ ID NO: 860820 - protein, 317 aa, Homo sapiens
MEDVEARFAHLLQPIRDLTKNWEVDVAAQLGEYLEELDQICISFDEGKTTMNFIEAALLIQGSACVYSKKVEYLYSLVYQALDFISGKRRAKQLSSVQEDRANGVASSGVPQEAENEFLSLDDFPDSRTNVDLKNDQTPSEVLIIPLLPMALVAPDEMEKNNNPLYSRQGEVLASRKDFRMNTCVPHELFIATSQKFVQETELSQRIRDWEDTVQPLLQEQEQHVPFDIHTYGDQLVSRFPQLNEWCPFAELVAGQPAFEVCRSMLASLQLANDYTVEITQQPGLEMAVDTMSLRLLTHQRAHKRFQTYAAPSMAQP

SEQ ID NO: 860821 - protein, 317 aa, Homo sapiens; identical to SEQ ID NO: 860820

SEQ ID NO: 860822 - protein, 628 aa, Homo sapiens
MEDVEARFAHLLQPIRDLTKNWEVDVAAQLGEYLEELDQICISFDEGKTTMNFIEAALLIQGSACVYSKKVEYLYSLVYQALDFISGKRRAKQLSSVQEDRANGVASSGVPQEAENEFLSLDDFPDSRTNVDLKNDQTPSEVLIIPLLPMALVAPDEMEKNNNPLYSRQGEVLASRKDFRMNTCVPHPRGAFMLEPEGMSPMEPAGVSPMPGTQKDTGRTEEQPMEVSVCRSPVPALGFSQEPGPSPEGPMPLGGGEDEDAEEAVELPEASAPKAALEPKESRSPQQSAALPRRYMLREREGAPEPASCVKETPDPWQSLDPFDSLESKPFKKGRPYSVPPCVEEALGQKRKRKGAAKLQDFHQWYLAAYADHADSRRLRRKGPSFADMEVLYWTHVKEQLETLRKLQRREVAEQWLRPAEEDHLEDSLEDLGAADDFLEPEEYMEPEGADPREAADLDAVPMSLSYEELVRRNVELFIATSQKFVQETELSQRIRDWEDTVQPLLQEQEQHVPFDIHTYGDQLVSRFPQLNEWCPFAELVAGQPAFEVCRSMLASLQLVSSLGYVGGGDGPQTLLTVPPLQANDYTVEITQQPGLEMAVDTMSLRLLTHQRAHKRFQTYAAPSMAQP

SEQ ID NO: 860823 - protein, 605 aa, Homo sapiens; identical to SEQ ID NO: 860814

SEQ ID NO: 860824 - protein, 635 aa, Homo sapiens
MEDVEARFAHLLQPIRDLTKNWEVDVAAQLGEYLEELDQICISFDEGKTTMNFIEAALLIQGSACVYSKKVEYLYSLVYQALDFISGKRRAKQLSSVQEDRANGVASSGVPQEAENEFLSLDDFPDSRTNVDLKNDQTPSEVLIIPLLPMALVAPDEMEKNNNPLYSRQGEVLASRKDFRMNTCVPHPRGAFMLEPEGMSPMEPAGVSPMPGTQKDTGRTEEQPMEVSVCRSPVPALGFSQEPGPSPEGPMPLGGGEDEDAEEAVELPEASAPKAALEPKESRSPQQVGPTWRPAEPELGTGNPGSGAESPCTRRTVSAALPRRYMLREREGAPEPASCVKETPDPWQSLDPFDSLESKPFKKGRPYSVPPCVEEALGQKRKRKGAAKLQDFHQWYLAAYADHADSRRLRRKGPSFADMEVLYWTHVKEQLETLRKLQRREVAEQWLRPAEEDHLEDSLEDLGAADDFLEPEEYMEPEGADPREAADLDAVPMSLSYEELVRRNVELFIATSQKFVQETELSQRIRDWEDTVQPLLQEQEQHVPFDIHTYGDQLVSRFPQLNEWCPFAELVAGQPAFEVCRSMLASLQLANDYTVEITQQPGLEMAVDTMSLRLLTHQRAHKRFQTYAAPSMAQP

SEQ ID NO: 860825 - protein, 299 aa, Homo sapiens; identical to SEQ ID NO: 860815

SEQ ID NO: 860826 - protein, 310 aa, Homo sapiens
MLREREGAPEPASCVKETPDPWQSLDPFDSLESKPFKKGRPYSVPPCVEEALGQKRKRKGAAKLQDFHQWYLAAYADHADSRRLRRKGPSFADMEVLYWTHVKEQLETLRKLQRREVAEQWLRPAEEDHLEDSLEDLGAADDFLEPEEYMEPEGADPREAADLDAVPMSLSYEELVRRNVELFIATSQKFVQETELSQRIRDWEDTVQPLLQEQEQHVPFDIHTYGDQLVSRFPQLNEWCPFAELVAGQPAFEVCRSMLASLQLANDYTVEITQQPGLEMAVDTMSLRLLTHQRAHKRFQTYAAPSMAQP

SEQ ID NO: 860827 - protein, 153 aa, Homo sapiens
MEDVEARFAHLLQPIRDLTKNWEVDVAAQLGEYLEELDQICISFDEGKTTMNFIEAALLIQGSACVYSKKVEYLYSLVYQALDFISGKRRAKQLSSVQEDRANGVASSGVPQEAENEFLSLDDFPDSRTNVDLKNDQTPSVVLAWPLPSMAQP

SEQ ID NO: 860828 - protein, 443 aa, Homo sapiens
EGAVRTWGRGFQTEKCQASLLNFWNLPTTAQVTIEAEPTKVSKGKDVLLLVHNLPQNLAGYIWYKGQMKDLYHYITSYVVDGQIIIYGPAYSGRETVYSNASLLIQNVTREDAGSYTLHIVKRGDGTRGETGHFTFTLYRHSLDSALSLEVTGSSQPLGDTWENCPTLWLHCLMTELTSGLDSVLPCVISAEVPSPRSGFPVSKGFKDNWKFHHPSLGCPWQGKLQRKHTSGGKVRLKLRRFQHCMLQGGPQVETPKPSISSSNLYPREDMEAVSLTCDPETPDASYLWWMNGQSLPMTHSLQLSKNKRTLFLFGVTKYTAGPYECEIRNPVSASRSDPVTLNLLPKLPKPYITINNLNPRENKDVLAFTCEPKSENYTYIWWLNGQSLPVSPRVKRPIENRILILPSVTRNETGPYQCEIQDRYGGIRSYPVTLNVLYYYKA

SEQ ID NO: 860829 - protein, 450 aa, Homo sapiens
MLRKFLDPRLSSTEENTQAAETMGPLSAPPCTQRITWKGLLLTASLLNFWNLPTTAQVTIEAEPTKVSKGKDVLLLVHNLPQNLAGYIWYKGQMKDLYHYITSYVVDGQIIIYGPAYSGRETVYSNASLLIQNVTREDAGSYTLHIVKRGDGTRGETGHFTFTLYLETPKPSISSSNLYPREDMEAVSLTCDPETPDASYLWWMNGQSLPMTHSLQLSKNKRTLFLFGVTKYTAGPYECEIRNPVSASRSDPVTLNLLPKLPKPYITINNLNPRENKDVLAFTCEPKSENYTYIWWLNGQSLPVSPRVKRPIENRILILPSVTRNETGPYQCEIQDRYGGIRSYPVTLNVLYGPDLPRIYPSFTYYHSGENLYLSCFADSNPPAEYSWTINGKFQLSGQKLFIPQITTKHSGLYACSVRNSATGMESSKSMTVKVSAPSGTGHLPGLNPL

SEQ ID NO: 860830 - protein, 285 aa, Homo sapiens
WLLTRAVERQIIIASTFLAETRKTVTVFPKFRARPGSELRGQSLPMTHSLQLSKNKRTLFLFGVTKYTAGPYECEIRNPVSASRSDPVTLNLLPKLPKPYITINNLNPRENKDVLAFTCEPKSENYTYIWWLNGQSLPVSPRVKRPIENRILILPSVTRNETGPYQCEIQDRYGGIRSYPVTLNVLYGPDLPRIYPSFTYYHSGENLYLSCFADSNPPAEYSWTINGKFQLSGQKLFIPQITTKHSGLYACSVRNSATGMESSKSMTVKVSAPSGTGHLPGLNPL

SEQ ID NO: 860831 - protein, 270 aa, Homo sapiens
DSQLEAVRNQQDPLSIGCHKVYCRTGQSLPMTHSLQLSKNKRTLFLFGVTKYTAGPYECEIRNPVSASRSDPVTLNLLPKLPKPYITINNLNPRENKDVLAFTCEPKSENYTYIWWLNGQSLPVSPRVKRPIENRILILPSVTRNETGPYQCEIQDRYGGIRSYPVTLNVLYGPDLPRIYPSFTYYHSGENLYLSCFADSNPPAEYSWTINGKFQLSGQKLFIPQITTKHSGLYACSVRNSATGMESSKSMTVKVSAPSGTGHLPGLNPL

SEQ ID NO: 860832 - protein, 203 aa, Homo sapiens
LQDLCRHLHFLPKLPKPYITINNLNPRENKDVLAFTCEPKSENYTYIWWLNGQSLPVSPRVKRPIENRILILPSVTRNETGPYQCEIQDRYGGIRSYPVTLNVLYGPDLPRIYPSFTYYHSGENLYLSCFADSNPPAEYSWTINGKFQLSGQKLFIPQITTKHSGLYACSVRNSATGMESSKSMTVKVSAPSGTGHLPGLNPL

SEQ ID NO: 860833 - protein, 284 aa, Homo sapiens
MLRKFLDPRLSSTEENTQAAETMGPLSAPPCTQRITWKGLLLTASLLNFWNPPTTAQVTIEAEPTKVSKGKDVLLLVHNLPQNLAGYIWYKGQMKDLYHYITSYVVDGQIIIYGPAYSGRETVYSNASLLIQNVTREDAGSYTLHIVKRGDGTRGETGHFTFTLYLETPKPSISSSNLYPREDMEAVSLTCDPETPDASYLWWMNMVQTSPEFTLHSPITIQEKTSTCPASRTLTHQQNILGQLMGSFSYQDKSSLSPRLLQSIAGSMLALFVTQPLAWKAPNP

SEQ ID NO: 860834 - protein, 117 aa, Homo sapiens
GQVRDGGDRGYPVTLNVLYGPDLPRIYPSFTYYHSGENLYLSCFADSNPPAEYSWTINGKFQLSGQKLFIPQITTKHSGLYACSVRNSATGMESSKSMTVKVSAPSGTGHLPGLNPL

SEQ ID NO: 860835 - protein, 450 aa, Homo sapiens; identical to SEQ ID NO: 860829

SEQ ID NO: 860836 - protein, 450 aa, Homo sapiens; identical to SEQ ID NO: 860829

SEQ ID NO: 860837 - protein, 478 aa, Homo sapiens
MLRKFLDPRLSSTEENTQAAETMGPLSAPPCTQRITWKGLLLTASLLNFWNPPTTAQVTIEAEPTKVSKGKDVLLLVHNLPQNLAGYIWYKGQMKDLYHYITSYVVDGQIIIYGPAYSGRETVYSNASLLIQNVTREDAGSYTLHIVKRGDGTRGETGHFTFTLYLETPKPSISSSNLYPREDMEAVSLTCDPETPDASYLWWMNGQSLPMTHSLQLSKNKRTLFLFGVTKYTAGPYECEIRNPVSASRSDPVTLNLLPKLPKPYITINNLNPRENKDVLAFTCEPKSENYTYIWWLNGQSLPVSPRVKRPIENRILILPSVTRNETGPYQCEIQDRYGGIRSYPVTLNVLYGPDLPRIYPSFTYYHSGENLYLSCFADSNPPAEYSWTINGKFQLSGQKLFIPQITTKHSGLYACSVRNSATGMESSKSMTVKVSAPSGTGHLPGPHIRTGHEVLSPHMQLAVYPDALPSPQPHHIL

SEQ ID NO: 860838 - protein, 503 aa, Homo sapiens
MLRKFLDPRLSSTEENTQAAETMGPLSAPPCTQRITWKGLLLTASLLNFWNLPTTAQVTIEAEPTKVSKGKDVLLLVHNLPQNLAGYIWYKGQMKDLYHYITSYVVDGQIIIYGPAYSGRETVYSNASLLIQNVTREDAGSYTLHIVKRGDGTRGETGHFTFTLYLETPKPSISSSNLYPREDMEAVSLTCDPETPDASYLWWMNGQSLPMTHSLQLSKNKRTLFLFGVTKYTAGPYECEIRNPVSASRSDPVTLNLLPKLPKPYITINNLNPRENKDVLAFTCEPKSENYTYIWWLNGQSLPVSPRVKRPIENRILILPSVTRNETGPYQCEIQDRYGGIRSYPVTLNVLYGPDLPRIYPSFTYYHSGENLYLSCFADSNPPAEYSWTINGKFQLSGQKLFIPQITTKHSGLYACSVRNSATGMESSKSMTVKVSVYGISSNQGGGPWQNVTSKRETLYPRKARKVKETTAGACSLYEQESRNVQTPHALRKHSQRSRERVS

SEQ ID NO: 860839 - protein, 285 aa, Homo sapiens
MLRKFLDPRLSSTEENTQAAETMGPLSAPPCTQRITWKGLLLTASLLNFWNPPTTAQVTIEAEPTKVSKGKDVLLLVHNLPQNLAGYIWYKGQMKDLYHYITSYVVDGQIIIYGPAYSGRETVYSNASLLIQNVTREDAGSYTLHIVKRGDGTRGETGHFTFTLYLETPKPSISSSNLYPREDMEAVSLTCDPETPDASYLWWMNGQSLPMTHSLQLSKNKRTLFLFGVTKYTAGPYECEIRNPVSASRSDPVTLNLLPKLPKPVPRHSLGTNHIAWVGAQCYLK

SEQ ID NO: 860840 - protein, 293 aa, Homo sapiens
MLRKFLDPRLSSTEENTQAAETMGPLSAPPCTQRITWKGLLLTASLLNFWNPPTTAQVTIEAEPTKVSKGKDVLLLVHNLPQNLAGYIWYKGQMKDLYHYITSYVVDGQIIIYGPAYSGRETVYSNASLLIQNVTREDAGSYTLHIVKRGDGTRGETGHFTFTLYLETPKPSISSSNLYPREDMEAVSLTCDPETPDASYLWWMNGQSLPMTHSLQLSKNKRTLFLFGVTKYTAGPYECEIRNPVSASRSDPVTLNLLPKLYLTRSCTSPVAVPHPELYLTRSCTSPVAVPHP

SEQ ID NO: 860841 - protein, 90 aa, Homo sapiens
LSVFCTVETPKPSISSSNLYPREDMEAVSLTCDPETPDASYLWWMNGQSLPMTHSLQLSKNKRTLFLFGVTKYTAGPYECEIRNPVSASR

SEQ ID NO: 860842 - protein, 450 aa, Homo sapiens; identical to SEQ ID NO: 860829

SEQ ID NO: 860843 - protein, 450 aa, Homo sapiens; identical to SEQ ID NO: 860829

SEQ ID NO: 860844 - protein, 333 aa, Homo sapiens
SLTCDPETPDASYLWWMNGQSAGSYTLHIVKRGDGTRGETGHFTFTLYLETPKPSISSSNLYPREDMEAVSLTCDPETPDASYLWWMNGQSLPMTHSLQLSKNKRTLFLFGVTKYTAGPYECEIRNPVSASRSDPVTLNLLPKLPKPYITINNLNPRENKDVLAFTCEPKSENYTYIWWLNGQSLPVSPRVKRPIENRILILPSVTRNETGPYQCEIQDRYGGIRSYPVTLNVLYGPDLPRIYPSFTYYHSGENLYLSCFADSNPPAEYSWTINGKFQLSGQKLFIPQITTKHSGLYACSVRNSATGMESSKSMTVKVSAPSGTGHLPGLNPL

SEQ ID NO: 860845 - protein, 217 aa, Homo sapiens
MLRKFLDPRLSSTEENTQAAETMGPLSAPPCTQRITWKGLLLTASLLNFWNPPTTAQVTIEAEPTKVSKGKDVLLLVHNLPQNLAGYIWYKGQMKDLYHYITSYVVDGQIIIYGPAYSGRETVYSNASLLIQNVTREDAGSYTLHIVKRGDGTRGETGHFTFTLYLETPKPSISSSNLYPREDMEAVSLTCDPETPDASYLWWMNRSCPSPTSPSTT

SEQ ID NO: 860846 - protein, 357 aa, Homo sapiens
MLRKFLDPRLSSTEENTQAAETMGPLSAPPCTQRITWKGLLLTASLLNFWNLPTTAQVTIEAEPTKVSKGKDVLLLVHNLPQNLAGYIWYKGQMKDLYHYITSYVVDGQIIIYGPAYSGRETVYSNASLLIQNVTREDAGSYTLHIVKRGDGTRGETGHFTFTLYLETPKPSISSSNLYPREDMEAVSLTCDPETPDASYLWWMNGQSLPMTHSLQLSKNKRTLFLFGVTKYTAGPYECEIRNPVSASRSDPVTLNLLHGPDLPRIYPSFTYYHSGENLYLSCFADSNPPAEYSWTINGKFQLSGQKLFIPQITTKHSGLYACSVRNSATGMESSKSMTVKVSAPSGTGHLPGLNPL

SEQ ID NO: 860847 - protein, 111 aa, Homo sapiens
GIRSYPVALNLLYGPDLPRIYPSFTYYHSGENLYLSCFADSNPPAEYSWTINGKFQLSGQKLFIPQITTKHSGLYACSVRNSATGMESSKSMTVKVSAPSGTGHLPGLNPL

SEQ ID NO: 860848 - protein, 365 aa, Homo sapiens
MLRKFLDPRLSSTEENTQAAETMGPLSAPPCTQRITWKGLLLTASLLNFWNPPTTAQVTIEAEPTKVSKGKDVLLLVHNLPQNLAGYIWYKGQMKDLYHYITSYVVDGQIIIYGPAYSGRETVYSNASLLIQNVTREDAGSYTLHIVKRGDGTRGETGHFTFTLYLETPKPSISSSNLYPREDMEAVSLTCDPETPDASYLWWMNGQSLPMTHSLQLSKNKRTLFLFGVTKYTAGPYECEIRNPVSASRSDPVTLNLLPKLPKPYITINNLNPRENKDVLAFTCEPKSENYTYIWWLNGQSLPVSPRVKRPIENRILILPSVTRNETGPYQCEIQDRYGGIRSYPVTLNVLSPSGTGHLPGLNPL

SEQ ID NO: 860849 - protein, 180 aa, Homo sapiens
MLRKFLDPRLSSTEENTQAAETMGPLSAPPCTQRITWKGLLLTASLLNFWNLPTTAQVTIEAEPTKVSKGKDVLLLVHNLPQNLAGYIWYKGQMKDLYHYITSYVVDGQIIIYGPAYSGRETVYSNASLLIQNVTREDAGSYTLHIVKRGDGTRGETGHFTFTLYLKTPEPSISSSYTDG

SEQ ID NO: 860850 - protein, 71 aa, Homo sapiens
ATAVTDGRSCLCWELVARCRALKNERLGRGLVSGDCDLQGPPWSQSRCWRDKRRLQKILTLSTVSQTTLRE

SEQ ID NO: 860851 - protein, 71 aa, Homo sapiens; identical to SEQ ID NO: 860850

SEQ ID NO: 860852 - protein, 71 aa, Homo sapiens; identical to SEQ ID NO: 860850

SEQ ID NO: 860853 - protein, 71 aa, Homo sapiens; identical to SEQ ID NO: 860850

SEQ ID NO: 860854 - protein, 70 aa, Homo sapiens
ATAVTDGRSCLCWELVARCRALKNERLGRGLVSGDCDLQGPPWSQSRCWRDKRRLQKILTLSTVSQTTLR

SEQ ID NO: 860855 - protein, 99 aa, Homo sapiens
MEPEQMLEGQTQVAENPHSEYGLTDNVERIVENEKINAEKSSKQKVDLQSLPTRAYLDQTVVPILLQGLAVLAKERPPNPIEFLASYLLKNKAQFEDRN

SEQ ID NO: 860856 - protein, 97 aa, Homo sapiens
HHNRHITDRMHRLQDDTLHRRVHQFIRIVENEKINAEKSSKQKVDLQSLPTRAYLDQTVVPILLQGLAVLAKERPPNPIEFLASYLLKNKAQFEDRN

SEQ ID NO: 860857 - protein, 96 aa, Homo sapiens
MEPEQMLEGQTQVAENPHSENRVGELPLFEPLPGPTLTQGGKLGDVSGGLETESSNGKDTLEGAGDTSEVMDTQAGSVDEENGRQLGEVELQCGIC

SEQ ID NO: 860858 - protein, 71 aa, Homo sapiens; identical to SEQ ID NO: 860850

SEQ ID NO: 860859 - protein, 71 aa, Homo sapiens; identical to SEQ ID NO: 860850

SEQ ID NO: 860860 - protein, 93 aa, Homo sapiens
ATAVTDGRSCLCWELVARCRALKNERLGRGLVSGDCDLQGPPWSQSRCWRDKRRLQKILTLSTVSQTTLRPPNPIEFLASYLLKNKAQFEDRN

SEQ ID NO: 860861 - protein, 71 aa, Homo sapiens; identical to SEQ ID NO: 860850

SEQ ID NO: 860862 - protein, 71 aa, Homo sapiens; identical to SEQ ID NO: 860850

SEQ ID NO: 860863 - protein, 99 aa, Homo sapiens; identical to SEQ ID NO: 860855

SEQ ID NO: 860864 - protein, 105 aa, Homo sapiens
MAKSGLRQDPQSTAAATVLKRAVELDSESRYPQALVCYQEGIDLLLQVLKGTKDNTKRCNLREKISKYMDRAENIKKYLDQEKEEAKETPGISLRFCCESKHLRS

SEQ ID NO: 860865 - protein, 295 aa, Homo sapiens
RRSERDLQTEAFLFRRNPSHSGKSLERERRRPGYHMTTSRKRSRPAQLHPGLRRRRTSRIMAKSGLRQDPQSTAAATVLKRAVELDSESRYPQALVCYQEGIDLLLQVLKGTKDNTKRCNLREKISKYMDRAENIKKYLDQEKEDGKYHKQIKIEENATGFSYESLFREYLNETVTEVWIEDPYIRHTHQLYNFLRFCEMLIKRPCKVKTIHLLTSLDEGIEQVQQSRGLQEIEESLRSHGVLLEVQYSSSIHDREIRFNNGWMIKIGRGLDYFKKPQVGYNLMSKCVALFLYHF

SEQ ID NO: 860866 - protein, 266 aa, Homo sapiens
MAKSGLRQDPQSTAAATVLKRAVELDSESRYPQALVCYQEGIDLLLQVLKGTKDNTKRCNLREKISKYMDRAENIKKYLDQEKEDGKYHKQIKIEENATGFSYESLFREYLNETVTEVWIEDPYIRHTHQLYNFLRFCEMLIKRPCKVKTIHLLTSLDEGIEQVQQSRGLQEIEESLRSHGVLLEVQYSSSIHDREIRFNNGWMIKIGRGLDYFKKPQTGFHHVAQAGLKLLGSSSPPTLASQSAGITGMSHCTQPHYLYLKAKLC

SEQ ID NO: 860867 - protein, 220 aa, Homo sapiens
MAKSGLRQDPQSTAAATVLKRAVELDSESRYPQALVCYQEGIDLLLQVLKGTKDNTKRCNLREKISKYMDRAENIKKYLDQEKEDGKYHKQIKIEENATGFSYESLFREYLNETVTEVWIEDPYIRHTHQGIEQVQQSRGLQEIEESLRSHGVLLEVQYSSSIHDREIRFNNGWMIKIGRGLDYFKKPQSRFSLGYCDFDLRPCHETTVDIFHKKHTKNI

SEQ ID NO: 860868 - protein, 309 aa, Homo sapiens
RRSERDLQTEAFLFRRNPSHSGKSLERERRRPGYHMTTSRKRSRPAQLHPGLRRRRTSRIMAKSGLRQDPQSTAAATVLKRAVELDSESRYPQALVCYQEGIDLLLQVLKGTKDNTKRCNLREKISKYMDRAENIKKYLDQEKEDGKYHKQIKIEENATGFSYESLFREYLNETVTEVWIEDPYIRHTHQLYNFLRFCEMLIKRPCKVKTIHLLTSLDEGIEQVQQSRGLQEIEESLRSHGVLLEVQYSSSIHDREIRFNNGWMIKIGRGLDYFKKPQSRFSLGYCDFDLRPCHETTVDIFHKKHTKNI

SEQ ID NO: 860869 - protein, 249 aa, Homo sapiens
MAKSGLRQDPQSTAAATVLKRAVELDSESRYPQALVCYQEGIDLLLQVLKGTKDNTKRCNLREKISKYMDRAENIKKYLDQEKEDGKYHKQIKIEENATGFSYESLFREYLNETVTEVWIEDPYIRHTHQLYNFLRFCEMLIKRPCKVKTIHLLTSLDEGIEQVQQSRGLQEIEESLRSHGVLLEVQYSSSIHDREIRFNNGWMIKIGRGLDYFKKPQSRFSLGYCDFDLRPCHETTVDIFHKKHTKNI

SEQ ID NO: 860870 - protein, 127 aa, Homo sapiens [sequence omitted]

SEQ ID NO: 860871 - protein, 296 aa, Homo sapiens
RRSERDLQTEAFLFRRNPSHSGKSLERERRRPGYHMTTSRKRSRPAQLHPGLRRRRTSRIMAKSGLRQDPQSTAAATVLKRAVELDSESRYPQALVCYQEGIDLLLQVLKGTKDNTKRCNLREKISKYMDRAENIKKYLDQEKEDGKYHKQIKIEENATGFSYESLFREYLNETVTEVWIEDPYIRHTHQLYNFLRFCEMLIKRPCKVKTIHLLTSLDEGIEQVQQSRGLQEIEESLRSHGVLLEVQYSSSIHDREIRFNNGWMIKIGRGLDYFKKPQVQVLIILNLKNFRLKLIY

SEQ ID NO: 860872 - protein, 105 aa, Homo sapiens; identical to SEQ ID NO: 860864

SEQ ID NO: 860873 - protein, 127 aa, Homo sapiens [sequence omitted]

SEQ ID NO: 860874 - protein, 97 aa, Homo sapiens
FPGRHLTRGLKMLHSIVSRIGSFRWVLGLTDFKNEATDPCGCSHSLEVSSLTCSTINLYSPFKAQLKCPLPQKPSTSPEGITEPHFQDEPTALHTMS

SEQ ID NO: 860875 - protein, 79 aa, Homo sapiens
FPGRHLTRGLKMLHSIVSRIGSFRWVLGLTDFKNEATDPCVTSTSSAKPTSLSRLIPRPSLSKTFQVNRQPSSAAVSRN

SEQ ID NO: 860876 - protein, 306 aa, Homo sapiens
MDTPPLSDSESESDESLVTDRELQDAFSRGLLKPGLNVVLEGPKKAVNDVNGLKQCLAEFKRDLEWVERLDVTLGPVPEIGGSEAPAPQNKDQKAVDPEDDFQREMSFYRQAQAAVLAVLPRLHQLKVPTKRPTDYFAEMAKSDLQMQKIRQKLQTKQAAMERSEKAKQLRALRKYGKKVQTEVLQKRQQEKAHMMNAIKKYQKGFSDKLDFLEGDQKPLAQRKKAGAKGQQMRKGPSAKRRYKNQKFGFGGKKKGSKWNTRESYDDVSSFRAKTAHGRGLKRPGKKGSNKRPGKRTREKMKNRTH

SEQ ID NO: 860877 - protein, 306 aa, Homo sapiens; identical to SEQ ID NO: 860876

SEQ ID NO: 860878 - protein, 306 aa, Homo sapiens; identical to SEQ ID NO: 860876

SEQ ID NO: 860879 - protein, 292 aa, Homo sapiens
MDTPPLSDSESESDESLVTDRELQDAFSRGLLKPGLNVVLEGPKKAVNDVNGLKQCLAEFKRDLEWVERLDVTLGPVPEIGGSEAPAPQNKDQKAVDPEDDFQREMSFYRQAQAAVLAVLPRLHQLKVPTKRPTDYFAEMAKSDLQMQKIRQKLQTKQAAMERSEKAKQLRALRKYGKKVQTEVLQKRQQEKAHMMNAIKKYQKGFSDKLDFLEGDQKPLAQRKKAGAKGQQMRKGPSAKRRYKNQKFGFGGKKKGSKWNTRESYDDVSSFRAKTAHGRGLKRPGKKGSNCK

SEQ ID NO: 860880 - protein, 292 aa, Homo sapiens; identical to SEQ ID NO: 860879

SEQ ID NO: 860881 - protein, 315 aa, Homo sapiens
  misc_feature (243)..(243): Xaa can be any naturally occurring amino acid
  misc_feature (245)..(245): Xaa can be any naturally occurring amino acid
  misc_feature (251)..(251): Xaa can be any naturally occurring amino acid
MDTPPLSDSESESDESLVTDRELQDAFSRGLLKPGLNVVLEGPKKAVNDVNGLKQCLAEFKRDLEWVERLDVTLGPVPEIGGSEAPAPQNKDQKAVDPEDDFQREMSFYRQAQAAVLAVLPRLHQLKVPTKRPTDYFAEMAKSDLQMQKIRQKLQTKQAAMERSEKAKQLRALRKYGKKVQTEVLQKRQQEKAHMMNAIKKYQKGFSDKLDFLEGDQKPLAQRKKAGAKGQQMRKGPTGPQRXIXEKGKGXPVLNDGIKTRSLVLVERRKAQSGTLGRAMMMYLASGPRQLMAEASRGLARKGQIRDLENEQERR

SEQ ID NO: 860882 - protein, 361 aa, Homo sapiens
MYPEALPVGILSNPDTFKRRSGSYSNDKPEVWFAAGSGSPNQKLSSSCVGRACGEMDTPPLSDSESESDESLVTDRELQDAFSRGLLKPGLNVVLEGPKKAVNDVNGLKQCLAEFKRDLEWVERLDVTLGPVPEIGGSEAPAPQNKDQKAVDPEDDFQREMSFYRQAQAAVLAVLPRLHQLKVPTKRPTDYFAEMAKSDLQMQKIRQKLQTKQAAMERSEKAKQLRALRKYGKKVQTEVLQKRQQEKAHMMNAIKKYQKGFSDKLDFLEGDQKPLAQRKKAGAKGQQMRKGPSAKRRYKNQKFGFGGKKKGSKWNTRESYDDVSSFRAKTAHGRGLKRPGKKGSNKRPGKRTREKMKNRTH

SEQ ID NO: 860883 - protein, 322 aa, Homo sapiens
  misc_feature (1)..(1): Xaa can be any naturally occurring amino acid
XSSRMYWYHTSPRLSGFASRDLLHVIPLHHSTADVVRMSSPRKVFCNQGSCVMTTEGRKKAVHYDVNGLKQCLAEFKRDLEWVERLDVTLGPVPEIGGSEAPAPQNKDQKAVDPEDDFQREMSFYRQAQAAVLAVLPRLHQLKVPTKRPTDYFAEMAKSDLQMQKIRQKLQTKQAAMERSEKAKQLRALRKYGKKVQTEVLQKRQQEKAHMMNAIKKYQKGFSDKLDFLEGDQKPLAQRKKAGAKGQQMRKGPSAKRRYKNQKFGFGGKKKGSKWNTRESYDDVSSFRAKTAHGRGLKRPGKKGSNKRPGKRTREKMKNRTH

SEQ ID NO: 860884 - protein, 331 aa, Homo sapiens
MDTPPLSDSESESDESLVTDRELQDAFSRGLLKPGLNVVLEGPKKAVNDVNGLKQCLAEFKRDLEWVERLDVTLGPVPEIGGSEAPAPQNKDQKAVDPEDDFQREMSFYRQAQAAVLAVLPRLHQLKVPTKRPTDYFAEMAKSDLQMQKIRQKLQTKQAAMERSEKAKQLRALRKYGKKVQTEVLQKRQQEKAHMMNAIKKYQKGPDNWILEGDRNSGQGQDGGAKATDIGRGQGKDGINQKVGGRVATTQRPQGRTPGSTQYRSTYNRRQTTIAEPQDGNKHNHTRTADNQSRPQTRHTHTTTRQPTSAMAIQQKKSTEHVIDERRTDVL

SEQ ID NO: 860885 - protein, 167 aa, Homo sapiens [sequence omitted]

SEQ ID NO: 860886 - protein, 209 aa, Homo sapiens
MLSNIGRQKQFLSQGWSSFGFRLPRLHQLKVPTKRPTDYFAEMAKSDLQMQKIRQKLQTKQAAMERSEKAKQLRALRKYGKKVQTEVLQKRQQEKAHMMNAIKKYQKGFSDKLDFLEGDQKPLAQRKKAGAKGQQMRKGPSAKRRYKNQKFGFGGKKKGSKWNTRESYDDVSSFRAKTAHGRGLKRPGKKGSNKRPGKRTREKMKNRTH

SEQ ID NO: 860887 - protein, 79 aa, Homo sapiens; identical to SEQ ID NO: 860875

SEQ ID NO: 860888 - protein, 49 aa, Homo sapiens
GKAHLPLSLDSPAILIKDLPGEQAAILSSSQQELIIKGKQHLKRKRVMA

SEQ ID NO: 860889 - protein, 327 aa, Homo sapiens
MDTPPLSDSESESDESLVTDRELQDAFSRGLLKPGLNVVLEGPKKAVNDVNGLKQCLAEFKRDLEWVERLDVTLGPVPEIGGSEAPAPQNKDQKAVDPEDDFQREMSFYRQAQAAVLAVLPRLHQLKVPTKRPTDYFAEMAKSDLQMQKIRQKLQTKQAAMERSEKAKQLRALRKYGKKVQTEVLQKRQQEKAHMMNAIKKYQKGFSDKLDFLEGDQKPLAQRKKAGAKGQQMRKGPSAKRRYKNQKFGFGGKKKGSKWNTRESYDDVSSFRAKTAHGRGLKRPGKKGSNKRPGKRTREKMKPTHPINSLFGMFDSIQKQLILAVQV

SEQ ID NO: 860890 - protein, 311 aa, Homo sapiens
MDTPPLSDSESESDESLVTDRELQDAFSRGLLKPGLNVVLEGPKKAVNDVNGLKQCLAEFKRDLEWVERLDVTLGPVPEIGGSEAPAPQNKDQKAVDPEDDFQREMSFYRQAQAAVLAVLPRLHQLKVPTKRPTDYFAEMAKSDLQMQKIRQKLQTKQAAMERSEKAKQLRALRKYGKKVQTEVLQKRQQEKAHMMNAIKKYQKGFSDKLDFLEGDQKPLAQRKKAGAKGQQMRKGPSAKRRYKNQKFGFGGKKKGSKWNTRESYDDVSSFRAKTAHGRGLKRPGKKGSNLEDWKEQESEKTLMHLVQDRK

SEQ ID NO: 860891 - protein, 304 aa, Homo sapiens
MDTPPLSDSESESDESLVTDRELQDAFSRGLLKPGLNVVLEGPKKAVNDVNGLKQCLAEFKRDLEWVERLDVTLGPVPEIGGSEAPAPQNKDQKAVDPEDDFQREMSFYRQAQAAVLAVLPRLHQLKVPTKRPTDYFAEMAKSDLQMQKIRQKLQTKQAAMERSEKAKQLRALRKYGKKVQTEVLQKRQQEKAHMMNAIKKYQKGFSDKLDFLEGDQKPLAQRKKAGAKGQQMRKGPSAKRRYKNQKFGFGGKKKGSKWNTRESYDDVSSFRAKTAHGRGLKRPGKKGSNFCSSSPWGRRQAAM

SEQ ID NO: 860892 - protein, 201 aa, Homo sapiens [sequence omitted]

SEQ ID NO: 860893 - protein, 329 aa, Homo sapiens
MDTPPLSDSESESDESLVTDRELQDAFSRGLLKPGLNVVLEGPKKAVNDVNGLKQCLAEFKRDLEWVERLDVTLGPVPEIGGSEAPAPQNKDQKAVDPEDDFQREMSLYVCFQMLEKLRILVQESGKRGNYYRQAQAAVLAVLPRLHQLKVPTKRPTDYFAEMAKSDLQMQKIRQKLQTKQAAMERSEKAKQLRALRKYGKKVQTEVLQKRQQEKAHMMNAIKKYQKGFSDKLDFLEGDQKPLAQRKKAGAKGQQMRKGPSAKRRYKNQKFGFGGKKKGSKWNTRESYDDVSSFRAKTAHGRGLKRPGKKGSNKRPGKRTREKMKNRTH

SEQ ID NO: 860894 - protein, 167 aa, Homo sapiens [sequence omitted]

SEQ ID NO: 860895 - protein, 137 aa, Homo sapiens
MDTPPLSDSESESDESLVTDRELQDAFSRGLLKPGLNVVLEGPKKAVNDVNGLKQCLAEFKRDLEWVERLDVTLGPVPEIGGSEAPAPQNKDQKAVDPEDDFQREMSLYVCFQMLEKLRILVQESGKEGKLVSLHSE

SEQ ID NO: 860896 - protein, 79 aa, Homo sapiens; identical to SEQ ID NO: 860875

SEQ ID NO: 860897 - protein, 561 aa, Homo sapiens
RHPGQKSPGQWRARHYPCGQAEVSARRPDGRDGRGGRRAPWRALTSASPRAALPQAQCPELGASPARGTLLAKEVVSPVLSSRPGGPKLPDDEEPPNMASESGKLWGGRFVGAVDPIMEKFNASIAYDRHLWEVDVQGSKAYSRGLEKAGLLTKAEMDQILHGLDKVAEEWAQGTFKLNSNDEDIHTANERRLKELIGATAGKLHTGRSRNDQVVTDLRLWMRQTCSTLSGLLWELIRTMVDRAEAERDVLFPGYTHLQRAQPIRWSHWILSHAVALTRDSERLLEVRKRINVLPLGSGAIAGNPLGVDRELLRAELNFGAITLNSMDATSERDFVAEFLFWASLCMTHLSRMAEDLILYCTKEFSFVQLSDAYSTGSSLMPQKKNPDSLELIRSKAGRVFGRCAGLLMTLKGLPSTYNKDLQEDKEAVFEVSDTMSAVLQVATGVISTLQIHQENMGQALSPDMLATDLAYYLVRKGMPFRQAHEASGKAVFMAETKGVALNQLSLQELQTISPLFSGDVICVWDYGHSVEQYGALGGTARSSVDWQIRQVRALLQAQQA

SEQ ID NO: 860898 - protein, 594 aa, Homo sapiens
RHPGQKSPGQWRARHYPCGQAEVSARRPDGRDGRGGRRAPWRALTSASPRAALPQAQCPELGASPARGTLLAKEVVSPVLSSRPGGPKLPDDEEPPNMASESGKLWGGRFVGAVDPIMEKFNASIAYDRHLWEVDVQGSKAYSRGLEKAGLLTKAEMDQILHGLDKVAEEWAQGTFKLNSNDEDIHTANERRLKELIGATAGKLHTGRSRNDQVVTDLRLWMRQTCSTLSGLLWELIRTMVDRAEAERDVLFPGYTHLQRAQPIRWSHWILSHAVALTRDSERLLEVRKRINVLPLGSGAIAGNPLGVDRELLRAELNFGAITLNSMDATSERDFVAEFLFWASLCMTHLSRMAEDLILYCTKEFSFVQLSDAYSTGSSLMPQKKNPDSLELIRSKAGRVFGRVSKAGGGAGPLGCWWVARGAGSRVQPLCLPLPACAGLLMTLKGLPSTYNKDLQEDKEAVFEVSDTMSAVLQVATGVISTLQIHQENMGQALSPDMLATDLAYYLVRKGMPFRQAHEASGKAVFMAETKGVALNQLSLQELQTISPLFSGDVICVWDYGHSVEQYGALGGTARSSVDWQIRQVRALLQAQQA

SEQ ID NO: 860899 - protein, 444 aa, Homo sapiens [sequence omitted]

SEQ ID NO: 860900 - protein, 535 aa, Homo sapiens
RHPGQKSPGQWRARHYPCGQAEVSARRPDGRDGRGGRRAPWRALTSASPRAALPQAQCPELGASPARGTLLAKEVVSPVLSSRPGGPKLPDDEEPPNMASESGKLWGGRFVGAVDPIMEKFNASIAYDRHLWEVDVQGSKAYSRGLEKAGLLTKAEMDQILHGLDKVAEEWAQGTFKLNSNDEDIHTANERRLKELIGATAGKLHTGRSRNDQVVTDLRLWMRQTCSTLSGLLWELIRTMVDRAEAERDVLFPGYTHLQRAQPIRWSHWILSGAIAGNPLGVDRELLRAELNFGAITLNSMDATSERDFVAEFLFWASLCMTHLSRMAEDLILYCTKEFSFVQLSDAYSTGSSLMPQKKNPDSLELIRSKAGRVFGRCAGLLMTLKGLPSTYNKDLQEDKEAVFEVSDTMSAVLQVATGVISTLQIHQENMGQALSPDMLATDLAYYLVRKGMPFRQAHEASGKAVFMAETKGVALNQLSLQELQTISPLFSGDVICVWDYGHSVEQYGALGGTARSSVDWQIRQVRALLQAQQA

SEQ ID NO: 860901 - protein, 462 aa, Homo sapiens
RHPGQKSPGQWRARHYPCGQAEVSARRPDGRDGRGGRRAPWRALTSASPRAALPQAQCPELGASPARGTLLAKEVVSPVLSSRPGGPKLPDDEEPPNMASESGKLWGGRFVGAVDPIMEKFNASIAYDRHLWEVDVQGSKAYSRGLEKAGLLTKAEMDQILHGLDKVAEEWAQGTFKLNSNDEDIHTANERRLKELIGATAGKLHTGRSRNDQVVTDLRLWMRQTCSTLSGLLWELIRTMVDRAEAERDVLFPGYTHLQRAQPIRWSHWILSHAVALTRDSERLLEVRKRINVLPLGSGAIAGNPLGVDRELLRAELNFGAITLNSMDATSERDFVAEFLFWASLCMTHLSRMAEDLILYCTKEFSFVQLSDAYSTGSSLMPQKKNPDSLELIRSKAGRVFGRCAGLLMTLKGLPSTYNKDLQCGAVWCPGRHCALQRRLADPPGAGATAGTAGLGPPTPAP

SEQ ID NO: 860902 - protein, 708 aa, Homo sapiens
RHPGQKSPGQWRARHYPCGQAEVSARRPDGRDGRGGRRAPWRALTSASPRAALPQAQCPELGASPARGTLLAKEVVSPVLSSRPGGPKLPDDEEPPNMASESGKLWGGRFVGAVDPIMEKFNASIAYDRHLWEVDVQGSKAYSRGLEKAGLLTKAEMDQILHGLDKVAEEWAQGTFKLNSNDEDIHTANERRLKELIGATAGKLHTGRSRNDQVVTDLRLWMRQTCSTLSGLLWELIRTMVDRAEAERDVLFPGYTHLQRAQPIRWSHWILSHAVALTRDSERLLEVRKRINVLPLGSGAIAGNPLGVDRELLRAGETSCPSSPGRITLSTRQDLQTHLKPEGRGLWLLVKPSFIAYGPEVIKFRGHSWQGCLVLRDSGLLPPSWDCAKDPSPQLLPHPDQEEGAGQPSWGRGGHSLSSSLALLPPTPPELNFGAITLNSMDATSERDFVAEFLFWASLCMTHLSRMAEDLILYCTKEFSFVQLSDAYSTGSSLMPQKKNPDSLELIRSKAGRVFGRVSKAGGGAGPLGCWWVARGAGSRVQPLCLPLPACAGLLMTLKGLPSTYNKDLQEDKEAVFEVSDTMSAVLQVATGVISTLQIHQENMGQALSPDMLATDLAYYLVRKGMPFRQAHEASGKAVFMAETKGVALNQLSLQELQTISPLFSGDVICVWDYGHSVEQYGALGGTARSSVDWQIRQVRALLQAQQA

SEQ ID NO: 860903 - protein, 328 aa, Homo sapiens
GTHRDREGESEGETEMEYYQRDTHLQRAQPIRWSHWILSHAVALTRDSERLLEVRKRINVLPLGSGAIAGNPLGVDRELLRAELNFGAITLNSMDATSERDFVAEFLFWASLCMTHLSRMAEDLILYCTKEFSFVQLSDAYSTGSSLMPQKKNPDSLELIRSKAGRVFGRCAGLLMTLKGLPSTYNKDLQEDKEAVFEVSDTMSAVLQVATGVISTLQIHQENMGQALSPDMLATDLAYYLVRKGMPFRQAHEASGKAVFMAETKGVALNQLSLQELQTISPLFSGDVICVWDYGHSVEQYGALGGTARSSVDWQIRQVRALLQAQQA

SEQ ID NO: 860904 - protein, 235 aa, Homo sapiens [sequence omitted]

SEQ ID NO: 860905 - protein, 359 aa, Homo sapiens
RHPGQKSPGQWRARHYPCGQAEVSARRPDGRDGRGGRRAPWRALTSASPRAALPQAQCPELGASPARGTLLAKEVVSPVLSSRPGGPKLPDDEEPPNMASESGKLWGGRFVGAVDPIMEKFNASIAYDRHLWEVDVQGSKAYSRGLEKAGLLTKAEMDQILHGLDKVAEEWAQGTFKLNSNDEDIHTANERRLKELIGATAGKLHTGRSRNDQVVTDLRLWMRQTCSTLSGLLWELIRTMVDRAEAERDVLFPGYTHLQRAQPIRWSHWILSHAVALTRDSERLLEVRKRINVLPLGSGAIAGNPLGVDRELLRAGETSCPSSPGRITLSTRQDLQTHLKPEGRGLWLLVKPSFIAYGH

SEQ ID NO: 860906 - protein, 196 aa, Homo sapiens
MGKVGGAWWFTMPSTGQHGETPSLLRIQNLAGCVVAGACNPSYSGVLRPENHLNPGGGGCSEPRSRQCTPAWATRAKLHLKKKKKKKEGGAGNGGRSGHGETCLSAIFLPGTQMPFRQAHEASGKAVFMAETKGVALNQLSLQELQTISPLFSGDVICVWDYGHSVEQYGALGGTARSSVDWQIRQVRALLQAQQA

SEQ ID NO: 860907 - protein, 501 aa, Homo sapiens
DAIPARKALASGGRDTIRAARRRPGGPKLPDDEEPPNMASESGKLWGGRFVGAVDPIMEKFNASIAYDRHLWEVDVQGSKAYSRGLEKAGLLTKAEMDQILHGLDKVAEEWAQGTFKLNSNDEDIHTANERRLKELIGATAGKLHTGRSRNDQVVTDLRLWMRQTCSTLSGLLWELIRTMVDRAEAERDVLFPGYTHLQRAQPIRWSHWILSHAVALTRDSERLLEVRKRINVLPLGSGAIAGNPLGVDRELLRAELNFGAITLNSMDATSERDFVAEFLFWASLCMTHLSRMAEDLILYCTKEFSFVQLSDAYSTGSSLMPQKKNPDSLELIRSKAGRVFGRCAGLLMTLKGLPSTYNKDLQEDKEAVFEVSDTMSAVLQVATGVISTLQIHQENMGQALSPDMLATDLAYYLVRKGMPFRQAHEASGKAVFMAETKGVALNQLSLQELQTISPLFSGDVICVWDYGHSVEQYGALGGTARSSVDWQIRQVRALLQAQQA

SEQ ID NO: 860908 - protein, 317 aa, Homo sapiens
DAIPARKALASGGRDTIRAARRRPGGPKLPDDEEPPNMASESGKLWGGRFVGAVDPIMEKFNASIAYDRHLWEVDVQGSKAYSRGLEKAGLLTKAEMDQILHGLDKVAEEWAQGTFKLNSNDEDIHTANERRLKELIGATAGKLHTGRSRNDQVVTDLRLWMRQTCSTLSGLLWELIRTMVDRAEAERDVLFPGYTHLQRAQPIRWSHWILSHAVALTRDSERLLEVRKRINVLPLGSGAIAGNPLGVDRELLRAELNFGAITLNSMDATSERDFVAEFLFWASLCMTHLSRMARPIFLAKDSRRRLNLRREQLCQK

SEQ ID NO: 860909 - protein, 561 aa, Homo sapiens; identical to SEQ ID NO: 860897

SEQ ID NO: 860910 - protein, 561 aa, Homo sapiens; identical to SEQ ID NO: 860897

SEQ ID NO: 860911 - protein, 411 aa, Homo sapiens
RHPGQKSPGQWRARHYPCGQAEVSARRPDGRDGRGGRRAPWRALTSASPRAALPQAQCPELGASPARGTLLAKEVVSPVLSSRPGGPKLPDDEEPPNMASESGKLWGGRFVGAVDPIMEKFNASIAYDRHLWEVDVQGSKAYSRGLEKAGLLTKAEMDQILHGLDKVAEEWAQGTFKLNSNDEDIHTANERRLKELIGATAGKLHTGRSRNDQVVTDLRLWMRQTCSTLSGLLWELIRTMVDRAEAERDVLFPGYTHLQRAQPIRWSHWILSHAVALTRDSERLLEVRKRINVLPLGSGAIAGNPLGVDRELLRAELNFGAITLNSMDATSERDFVAEFLFWASLCMTHLSRMAEDLILYCTKEFSFVQLSDAYSTGSSLMPQKMCRAPDDPQGTSQHLQQRLTGGQGSCV

SEQ ID NO: 860912 - protein, 675 aa, Homo sapiens
RHPGQKSPGQWRARHYPCGQAEVSARRPDGRDGRGGRRAPWRALTSASPRAALPQAQCPELGASPARGTLLAKEVVSPVLSSRPGGPKLPDDEEPPNMASESGKLWGGRFVGAVDPIMEKFNASIAYDRHLWEVDVQGSKAYSRGLEKAGLLTKAEMDQILHGLDKVAEEWAQGTFKLNSNDEDIHTANERRLKELIGATAGKLHTGRSRNDQVVTDLRLWMRQTCSTLSGLLWELIRTMVDRAEAERDVLFPGYTHLQRAQPIRWSHWILSHAVALTRDSERLLEVRKRINVLPLGSGAIAGNPLGVDRELLRAGETSCPSSPGRITLSTRQDLQTHLKPEGRGLWLLVKPSFIAYGPEVIKFRGHSWQGCLVLRDSGLLPPSWDCAKDPSPQLLPHPDQEEGAGQPSWGRGGHSLSSSLALLPPTPPELNFGAITLNSMDATSERDFVAEFLFWASLCMTHLSRMAEDLILYCTKEFSFVQLSDAYSTGSSLMPQKKNPDSLELIRSKAGRVFGRCAGLLMTLKGLPSTYNKDLQEDKEAVFEVSDTMSAVLQVATGVISTLQIHQENMGQALSPDMLATDLAYYLVRKGMPFRQAHEASGKAVFMAETKGVALNQLSLQELQTISPLFSGDVICVWDYGHSVEQYGALGGTARSSVDWQIRQVRALLQAQQA

SEQ ID NO: 860913 - protein, 496 aa, Homo sapiens
RHPGQKSPGQWRARHYPCGQAEVSARRPDGRDGRGGRRAPWRALTSASPRAALPQAQCPELGASPARGTLLAKEVVSPVLSSRPGGPKLPDDEEPPNMASEVAEEWAQGTFKLNSNDEDIHTANERRLKELIGATAGKLHTGRSRNDQVVTDLRLWMRQTCSTLSGLLWELIRTMVDRAEAERDVLFPGYTHLQRAQPIRWSHWILSHAVALTRDSERLLEVRKRINVLPLGSGAIAGNPLGVDRELLRAELNFGAITLNSMDATSERDFVAEFLFWASLCMTHLSRMAEDLILYCTKEFSFVQLSDAYSTGSSLMPQKKNPDSLELIRSKAGRVFGRCAGLLMTLKGLPSTYNKDLQEDKEAVFEVSDTMSAVLQVATGVISTLQIHQENMGQALSPDMLATDLAYYLVRKGMPFRQAHEASGKAVFMAETKGVALNQLSLQELQTISPLFSGDVICVWDYGHSVEQYGALGGTARSSVDWQIRQVRALLQAQQA

SEQ ID NO: 860914 - protein, 481 aa, Homo sapiens
RHPGQKSPGQWRARHYPCGQAEVSARRPDGRDGRGGRRAPWRALTSASPRAALPQAQCPELGASPARGTLLAKEVVSPVLSSRPGGPKLPDDEEPPNMASESGKLWGGRFVGAVDPIMEKFNASIAYDRHLWEVDVQGSKAYSRGLEKAGLLTKAEMDQILHGLDKVAEEWAQGTFKLNSNDEDIHTANERRLKELIGATAGKLHTGRSRNDQVVTDLRLWMRQTCSTLSGLLWELIRTMVDRAEAERDVLFPGYTHLQRAQPIRWSHWILSHAVALTRDSERLLEVRKRINVLPLGSGAIAGNPLGVDRELLRAELNFGAITLNSMDATSERDFVAEFLFWASLCMTHLSRMAEDLILYCTKEFSFVQLSDAYSTGSSLMPQKKNPDSLELIRSKAGRVFGRCAGLLMTLKGLPSTYNKDLQQLSLQELQTISPLFSGDVICVWDYGHSVEQYGALGGTARSSVDWQIRQVRALLQAQQA

SEQ ID NO: 860915 - protein, 359 aa, Homo sapiens; identical to SEQ ID NO: 860905

SEQ ID NO: 860916 - protein, 425 aa, Homo sapiens
RHPGQKSPGQWRARHYPCGQAEVSARRPDGRDGRGGRRAPWRALTSASPRAALPQAQCPELGASPARGTLLAKEVVSPVLSSRPGGPKLPDDEEPPNMASESGKLWGGRFVGAVDPIMEKFNASIAYDRHLWEVDVQGSKAYSRGLEKAGLLTKAEMDQILHGLDKVAEEWAQGTFKLNSNDEDIHTANERRLKELIGATAGKLHTGRSRNDQVVTDLRLWMRQTCSTLSGLLWELIRTMVDRAEAERDVLFPGYTHLQRAQPIRWSHWILSHAVALTRDSERLLEVRKRINVLPLGSGAIAGNPLGVDRELLRAELNFGAITLNSMDATSERDFVAEFLFWASLCMTHLSRMAEDLILYCTKEFSFVQLSDAYSTGSSLMPQKKNPDSLELIRSKAGRVFGRCAGLLMTLKGLPSTYNKDLQQA

SEQ ID NO: 860917 - protein, 664 aa, Homo sapiens
RHPGQKSPGQWRARHYPCGQAEVSARRPDGRDGRGGRRAPWRALTSASPRAALPQAQCPELGASPARGTLLAKEVVSPVLSSRPGGPKLPDDEEPPNMASESGKLWGGRFVGAVDPIMEKFNASIAYDRHLWEVDVQGSKAYSRGLEKAGLLTKAEMDQILHGLDKVAEEWAQGTFKLNSNDEDIHTANERRLKELIGATAGKLHTGRSRNDQVVTDLRLWMRQTCSTLSGLLWELIRTMVDRAEAERDVLFPGYTHLQRAQPIRWSHWILSHAVALTRDSERLLEVRKRINVLPLGSGAIAGNPLGVDRELLRAGETSCPSSPGRITLSTRQDLQTHLKPEGRGLWLLVKPSFIAYGPEVIKFRGHSWQGCLVLRDSGLLPPSWDCAKDPSPQLLPHPDQEEGAGQPSWGRGGHSLSSSLALLPPTPPELNFGAITLNSMDATSERDFVAEFLFWASLCMTHLSRMAEDLILYCTKEFSFVQLSDAYSTGSSLMPQKTPVPPSSRCAGLLMTLKGLPSTYNKDLQEDKEAVFEVSDTMSAVLQVATGVISTLQIHQENMGQALSPDMLATDLAYYLVRKGMPFRQAHEASGKAVFMAETKGVALNQLSLQELQTISPLFSGDVICVWDYGHSVEQYGALGGTARSSVDWQIRQVRALLQAQQA

SEQ ID NO: 860918 - protein, 359 aa, Homo sapiens; identical to SEQ ID NO: 860905

SEQ ID NO: 860919 - protein, 137 aa, Homo sapiens
RHPGQKSPGQWRARHYPCGQAEVSARRPDGRDGRGGRRAPWRALTSASPRAALPQAQCPELGASPARGTLLAKEVVSPVLSSRPGGPKLPDDEEPPNMASEVSGTSGTPVLLASKGESGGARPASGHPAGNRPPGSN

SEQ ID NO: 860920 - protein, 1130 aa, Homo sapiens
RPGTPGSPAVSGGMAGAGGGLGVWGNLVLLGLCSWTGARAPAPNPGRNLTVETQTTSSISLSWEVPDGLDSQNSNYWVQCTGDGGTTETRNTTATNVTVDGLGPGSLYTCSVWVEKDGVNSSVGTVTTATAPNPVRNLRVEAQTNSSIALTWEVPDGPDPQNSTYGVEYTGDGGRAGTRSTAHTNITVDGLEPGCLYAFSMWVGKNGINSSRETRNATTAHNPVRKPESGGSDHQLHLPELGGPRWHRPTELDLLRTSALEMVAEQRLETQQTPESPVDGLGPGSLYTCSVWVEKDGVNSSSWRLVTSTTAPNPVRNLTVEAQTNSSIALTWEVPDGPDPQNSTYGVEYTGDGGRAGTRSTAHTNITVDRLEPGCLYVFSVWVGKNGINSSRETRNATTAPNPVRNLHMETQTNSSIALCWEVPDGPYPQDYTYWVEYTGDGGGTETRNTTNTSVTAERLEPGTLYTFSVWAEKNGARGSRQNVSISTVPNAVTSLSKQDWTNSTIALRWTAPQGPGQSSYSYWVSWVREGMTDPRTQSTSGTDITLKELEAGSLYHLTVWAERNEVRGYNSTLTAATAPNEVTDLQNETQTKNSVMLWWKAPGDPHSQLYVYWVQWASKGHPRRGQDPQANWVNQTSRTNETWYKVEALEPGTLYNFTVWAERNDVASSTQSLCASTYPDTVTITSCVSTSAGYGVNLIWSCPQGGYEAFELEVGGQRGSQDRSSCGEAVSVLGLGPARSYPATITTIWDGMKVVSHSVVCHTESAGVIAGAFVGILLFLILVGLLIFFLKRRNKKKQQKPELRDLVFSSPGDIPAEDFADHVRKNERDSNCGFADEYQQLSLVGHSQSQMVASASENNAKNRYRNVLPYDWSRVPLKPIHEEPGSDYINASFMPGLWSPQEFIATQGPLPQTVGDFWRLVWEQQSHTLVMLTNCMEAGRVKCEHYWPLDSQPCTHGHLRVTLVGEEVMENWTVRELLLLQVEEQKTLSVRQFHYQAWPDHGVPSSPDTLLAFWRMLRQWLDQTMEGGPPIVHCSAGVGRTGTLIALDVLLRQLQSEGLLGPFSFVRKMRESRPLMVQTEAQYVFLHQCILRFLQQSAQAPAEKEVPYEDVENLIYENVAAIQAHKLEV

SEQ ID NO: 860921 - protein, 967 aa, Homo sapiens
RPGTPGSPAVSGGMAGAGGGLGVWGNLVLLGLCSWTGARAPAPNPGRNLTVETQTTSSISLSWEVPDGLDSQNSNYWVQCTGDGGTTETRNTTATNVTVDGLGPGSLYTCSVWVEKDGVNSSVGTVTTATAPNPVRNLRVEAQTNSSIALTWEVPDGPDPQNSTYGVEYTGDGGRAGTRSTAHTNITVDGLEPGCLYAFSMWVGKNGINSSRETRNATTAHNPVRKPESGGSDHQLHLPELGGPRWHRPTELDLLRTSALEMVAEQRLETQQTPESPVDGLGPGSLYTCSVWVEKDGVNSSSWRLVTSTTAPNPVRNLTVEAQTNSSIALTWEVPDGPDPQNSTYGVEYTGDGGRAGTRSTAHTNITVDRLEPGCLYVFSVWVGKNGINSSRETRNATTAPNPVRNLHMETQTNSSIALCWEVPDGPYPQDYTYWVEYTGDGGGTETRNTTNTSVTAERLEPGTLYTFSVWAEKNGARGSRQNVSISTAGTLYNFTVWAERNDVASSTQSLCASTYPDTVTITSCVSTSAGYGVNLIWSCPQGGYEAFELEVGGQRGSQDRSSCGEAVSVLGLGPARSYPATITTIWDGMKVVSHSVVCHTESAGVIAGAFVGILLFLILVGLLIFFLKRRNKKKQQKPELRDLVFSSPGDIPAEDFADHVRKNERDSNCGFADEYQQLSLVGHSQSQMVASASENNAKNRYRNVLPYDWSRVPLKPIHEEPGSDYINASFMPGLWSPQEFIATQGPLPQTVGDFWRLVWEQQSHTLVMLTNCMEAGRVKCEHYWPLDSQPCTHGHLRVTLVGEEVMENWTVRELLLLQVEEQKTLSVRQFHYQAWPDHGVPSSPDTLLAFWRMLRQWLDQTMEGGPPIVHCSAGVGRTGTLIALDVLLRQLQSEGLLGPFSFVRKMRESRPLMVQTEAQYVFLHQCILRFLQQSAQAPAEKEVPYEDVENLIYENVAAIQAHKLEV

SEQ ID NO: 860922 - protein, 232 aa, Homo sapiens
RPGTPGSPAVSGGMAGAGGGLGVWGNLVLLGLCSWTGARAPAPNPGRNLTVETQTTSSISLSWEVPDGLDSQNSNYWVQCTGDGGTTETRNTTATNVTVDGLGPGSLYTCSVWVEKDGVNSSVGTVTTATAPNPVRNLRVEAQTNSSIALTWEVPDGPDPQNSTYGVEYTGDGGRAGTRSTAHTNITVDGLEPGCLYAFSMWVGKNGINSSRETRNATTGERQSPFVLLLLV

SEQ ID NO: 860923 - protein, 1085 aa, Homo sapiens
RPGTPGSPAVSGGMAGAGGGLGVWGNLVLLGLCSWTGARAPAPNPGRNLTVETQTTSSISLSWEVPDGLDSQNSNYWVQCTGDGGTTETRNTTATNVTVDGLGPGSLYTCSVWVEKDGVNSSVGTVTTATAPNPVRNLRVEAQTNSSIALTWEVPDGPDPQNSTYGVEYTGDGGRAGTRSTAHTNITVDGLEPGCLYAFSMWVGKNGINSSRETRNATTAHNPVRKPESGGSDHQLHLPELGGPRWHRPTELDLLRTSALEMVAEQRLETQQTPESPVDGLGPGSLYTCSVWVEKDGVNSSSWRLVTSTTAPNPVRNLTVEAQTNSSIALTWEVPDGPDPQNSTYGVEYTGDGGRAGTRSTAHTNITVDRLEPGCLYVFSVWVGKNGINSSRETRNATTAPNPVRNLHMETQTNSSIALCWEVPDGPYPQDYTYWVEYTGDGGGTETRNTTNTSVTAERLEPGTLYTFSVWAEKNGARGSRQNVSISTVPNAVTSLSKQDWTNSTIALRWTAPQGPGQSSYSYWVSWVREGMTDPRTQSTSGTDITLKELEAGSLYHLTVWAERNEVRGYNSTLTAATAPNEVTDLQNETQTKNSVMLWWKAPGDPHSQLYVYWVQWASKGHPRRGQDPQANWVNQTSRTNETWYKVEALEPGTLYNFTVWAERNDVASSTQSLCASTYPDTVTITSCVSTSAGYGVNLIWSCPQGGYEAFELEVGGQRGSQDRSSCGEAVSVLGLGPARSYPATITTIWDGMKVVSHSVVCHTESAGVIAGAFVGILLFLILVGLLIFFLKRRNKKKQQKPELRDLVFSSPGDIPAEDFADHVRKNERDSNCGFADEYQQLSLVGHSQSQMVASASENNAKNRYRNVLPYDWSRVPLKPIHEEPGSDYINASFMPVKCEHYWPLDSQPCTHGHLRVTLVGEEVMENWTVRELLLLQVEEQKTLSVRQFHYQAWPDHGVPSSPDTLLAFWRMLRQWLDQTMEGGPPIVHCSAGVGRTGTLIALDVLLRQLQSEGLLGPFSFVRKMRESRPLMVQTEAQYVFLHQCILRFLQQSAQAPAEKEVPYEDVENLIYENVAAIQAHKLEV

SEQ ID NO: 860924 - protein, 81 aa, Homo sapiens
APPPALSMDKISPSPEAGNDPGPPVTSFSLPLPPPYQSFKVKAQSNQQQVAALIFACLVIIRQRQLDRKALEKVRKQIESI

SEQ ID NO: 860925 - protein, 146 aa, Homo sapiens
MLAGAGRPGLPQGRHLCWLLCAFTLKLCQAEAPVQEEKLSASTSNLPCWLVEEFVVAEECSPCSNFRAKTTPECGPTGYVEKITCSSSKRNEFKSCRSALMEQRLFWKFEGAVVCVALIFACLVIIRQRQLDRKALEKVRKQIESI

SEQ ID NO: 860926 - protein, 146 aa, Homo sapiens; identical to SEQ ID NO: 860925

SEQ ID NO: 860927 - protein, 146 aa, Homo sapiens; identical to SEQ ID NO: 860925

SEQ ID NO: 860928 - protein, 146 aa, Homo sapiens; identical to SEQ ID NO: 860925

SEQ ID NO: 860929 - protein, 146 aa, Homo sapiens; identical to SEQ ID NO: 860925

SEQ ID NO: 860930 - protein, 146 aa, Homo sapiens; identical to SEQ ID NO: 860925

SEQ ID NO: 860931 - protein, 120 aa, Homo sapiens
GGTYSAALPEVPGQDREGRSKCRLCAPTEARGLWSRSLCSDRCDTWRSMLAGAGRPGLPQGRHLCWLLCAFTLKLCQAEAPVQEEKLSASTSNLPCWLVEEFVVAEECSPCSNFRAKNYP

SEQ ID NO: 860932 - protein, 117 aa, Homo sapiens
MAWGWHLSFLSASTSNLPCWLVEEFVVAEECSPCSNFRAKTTPECGPTGYVEKITCSSSKRNEFKSCRSALMEQRLFWKFEGAVVCVALIFACLVIIRQRQLDRKALEKVRKQIESI

SEQ ID NO: 860933 - protein, 118 aa, Homo sapiens
MLAGAGRPGLPQGRHLCWLLCAFTLKLCQAEAPVQEEKLSKTTPECGPTGYVEKITCSSSKRNEFKSCRSALMEQRLFWKFEGAVVCVALIFACLVIIRQRQLDRKALEKVRKQIESI

SEQ ID NO: 860934 - protein, 117 aa, Homo sapiens; identical to SEQ ID NO: 860932

SEQ ID NO: 860935 - protein, 118 aa, Homo sapiens; identical to SEQ ID NO: 860933

SEQ ID NO: 860936 - protein, 84 aa, Homo sapiens
HEAPGPPPLLVALGEARPPGTRKLERHLCWLLCAFTLKLCQAEAPVQEEKLSASTSNLPCWLVEEFVVAEECSPCSNFRAKNYP

SEQ ID NO: 860937 - protein, 197 aa, Homo sapiens
MSRIKRVKWTHTPPPPPPTPTPHPHGGAPQNNPPGGPTIPPPHLCTSAPTNAANKRRPAANTATDHRQQHQRTPSGRTRPQQPEHKSGHLPARTHINSRPPAVTPAHEDATARHLLAPLLTLATVLPDDVTSPDVVDWTLARRWAAARHGSRAAEPYCLRPDLSSAVTSAAHRRKSHVHTDEIADRHHTTPTTPHPH

SEQ ID NO: 860938 - protein, 172 aa, Homo sapiens
MLAGAGRPGLPQGRHLCWLLCAFTLKLCQAEAPVQEEKLSASTSNLPCWLVEEFLPGFKAQGKKGKRGLGPLPFPNGLPEKFFPPGLKTYRPLEKTTPECGPTGYVEKITCSSSKRNEFKSCRSALMEQRLFWKFEGAVVCVALIFACLVIIRQRQLDRKALEKVRKQIESI

SEQ ID NO: 860939 - protein, 117 aa, Homo sapiens; identical to SEQ ID NO: 860932

SEQ ID NO: 860940 - protein, 117 aa, Homo sapiens; identical to SEQ ID NO: 860932

SEQ ID NO: 860941 - protein, 146 aa, Homo sapiens; identical to SEQ ID NO: 860925

SEQ ID NO: 860942 - protein, 146 aa, Homo sapiens; identical to SEQ ID NO: 860925

SEQ ID NO: 860943 - protein, 146 aa, Homo sapiens; identical to SEQ ID NO: 860925

SEQ ID NO: 860944 - protein, 146 aa, Homo sapiens; identical to SEQ ID NO: 860925

SEQ ID NO: 860945 - protein, 638 aa, Homo sapiens
MDAFEKVRTKLETQPQEEYEIINVEVKHGGFVYYQEGCCLVRSKDEEADNDNYEVLFNLEELKLDQPFIDCIRVAPDEKYVAAKIRTEDSEASTCVIIKLSDQPVMEASFPNVSSFEWVKDEEDEDVLFYTFQRNLRCHDVYRATFGDNKRNERFYTEKDPSYFVFLYLTKDSRFLTINIMNKTTSEVWLIDGLSPWDPPVLIQKRIHGVLYYVEHRDDELYILTNVGEPTEFKLMRTAADTPAIMNWDLFFTMKRNTKVIDLDMFKDHCVLFLKHSNLLYVNVIGLADDSVRSLKLPPWACGFIMDTNSDPKNCPFQLCSPIRPPKYYTYKFAEGKLFEETGHEDPITKTSRVLRLEAKSKDGKLVPMTVFHKTDSEDLQKKPLLVHVYGAYGMDLKMNFRPERRVLVDDGWILAYCHVRGGGELGLQWHADGRLTKKLNGLADLEACIKTLHGQGFSQPSLTTLTAFSAGGVLAGALCNSNPELVRAVTLEAPFLDVLNTMMDTTLPLTLEELEEWGNPSSDEKHKNYIKRYCPYQNIKPQHYPSIHITAYENDERVPLKGIVSYTEKLKEAIAEHAKDTGEGYQTPNIILDIQPGGNHVIEDSHKKITAQIKFLYEELGLDSTSVFEDLKKYLKF

SEQ ID NO: 860946 - protein, 572 aa, Homo sapiens
MDAFEKVRTKLETQPQEEYEIINVEVKHGGFVYYQEGCCLVRSKDEEADNDNYEVLFNLEELKLDQPFIDCIRVAPDEKYVAAKIRTEDSEASTCVIIKLSDQPVMEASFPNVSSFEWVKDEEDEDVLFYTFQRNLRCHDVYRATFGDNKRNERFYTEKDPSYFVFLYLTKDSRFLTINIMNKTTSEVWLIDGLSPWDPPVLIQKRIHGVLYYVEHRDDELYILTNVGEPTEFKLMRTAADTPAIMNWDLFFTMKRNTKVIDLDMFKDHCVLFLKHSNLLYVNVIGLADDSVRSLKDGKLVPMTVFHKTDSEDLQKKPLLVHVYGAYGMDLKMNFRPERRVLVDDGWILAYCHVRGGGELGLQWHADGRLTKKLNGLADLEACIKTLHGQGFSQPSLTTLTAFSAGGVLAGALCNSNPELVRAVTLEAPFLDVLNTMMDTTLPLTLEELEEWGNPSSDEKHKNYIKRYCPYQNIKPQHYPSIHITAYENDERVPLKGIVSYTEKLKEAIAEHAKDTGEGYQTPNIILDIQPGGNHVIEDSHKKITAQIKFLYEELGLDSTSVFEDLKKYLKF

SEQ ID NO: 860947 - protein, 638 aa, Homo sapiens; identical to SEQ ID NO: 860945

SEQ ID NO: 860948 - protein, 629 aa, Homo sapiens
MDAFEKVRTKLETQPQEEYEIINVEVKHGGFVYYQEGCCLVRSKDEEADNDNYEVLFNLEELKLDQPFIDCIRVAPDEKYVAAKIRTEDSEASTCVIIKLSDQPVMEASFPNVSSFEWVKDEEDEDVLFYTFQRNLRCHDVYRATFGDNKRNERFYTEKDPSYFVFLYLTKDSRFLTINIMNKTTSEVWLIDGLSPWDPPVLIQKRIHGVLYYVEHRDDELYILTNVGEPTEFKLMRTAADTPAIMNWDLFFTMKRNTKVIDLDMFKDHCVLFLKHSNLLYVNVIGLADDSVRSLKLPPWACGFIMDTNSDPKNCPFQLCSPIRPPKYYTYKFAEGKLFEETGHEDPITKTSRVLRLEAKSKDGKLVPMTVFHKTDSEDLQKKPLLVHVYGAYGMDLKMNFRPERRVLVDDGWILAYCHVRGGGELGLQWHADGRLTKKLNGLADLEACIKTLHGQGFSQPSLTTLTAFSAGGVLAGALCNSNPELVRAVTLEAPFLDVLNTMMDTTLPLTLEELEEWGNPSSDEKHKNYIKRYCPYQNIKPQHYPSIHITAYENDERVPLKGIVSYTEKLKEAIAEHAKDTGEGRRPPRSREHGQTDYYPQHTAQRNIFQAVAKSSAQDLGQTIILLC

SEQ ID NO: 860949 - protein, 727 aa, Homo sapiens
MQQKTKLFLQALKYSIPHLGKCMQKQHLNHYNFADHCYNRIKLKKYHLTKCLQNKPKISELARNIPSRSFSCKDLQPVKQENEKPLPENMDAFEKVRTKLETQPQEEYEIINVEVKHGGFVYYQEGCCLVRSKDEEADNDNYEVLFNLEELKLDQPFIDCIRVAPDEKYVAAKIRTEDSEASTCVIIKLSDQPVMEASFPNVSSFEWVKDEEDEDVLFYTFQRNLRCHDVYRATFGDNKRNERFYTEKDPSYFVFLYLTKDSRFLTINIMNKTTSEVWLIDGLSPWDPPVLIQKRIHGVLYYVEHRDDELYILTNVGEPTEFKLMRTAADTPAIMNWDLFFTMKRNTKVIDLDMFKDHCVLFLKHSNLLYVNVIGLADDSVRSLKLPPWACGFIMDTNSDPKNCPFQLCSPIRPPKYYTYKFAEGKLFEETGHEDPITKTSRVLRLEAKSKDGKLVPMTVFHKTDSEDLQKKPLLVHVYGAYGMDLKMNFRPERRVLVDDGWILAYCHVRGGGELGLQWHADGRLTKKLNGLADLEACIKTLHGQGFSQPSLTTLTAFSAGGVLAGALCNSNPELVRAVTLEAPFLDVLNTMMDTTLPLTLEELEEWGNPSSDEKHKNYIKRYCPYQNIKPQHYPSIHITAYENDERVPLKGIVSYTEKLKEAIAEHAKDTGEGYQTPNIILDIQPGGNHVIEDSHKKITAQIKFLYEELGLDSTSVFEDLKKYLKF

SEQ ID NO: 860950 - protein, 638 aa, Homo sapiens; identical to SEQ ID NO: 860945

SEQ ID NO: 860951 - protein, 638 aa, Homo sapiens; identical to SEQ ID NO: 860945

SEQ ID NO: 860952 - protein, 638 aa, Homo sapiens; identical to SEQ ID NO: 860945

SEQ ID NO: 860953 - protein, 87 aa, Homo sapiens
MGPGGSQLDDDLGCCLRRGKRLSQAKDIKRCAALSAGFLAYMNGSLGRTCKPAQYAGLIVGTVHAGTGRRIQMGIEPGVLLQWALDE

SEQ ID NO: 860954 - protein, 638 aa, Homo sapiens; identical to SEQ ID NO: 860945

SEQ ID NO: 860955 - protein, 638 aa, Homo sapiens; identical to SEQ ID NO: 860945

SEQ ID NO: 860956 - protein, 620 aa, Homo sapiens
MDAFEKVRTKLETQPQEEYEIINVEVKHGGFVYYQEGCCLVRSKDEEADNDNYEVLFNLEELKLDQPFIDCIRVAPDEKYVAAKIRTEDSEASTCVIIKLSDQPVMEASFPNVSSFEWVKDEEDEDVLFYTFQRNLRCHDVYRATFGDNKRNERFYTEKDPSYFVFLYLTVVDRWPEPLGPTVLIQKRIHGVLYYVEHRDDELYILTNVGEPTEFKLMRTAADTPAIMNWDLFFTMKRNTKVIDLDMFKDHCVLFLKHSNLLYVNVIGLADDSVRSLKLPPWACGFIMDTNSDPKNCPFQLCSPIRPPKYYTYKFAEGKLFEETGHEDPITKTSRVLRLEAKSKDGKLVPMTVFHKTDSEDLQKKPLLVHVYGAYGMDLKMNFRPERRVLVDDGWILAYCHVRGGGELGLQWHADGRLTKKLNGLADLEACIKTLHGQGFSQPSLTTLTAFSAGGVLAGALCNSNPELVRAVTLEAPFLDVLNTMMDTTLPLTLEELEEWGNPSSDEKHKNYIKRYCPYQNIKPQHYPSIHITAYENDERVPLKGIVSYTEKLKEAIAEHAKDTGEGYQTPNIILDIQPGGNHVIEDSHKKITAQIKFLYEELGLDSTSVFEDLKKYLKF

SEQ ID NO: 860957 - protein, 727 aa, Homo sapiens; identical to SEQ ID NO: 860949

SEQ ID NO: 860958 - protein, 638 aa, Homo sapiens; identical to SEQ ID NO: 860945

SEQ ID NO: 860959 - protein, 228 aa, Homo sapiens
STKTFLPFNFRGGGELGLQWHADGRLTKKLNGLADLEACIKTLHGQGFSQPSLTTLTAFSAGGVLAGALCNSNPELVRAVTLEAPFLDVLNTMMDTTLPLTLEELEEWGNPSSDEKHKNYIKRYCPYQNIKPQHYPSIHITAYENDERVPLKGIVSYTEKLKEAIAEHAKDTGEGYQTPNIILDIQPGGNHVIEDSHKKITAQIKFLYEELGLDSTSVFEDLKKYLKF

SEQ ID NO: 860960 - protein, 539 aa, Homo sapiens
MDAFEKVRTKLETQPQEEYEIINVEVKHGGFVYYQEGCCLVRSKDEEADNDNYEVLFNLEELKLDQPFIDCIRVAPDEKYVAAKIRTEDSEASTCVIIKLSDQPVMEASFPNVSSFEWVKDEEDEDVLFYTFQRNLRCHDVYRATFGDNKRNERFYTEKDPSYFVFLYLTKDSRFLTINIMNKTTSEVWLIDGLSPWDPPVLIQKRIHGVLYYVEHRDDELYILTNVGEPTEFKLMRTAADTPAIMNWDLFFTMKRNTKVIDLDMFKDHCVLFLKHSNLLYVNVIGLADDSVRSLKLPPWACGFIMDTNSDPKNCPFQLCSPIRPPKYYTYKFAEGKLFEETGHEDPITKTSRVLRLEAKSKDGKLVPMTVFHKTDSEDLQKKPLLVHVYGAYGMDLKMNFRPERRVLVDDGWILAYCHVRGGGELGLQWHADGRLTKKLNGLADLEACIKTLHGQGFSQPSLTTLTAFSAGGVLAGALCNSNPELVRAVTLEAPFLDVFNPMMGPTLPLTLKKLKEWGDPSFDEKPKNYPTPEPTTLY

SEQ ID NO: 860961 - protein, 82 aa, Homo sapiens
RGGGELGLQWHADGRLTKKLNGLADLEACIKTLHGQGFSQPSLTTLTAFSAGGVLAGALCNSNPELVRAVTLEVSTLCLYCL

SEQ ID NO: 860962 - protein, 108 aa, Homo sapiens [sequence omitted]

SEQ ID NO: 860963 - protein, 77 aa, Homo sapiens
AAAPEVMRTPGGAQGAGSGAAAASSPAAGEPLQRERRAGAECGLARQVRAEVTKWIGVNRRPRKRKRREKEEVFEKF

SEQ ID NO: 860964 - protein, 181 aa, Homo sapiens
MRMRRPLAGGGKSWGIAHFYKPLQRERRAGAECGLARQVRAEVTKWIGVNRRPRKRKRREKEEVFEKLLPDQLVLLLEHLLEQKTLSPRTLQSLQRTYHLQDQDAEVRHRWCELIVKHKFTKAYKSVERFLQEDQAMGVYLYGELMVSEDARQQQLARRCFERTKEQMDRSSAQVVAEMLF

SEQ ID NO: 860965 - protein, 720 aa, Homo sapiens
MDIQLDPARDDLPLMANTSHILVKHYVLDLDVDFESQVIEGTIVLFLEDGNRFKKQNSSIEEACQSESNKACKFGMPEPCHIPVTNARTFSSEMEYNDFAICSKGEKDTSDKDGNHDNQEHASGISSSKYCCDTGNHGSEDFLLVLDCCDLSVLKVEEVDVAAVPGLEKFTRSPELTVVSEEFRNQIVRELVTLPANRWREQLDYYARCSQAPGCGELLFDTDTWSLQIRKTGAQTATDFPHAIRIWYKTKPEGRSVTWTSDQSGRPCVYTVGSPINNRALFPCQEPPVAMSTWQATVRAAASFVVLMSGENSAKPTQLWEECSSWYYYVTMPMPASTFTIAVGCWTEMKMETWSSNDLATERPFSPSEANFRHVGVCSHMEYPCRFQNASATTQEIIPHRVFAPVCLTGACQETLLRLIPPCLSAAHSVLGAHPFSRLDVLIVPANFPSLGMARPSKDKTGHTSDSGASVIKHGLNPEKIFMQVHYLKGYFLLRFLAKRLGDETYFSFLRKFVHTFHGQLILSQDFLQMLLENIPEEKRLELSVENIYQDWLESSGIPKPLQRERRAGAECGLARQVRAEVTKWIGVNRRPRKRKRREKEEVFEKLLPDQLVLLLEHLLEQKTLSPRTLQSLQRTYHLQDQDAEVRHRWCELIVKHKFTKAYKSVERFLQEDQAMGVYLYGELMVSEDARQQQLARRCFERTKEQMDRSSAQVVAEMLF

SEQ ID NO: 860966 - protein, 168 aa, Homo sapiens
MQHTHTRGRTTQSTHSTHHTAHAPHRAHAAHTAHTAHAPRRAHTAHAAYTPNSARTTQSTRGTRSTHTTQSTWSTHSTHTTQSTRGTHTTHSACTTQSTHSTCTTRSAHTACSTHTTHSACTTQSTCGTHSTHRTHHTEHMWHTQCTHHTAPAAHTAHVAYGLHDPVS

SEQ ID NO: 860967 - protein, 181 aa, Homo sapiens; identical to SEQ ID NO: 860964

SEQ ID NO: 860968 - protein, 221 aa, Homo sapiens
MRMRRPLAGGGKSWGIAHFYKPLQRERRAGAECGLARQVRAEVTKWIGVNRRPRKRKRREKEEVFEKLLPDQLVLLLEHLLEQKTLSPRTLQSLQRTYHLQDQDAEVRHRWCELIVKHKFTKAYKSVERFLQEDQERPQQDSFIRLLLAWGTRLELTLDIKGGIMWLLKPSAHSPVHVLVLLFPRGWSQPGTHKRQILVNAASLPGGCLLPWIWSGAALRF

SEQ ID NO: 860969 - protein, 181 aa, Homo sapiens; identical to SEQ ID NO: 860964

SEQ ID NO: 860970 - protein, 180 aa, Homo sapiens
RGREAGAAPAVNLTVSSSPEPLQRERRAGAECGLARQVRAEVTKWIGVNRRPRKRKRREKEEVFEKLLPDQLVLLLEHLLEQKTLSPRTLQSLQRTYHLQDQDAEVRHRWCELIVKHKFTKAYKSVERFLQEDQAMGVYLYGELMVSEDARQQQLARRCFERTKEQMDRSSAQVVAEMLF

SEQ ID NO: 860971 - protein, 760 aa, Homo sapiens
MDIQLDPARDDLPLMANTSHILVKHYVLDLDVDFESQVIEGTIVLFLEDGNRFKKQNSSIEEACQSESNKACKFGMPEPCHIPVTNARTFSSEMEYNDFAICSKGEKDTSDKDGNHDNQEHASGISSSKYCCDTGNHGSEDFLLVLDCCDLSVLKVEEVDVAAVPGLEKFTRSPELTVVSEEFRNQIVRELVTLPANRWREQLDYYARCSQAPGCGELLFDTDTWSLQIRKTGAQTATDFPHAIRIWYKTKPEGRSVTWTSDQSGRPCVYTVGSPINNRALFPCQEPPVAMSTWQATVRAAASFVVLMSGENSAKPTQLWEECSSWYYYVTMPMPASTFTIAVGCWTEMKMETWSSNDLATERPFSPSEANFRHVGVCSHMEYPCRFQNASATTQEIIPHRVFAPVCLTGACQETLLRLIPPCLSAAHSVLGAHPFSRLDVLIVPANFPSLGMARPSKDKTGHTSDSGASVIKHGLNPEKIFMQVHYLKGYFLLRFLAKRLGDETYFSFLRKFVHTFHGQLILSQDFLQMLLENIPEEKRLELSVENIYQDWLESSGIPKPLQRERRAGAECGLARQVRAEVTKWIGVNRRPRKRKRREKEEVFEKLLPDQLVLLLEHLLEQKTLSPRTLQSLQRTYHLQDQDAEVRHRWCELIVKHKFTKAYKSVERFLQEDQERPQQDSFIRLLLAWGTRLELTLDIKGGIMWLLKPSAHSPVHVLVLLFPRGWSQPGTHKRQILVNAASLPGGCLLPWIWSGAALRF

SEQ ID NO: 860972 - protein, 181 aa, Homo sapiens; identical to SEQ ID NO: 860964

SEQ ID NO: 860973 - protein, 114 aa, Homo sapiens
IQGHRRRNCDFVRVLFTRPSNQKGQANTRSGAIKKVHTKDKSSREKVTYLAGSGLGFLQPRARSPDGTSPALPPGEACSRLRLQGRGLGSTERSSLFFQTSWSCFWSISWSRRL

SEQ ID NO: 860974 - protein, 182 aa, Homo sapiens
MRMRRPLAGGGKSWGIAHFYKPLQRERRAGAECGLARQVRAEVTKWIGVNRRPRKRKRREKEEVFEKLLPDQLVLLLEHLLEQKTLSPRTLQSLQRTYHLQDQDAEVRHRWCELIVKHKFTKAYKSVERFLQEDQAMGVYLYGELMVSEDTNVQQGPCRPFSFPYLGALNSPRVYPFMPLVC

SEQ ID NO: 860975 - protein, 653 aa, Homo sapiens
MDIQLDPARDDLPLMANTSHILVKHYVLDLDVDFESQVIEGTIVLFLEDGNRFKKQNSSIEEACQSESNKACKFGMPEPCHIPVTNARTFSSEMEYNDFAICSKGEKDTSDKDGNHDNQEHASGISSSKYCCDTGNHGSEDFLLVLDCCDLSVLKVEEVDVAAVPGLEKFTRSPELTVVSEEFRNQIVRELVTLPANRWREQLDYYARCSQAPGCGELLFDTDTWSLQIRKTGAQTATDFPHAIRIWYKTKPEGRSVTWTSDQSGRPCVYTVGSPINNRALFPCQEPPVAMSTWQATVRAAASFVVLMSGENSAKPTQLWEECSSWYYYVTMPMPASTFTIAVGCWTEMKMETWSSNDLATERPFSPSEANFRHVGVCSHMEYPCRFQNASATTQEIIPHRVFAPVCLTGACQETLLRLIPPCLSAAHSVLGAHPFSRLDVLIVPANFPSLGMARPSKDKTGHTSDSGASVIKHGLNPEKIFMQVHYLKGYFLLRFLAKRLGDETYFSFLRKFVHTFHGQLILSQDFLQMLLENIPEEKRLELSVENIYQDWLESSGIPKPLQRERRAGAECGLARQVRAEVTKWIGVNRRPRKRKRREKEEVFEKLLPDQLVLLLEHLLEQKTLSPRTLQSLQRTYHLQDQDAEVTRNTLGV

SEQ ID NO: 860976 - protein, 164 aa, Homo sapiens
ALQIVVGTAVVALNLKGLECEAHVETLRHLDPPDADFAGPVIVWVVGRLNVAIVLFHITPADGFVDCKEALSNPIAAAAEFNPEAAPEEKAKKDYFCLDLLNRIFTFLGTPDGVQGHRREEIRHCYRTLALGSDYSMGGEKRVVASDCCRFCLSFLFFFVSNLF

SEQ ID NO: 860977 - protein, 109 aa, Homo sapiens
GHQRRDYVAAKAIGPQPCSRLGASLSQRLVPARHTQKADSRKRSLPPWRLPPALDLEWSCSEILSSSAEMIKYIQETLENLLNILHWSAQHMAGCGYFYNSRKSHSSSV

SEQ ID NO: 860978 - protein, 349 aa, Homo sapiens
MDIQLDPARDDLPLMANTSHILVKHYVLDLDVDFESQVIEGTIVLFLEDGNRFKKQNSSIEEACQSESNKACKFGMPEPCHIPVTNARTFSSEMEYNDFAICSKGEKDTSDKDGNHDNQEHASGISSSKYCCDTGNHGSEDFLLVLDCCDLSVLKVEEVDVAAVPGLEKFTRSPELTVVSEEFRNQIVRELVTLPANRWREQLDYYARCSQAPGCGELLFDTDTWSLQIRKTGAQTATDFPHAIRIWYKTKPEGRSVTWTSDQSGRPCVYTVGSPINNRALFPCQEPPVAMSTWQATVRAAASFVVLMSGENSAKPTQLWEGTVHVFFAYLCIAHMWTQEPNKQYFSKL

SEQ ID NO: 860979 - protein, 707 aa, Homo sapiens
MDIQLDPARDDLPLMANTSHILVKHYVLDLDVDFESQVIEGTIVLFLEDGNRFKKQNSSIEEACQSESNKACKFGMPEPCHIPVTNARTFSSEMEYNDFAICSKGEKDTSDKDGNHDNQEHASGISSSKYCCDTGNHGSEDFLLVLDCCDLSVLKVEEVDVAAVPGLEKFTRSPELTVVSEEFRNQIVRELVTLPANRWREQLDYYARCSQAPGCGELLFDTDTWSLQIRKTGAQTATDFPHAIRIWYKTKPEGRSVTWTSDQSGRPCVYTVGSPINNRALFPCQEPPVAMSTWQATVRAAASFVVLMSGENSAKPTQLWEECSSWYYYVTMPMPASTFTIAVGCWTEMKMETWSSNDLATERPFSPSEANFRHVGVCSHMEYPCRFQNASATTQEIIPHRVFAPVCLTGACQETLLRLIPPCLSAAHSVLGAHPFSRLDVLIVPANFPSLGMARPSKDKTGHTSDSGASVIKHGLNPEKIFMQVHYLKGYFLLRFLAKRLGDETYFSFLRKFVHTFHGQLILSQDFLQMLLENIPEEKRLELSVENIYQDWLESSGIPKPLQRERRAGAECGLARQVRAEVTKWIGVNRRPRKRKRREKEEVFEKLLPDQLVLLLEHLLEQKTLSPRTLQSLQRTYHLQDQDAEVRHRWCELIVKHKFTKAYKSVERFLQEDQGRCHLSADGDSVKAVPALHTGIHVLGISFITNN

SEQ ID NO: 860980 - protein, 274 aa, Homo sapiens
MCFGPQHSRPSKDKTGHTSDSGASVIKHGLNPEKIFMQVHYLKGYFLLRFLAKRLGDETYFSFLRKFVHTFHGQLILSQDFLQMLLENIPEEKRLELSVENIYQDWLESSGIPKPLQRERRAGAECGLARQVRAEVTKWIGVNRRPRKRKRREKEEVFEKLLPDQLVLLLEHLLEQKTLSPRTLQSLQRTYHLQDQDAEVRHRWCELIVKHKFTKAYKSVERFLQEDQAMGVYLYGELMVSEDARQQQLARRCFERTKEQMDRSSAQVVAEMLF

SEQ ID NO: 860981 - protein, 168 aa, Homo sapiens; identical to SEQ ID NO: 860966

SEQ ID NO: 860982 - protein, 168 aa, Homo sapiens; identical to SEQ ID NO: 860966

SEQ ID NO: 860983 - protein, 181 aa, Homo sapiens; identical to SEQ ID NO: 860964

SEQ ID NO: 860984 - protein, 69 aa, Homo sapiens
DFLRVRLQRTSWATPGGALLCFRRGAGNGAWMLPFAGLLSQALPLQGQSWDMSVAFSDVGGELACSASC

SEQ ID NO: 860985 - protein, 181 aa, Homo sapiens; identical to SEQ ID NO: 860964

SEQ ID NO: 860986 - protein, 152 aa, Homo sapiens
ARGAAVTKVAAPAVTKWIGVNRRPRKRKRREKEEVFEKLLPDQLVLLLEHLLEQKTLSPRTLQSLQRTYHLQDQDAEVRHRWCELIVKHKFTKAYKSVERFLQEDQAMGVYLYGELMVSEDARQQQLARRCFERTKEQMDRSSAQVVAEMLF

SEQ ID NO: 860987 - protein, 224 aa, Homo sapiens
MRTPGWAQGAGSGAAAASSPAAGEPLQRERRAGAECGLARQVRAEVTKWIGVNRRPRKRKRREKEEVFEKLLPDQLVLLLEHLLEQKTLSPRTLQSLQRTYHLQDQDAEVRHRWCELIVKHKFTKAYKSVERFLQEDQERPQQDSFIRLLLAWGTRLELTLDIKGGIMWLLKPSAHSPVHVLVLLFPRGWSQPGTHKRQILVNAASLPGGCLLPWIWSGAALRF

SEQ ID NO: 860988 - protein, 217 aa, Homo sapiens [sequence omitted]

SEQ ID NO: 860989 - protein, 146 aa, Homo sapiens
MRMRRPLAGGGKSWGIAHFYKPLQRERRAGAECGLARQVRAEVTKWIGVNRRPRKRKRREKEEVFEKLLPDQLVLLLEHLLEQKTLSPRTLQSLQRTYHLQDQDAEVRHRWCELIVKHKFTKAYKSVERFLQEDQKKVQNAGPSVT

SEQ ID NO: 860990 - protein, 646 aa, Homo sapiens
MDIQLDPARDDLPLMANTSHILVKHYVLDLDVDFESQVIEGTIVLFLEDGNRFKKQNSSIEEACQSESNKACKFGMPEPCHIPVTNARTFSSEMEYNDFAICSKGEKDTSDKDGNHDNQEHASGISSSKYCCDTGNHGSEDFLLVLDCCDLSVLKVEEVDVAAVPGLEKFTRSPELTVVSEEFRNQIVRELVTLPANRWREQLDYYARCSQAPGCGELLFDTDTWSLQIRKTGAQTATDFPHAIRIWYKTKPEGRSVTWTSDQSGRPCVYTVGSPINNRALFPCQEPPVAMSTWQATVRAAASFVVLMSGENSAKPTQLWEECSSWYYYVTMPMPASTFTIAVGCWTEMKMETWSSNDLATERPFSPSEANFRHVGVCSHMEYPCRFQNASATTQEIIPHRVFAPVCLTGACQETLLRLIPPCLSAAHSVLGAHPFSRLDVLIVPANFPSLGMARPSKDKTGHTSDSGASVIKHGLNPEKIFMQVHYLKGYFLLRFLAKRLGDETYFSFLRKFVHTFHGQLILSQDFLQMLLENIPEEKRLELSVENIYQDWLESSGIPKPLQRERRAGAECGLARQVRAEVTKWIGVNRRPRKRKRREKEEVFEKTLNWSHLRNRERRRKKWITFKTLGGILFTVKQMRNLFAQV

SEQ ID NO: 860991 - protein, 83 aa, Homo sapiens
ALYHHGARGAGERIPPPPPPTPPPPPPPLPLLTHSESLASLPGVGAVRVCARRPLARSNPRACLPGLRRRTPISASGSGRFRS

SEQ ID NO: 860992 - protein, 353 aa, Homo sapiens
MSTLLLNLDFGEPPPKKALEGNAKHRNFVKKRRLLERRGFLSKKNQPPSKAPKLHSEPSKKGETPTVDGTWKTPSFPKKKTAASSNGSGQPLDKKAAVSWLTPAPSKKADSVAAKVDLLGEFQSALPKINSHPTRSQKKSSQKKSSKKNHPQKNAPQNSTQAHSENKCSGASQKLPRKMVAIDCEMVGTGPKGHVSSLARCSIVNYNGDVLYDEYILPPCHIVDYRTRWSGIRKQHMVNATPFKIARGQILKILTGKIVVGHAIHNDFKALQYFHPKSLTRDTSHIPPLNRKADCPENATMSLKHLTKKLLNRDIQVGKSGHSSVEDAQATMELYKLVEVEWEEHLARNPPTD

SEQ ID NO: 860993 - protein, 353 aa, Homo sapiens; identical to SEQ ID NO: 860992

SEQ ID NO: 860994 - protein, 353 aa, Homo sapiens; identical to SEQ ID NO: 860992

SEQ ID NO: 860995 - protein, 312 aa, Homo sapiens
MSTLLLNLDFGEPPPKKALEGNAKHRNFVKKRRLLERRGFLSKKNQPPSKAPKLHSEPSKKGETPTVDGTWKTPSFPKKKTAASSNGSGQPLDKKAAVSWLTPAPSKKADSVAAKVDLLGEFQSALPKINSHPTRSQKKSSQKKSSKKNHPQKNAPQNSTQAHSENKCSGASQKLPRKMVAIDCEMVGTGPKGHVSSLARCSIVNYNGDVLYDEYILPPCHIVDYRTRWSGIRKQHMVNATPFKIARGQILKILTGKIVVGHAIHNDFKALQYFHPKSLTRDAGDMRRQRQHPGETGQWTNGQLHQLHIFGS

SEQ ID NO: 860996 - protein, 138 aa, Homo sapiens
MSPNRVYHGNHLWKRKVDSRRKKTCGSEHFKDGEILKILTGKIVVGHAIHNDFKALQYFHPKSLTRDTSHIPPLNRKADCPENATMSLKHLTKKLLNRDIQVGKSGHSSVEDAQATMELYKLVEVEWEEHLARNPPTD

SEQ ID NO: 860997 - protein, 175 aa, Homo sapiens [sequence omitted]

SEQ ID NO: 860998 - protein, 413 aa, Homo sapiens
MSTLLLNLDFGEPPPKKALEGNAKHRNFVKKRRLLERRGFLSKKNQPPSKAPKLHSEPSKKGETPTVDGTWKTPSFPKKKTAASSNGSGQPLDKKAAVSWLTPAPSKKADSVAAKVDLLGEFQSALPKINSHPTRSQKKSSQKKSSKKNHPQKNAPQNSTQAHSENKCSGASQKLPRKMVAIDCEMVGTGPKGHVSSLARCSIVNYNGDVLYDEYILPPCHIVDYRTRWSGIRKQHMVNATPFKIARGQILKILTGKIVVGHAIHNDFKALQYFHPKSLTRDTSHIPPLNRKADCPENATMSLKHLTKKLLNRDIQWEELRSELMAAEQEDDVEGVCKPLSAAGEHKTLRVRGPCLHPSEHHVSGPRSPRRITAGPQRCIWERWGRWQARVPLARTLVPTLPPPRSTCSVSAL

SEQ ID NO: 860999 - protein, 353 aa, Homo sapiens; identical to SEQ ID NO: 860992

SEQ ID NO: 861000 - protein, 353 aa, Homo sapiens; identical to SEQ ID NO: 860992

SEQ ID NO: 861001 - protein, 353 aa, Homo sapiens; identical to SEQ ID NO: 860992

SEQ ID NO: 861002 - protein, 488 aa, Homo sapiens
MNFTPTHTPVCRKRTVVSKRGVAVSGPTKRRGMADSLESTPLPSPEDRLAKLHPSKELLEYYQKKMAECEAENEDLLKKLELYKEACEGQHKLECDLQQREEEIAELQKALSDMQVCLFQEREHVLRLYSENDRLRIRELEDKKKIQNLLALVGTDAGEVTYFCKEPPHKVTILQKTIQAVGECEQSESSAFKADPKISKRRPSRERKESSEHYQRDIQTLILQVEALQAQLGEQTKLSREQIEGLIEDRRIHLEEIQVQHQRNQNKIKELTKNLHHTQELLYESTKDFLQLRSENQNKEKSWMLEKDNLMSKIKQYRVQCKKKEDKIGKVLPVMHESHHAQSEYIKSLKDKLVQEKKLSNMYQEQCISLEEELARIREEEGMRREIFKDRTNKMGKRLQIMTKRYEALERRRILEVEGFKTDIKVLRQKLKDLEQMLYKATVNARANQDLALLCEVRDSNRRAHKIQGELKNLKSKVFGLENELRLC

SEQ ID NO: 861003 - protein, 276 aa, Homo sapiens
MNFTPTHTPVCRKRTVVSKRGVAVSGPTKRRGMADSLESTPLPSPEDRLAKLHPSKELLEYYQKKMAECEAENEDLLKKLELYKEACEGQHKLECDLQQREEEIAELQKALSDMQVCLFQEREHVLRLYSENDRLRIRELEDKKKIQNLLALVGTDAGEVTYFCKEPPHKVTILQKTIQAVGECEQSESSAFKADPKISKRRPSRERKESSEHYQRDIQTLILQVEALQAQLGEQTKLSREQIEGLIEDRRIHLEEIQVQHQRNQNKIKELTKNGS

SEQ ID NO: 861004 - protein, 456 aa, Homo sapiens
MADSLESTPLPSPEDRLAKLHPSKELLEYYQKKMAECEAENEDLLKKLELYKEACEGQHKLECDLQQREEEIAELQKALSDMQVCLFQEREHVLRLYSENDRLRIRELEDKKKIQNLLALVGTDAGEVTYFCKEPPHKVTILQKTIQAVGECEQSESSAFKADPKISKRRPSRERKESSEHYQRDIQTLILQVEALQAQLGEQTKLSREQIEGLIEDRRIHLEEIQVQHQRNQNKIKELTKNLHHTQELLYESTKDFLQLRSENQNKEKSWMLEKDNLMSKIKQYRVQCKKKEDKIGKVLPVMHESHHAQSEYIKSLKDKLVQEKKLSNMYQEQCISLEEELARIREEEGMRREIFKDRTNKMGKRLQIMTKRYEALERRRILEVEGFKTDIKVLRQKLKDLEQMLYKATVNARANQDLALLCEVRDSNRRAHKIQGELKNLKSKVFGLENELRLC

SEQ ID NO: 861005 - protein, 498 aa, Homo sapiens
CGCLSPCPPKFCPVQRLHAARPWRTVVSKRGVAVSGPTKRRGMADSLESTPLPSPEDRLAKLHPSKELLEYYQKKMAECEAENEDLLKKLELYKEACEGQHKLECDLQQREEEIAELQKALSDMQVCLFQEREHVLRLYSENDRLRIRELEDKKKIQNLLALVGTDAGEVTYFCKEPPHKVTILQKTIQAVGECEQSESSAFKADPKISKRRPSRERKESSEHYQRDIQTLILQVEALQAQLGEQTKLSREQIEGLIEDRRIHLEEIQVQHQRNQNKIKELTKNLHHTQELLYESTKDFLQLRSENQNKEKSWMLEKDNLMSKIKQYRVQCKKKEDKIGKVLPVMHESHHAQSEYIKSLKDKLVQEKKLSNMYQEQCISLEEELARIREEEGMRREIFKDRTNKMGKRLQIMTKRYEALERRRILEVEGFKTDIKVLRQKLKDLEQMLYKATVNARANQDLALLCEVRDSNRRAHKIQGELKNLKSKVFGLENELRLC

SEQ ID NO: 861006 - protein, 395 aa, Homo sapiens
MNFTPTHTPVCRKRTVVSKRGVAVSGPTKRRGMADSLESTPLPSPEDRLAKLHPSKELLEYYQKKMAECEAENEDLLKKLELYKEACEGQHKLECDLQQREEEIAELQKALSDMQVCLFQEREHVLRLYSENDRLRIRELEDKKKIQNLLALVGTDAGEVTYFCKEPPHKVTILQKTIQAVGECEQSESSAFKADPKISKRRPSRERKESSEHYQRDIQTLILQVEALQAQLGEQTKLSREQIEGLIEDRRIHLEEIQVQHQRNQNKIKELTKNLHHTQELLYESTKDFLQLRSENQNKEKSWMLEKDNLMSKIKQYRVQCKKKEDKIGKVLPVMHESHHAQSEYIKATVNARANQDLALLCEVRDSNRRAHKIQGELKNLKSKVFGLENELRLC

SEQ ID NO: 861007 - protein, 136 aa, Homo sapiens
LLRDCTDSGTLSGAAPLLGLTFVFQLRSLTRSLSVSRTVVSKRGVAVSGPTKRRGMADSLESTPLPSPEDRLAKLHPSKELLEYYQKKMAECEAENEDLLKKLELYKEACEGQHKLECDLQQREEEIAELQKAILK

SEQ ID NO: 861008 - protein, 374 aa, Homo sapiens
MNFTPTHTPVCRKRTVVSKRGVAVSGPTKRRGMADSLESTPLPSPEDRLAKLHPSKELLEYYQKKMAECEAENEDLLKKLELYKEACEGQHKLECDLQQREEEIAELQKALSDMQVCLFQEREHVLRLYSENDRLRIRELEDKKKIQNLLALVGTDAGEVTYFCKEPPHKVTILQKTIQAVGECEQSESSAFKADPKISKRRPSRERKESSEHYQRDIQTLILQVEALQAQLGEQTKLSREQIEGLIEDRRIHLEEIQVQHQRNQNKIKELTKNLHHTQELLYESTKDFLQLRSENQNKEKSWMLEKDNLMSKIKQYRVQCKKKEDKIGKVLPVMHESHHAQSEYIKVMSLCRNEVVYFSGRVEGIPKNLQFVM

SEQ ID NO: 861009 - protein, 511 aa, Homo sapiens
LLRDCTDSGTLSGAAPLLGLTFVFQLRSLTRSLSVSRTVVSKRGVAVSGPTKRRGMADSLESTPLPSPEDRLAKLHPSKELLEYYQKKMAECEAENEDLLKKLELYKEACEGQHKLECDLQQREEEIAELQKALSDMQVCLFQEREHVLRLYSENDRLRIRELEDKKKIQNLLALVGTDAGEVTYFCKEPPHKVTILQKTIQAVGECEQSESSAFKADPKISKRRPSRERKESSEHYQRDIQTLILQVEALQAQLGEQTKLSREQIEGLIEDRRIHLEEIQVQHQRNQNKIKELTKNLHHTQELLYESTKDFLQLRSENQNKEKSWMLEKDNLMSKIKQYRVQCKKKEDKIGKVLPVMHESHHAQSEYIKSLKDKLVQEKKLSNMYQEQCISLEEELARIREEEGMRREIFKDRTNKMGKRLQIMTKRYEALERRRILEVEGFKTDIKVLRQKLKDLEQMLYKATVNARANQDLALLCEVRDSNRRAHKIQGELKNLKSKVFGLENELRLC

SEQ ID NO: 861010 - protein, 529 aa, Homo sapiens
LLRDCTDSGTLSGAAPLLGLTFVFQLRSLTRSLSVSCEKDSMNFTPTHTPVCRKRTVVSKRGVAVSGPTKRRGMADSLESTPLPSPEDRLAKLHPSKELLEYYQKKMAECEAENEDLLKKLELYKEACEGQHKLECDLQQREEEIAELQKALSDMQVCLFQEREHVLRLYSENDRLRIRELEDKKKIQNLLALVGTDAGEVTYFCKEPPHKVTILQKTIQAVGECEQSESSAFKADPKISKRRPSRERKESSEHYQRDIQTLILQVEALQAQLGEQTKLSREQIEGLIEDRRIHLEEIQVQHQRNQNKIKELTKNLHHTQELLYESTKDFLQLRSENQNKEKSWMLEKDNLMSKIKQYRVQCKKKEDKIGKVLPVMHESHHAQSEYIKSLKDKLVQEKKLSNMYQEQCISLEEELARIREEEGMRREIFKDRTNKMGKRLQIMTKRYEALERRRILEVEGFKTDIKVLRQKLKDLEQMLYKATVNARANQDLALLCEVRDSNRRAHKIQGELKNLKSKVFGLENELRLC

SEQ ID NO: 861011 - protein, 127 aa, Homo sapiens [sequence omitted]

SEQ ID NO: 861012 - protein, 488 aa, Homo sapiens; identical to SEQ ID NO: 861002

SEQ ID NO: 861013 - protein, 89 aa, Homo sapiens
PPISGSLAQGWSAGGLQVQSGKCESSVLGYSATCLPDMGRWRVSSVESWPFASTGGKLAIATAGTGTQAAPRPFLIRPPDSWALALALM

SEQ ID NO: 861014 - protein, 89 aa, Homo sapiens; identical to SEQ ID NO: 861013

SEQ ID NO: 861015 - protein, 89 aa, Homo sapiens; identical to SEQ ID NO: 861013

SEQ ID NO: 861016 - protein, 89 aa, Homo sapiens; identical to SEQ ID NO: 861013

SEQ ID NO: 861017 - protein, 125 aa, Homo sapiens
MWVPTKIPPLSPQLLTPGSESHSVSQAGVLWHRVGSLQPPSPGFKQFSCLSLQSSWDYRCPPPHPANFFIFLVDTGFHHVGQAGLELVTSGDAPALASQSAGITGPDFEQISLEIEQSCAWIPPQ

SEQ ID NO: 861018 - protein, 99 aa, Homo sapiens
MWVPTKIPPLSPQLLTPGSGKVDATVFTDSSSFLEKGLRKAGAAVTMETDVLWAQALPANTSAQKAELIALTQALRWGKDINVNTDSRYAFATVHVRGA

SEQ ID NO: 861019 - protein, 80 aa, Homo sapiens
ALPFPEAWRKVRHLEAPARNVTGRNVTGREPGPLCAPPEGQPACRGECHLKKKFPGPQRVTVFRRTADRLPCGCPQKFHL

SEQ ID NO: 861020 - protein, 89 aa, Homo sapiens; identical to SEQ ID NO: 861013

SEQ ID NO: 861021 - protein, 95 aa, Homo sapiens
PPISGSLAQGWSAGGLQVQSGKCESVRHLEAPARNVTGRNVTGREPGPLCAPPEGQPACRGECHLKKKFPGPQRVTVFRRTADRLPCGCPQKFHL

SEQ ID NO: 861022 - protein, 141 aa, Homo sapiens
TESCSVAQAGVQWRDLGSLQESASQIHAIFPPQPPGVAEKYRLPPPRPANFFIFLVDTGFHHVGQAGLELVTSGDAPALASQSAGITGGCLAKGLIFLKGFPQEGKSQTYSGKSCLFILLGPDFEQISLEIEQSCAWIPPQ

SEQ ID NO: 861023 - protein, 89 aa, Homo sapiens; identical to SEQ ID NO: 861013

SEQ ID NO: 861024 - protein, 89 aa, Homo sapiens; identical to SEQ ID NO: 861013

SEQ ID NO: 861025 - protein, 89 aa, Homo sapiens; identical to SEQ ID NO: 861013

SEQ ID NO: 861026 - protein, 89 aa, Homo sapiens; identical to SEQ ID NO: 861013

SEQ ID NO: 861027 - protein, 53 aa, Homo sapiens
METDVLWAQALPANTSAQKAELIALTQALRWGKDINVNTDSRYAFATVHVRGA

SEQ ID NO: 861028 - protein, 141 aa, Homo sapiens; identical to SEQ ID NO: 861022

SEQ ID NO: 861029 - protein, 1232 aa, Homo sapiens
MKEEVKGIPVRVALRCRPLVPKEISEGCQMCLSFVPGEPQVVVGTDKSFTYDFVFDPSTEQEEVFNTAVAPLIKGVFKGYNATVLAYGQTGSGKTYSMGGAYTAEQENEPTVGVIPRVIQLLFKEIDKKSDFEFTLKVSYLEIYNEEILDLLCPSREKAQINIREDPKEGIKIVGLTEKTVLVALDTVSCLEQGNNSRTVASTAMNSQSSRSHAIFTISLEQRKKSDKNSSFRSKLHLVDLAGSERQKKTKAEGDRLKEGININRGLLCLGNVISALGDDKKGGFVPYRDSKLTRLLQDSLGGNSHTLMIACVSPADSNLEETLNTLRYADRARKIKNKPIVNIDPQTAELNHLKQQVQQLQVLLLQAHGGTLPGSITVEPSENLQSLMEKNQSLVEENEKLSRGLSEAAGQTAQMLERIILTEQANEKMNAKLEELRQHAACKLDLQKLVETLEDQELKENVEIICNLQQLITQLSDETVACMAAAIDTAVEQEAQVETSPETSRSSDAFTTQHALRQAQMSKELVELNKALALKEALARKMTQNDSQLQPIQYQYQDNIKELELEVINLQKEKEELVLELQTAKKDANQAKLSERRRKRLQELEGQIADLKKKLNEQSKLLKLKESTERTVSKLNQEIRMMKNQRVQLMRQMKEDAEKFRQWKQKKDKEVIQLKERDRKRQYELLKLERNFQKQSNVLRRKTEEAAAANKRLKDALQKQREVADKRKETQSRGMEGTAARVKNWLGNEIEVMVSTEEAKRHLNDLLEDRKILAQDVAQLKEKKESGENPPPKLRRRTFSLTEVRGQVSESEDSITKQIESLETEMEFRSAQIADLQQKLLDAESEDRPKQRWENIATILEAKCALKYLIGELVSSKIQVSKLESSLKQSKTSCADMQKMLFEERNHFAEIETELQAELVRMEQQHQEKVLYLLSQLQQSQMAEKQLEESVSEKEQQLLSTLKCQDEELEKMREVCEQNQQLLRENEIIKQKLTLLQVASRQKHLPKDTLLSPDSSFEYVPPKPKPSRVKEKFLEQSMDIEDLKYCSEHSVNEHEDGDGDDDEGDDEEWKPTKLVKVSRKNIQGCSCKGWCGNKQCGCRKQKSDCGVDCCCDPTKCRNRQQGKDSLGTVERTQDSEGSFKLEDPTEVTPGLSFFNPVCATPNSKILKEMCDVEQVLSKKTPPAPSPFDLPELKHVATEYQENKAPGKKKKRALASNTSFFSGCSPIEEEAH

SEQ ID NO: 861030 - protein, 1232 aa, Homo sapiens; identical to SEQ ID NO: 861029

SEQ ID NO: 861031 - protein, 1232 aa, Homo sapiens; identical to SEQ ID NO: 861029

SEQ ID NO: 861032 - protein, 844 aa, Homo sapiens
MEKNQSLVEENEKLSRGLSEAAGQTAQMLERIILTEQANEKMNAKLEELRQHAACKLDLQKLVETLEDQELKENVEIICNLQQLITQLSDETVACMAAAIDTAVEQEAQVETSPETSRSSDAFTTQHALRQAQMSKELVELNKALALKEALARKMTQNDSQLQPIQYQYQDNIKELELEVINLQKEKEELVLELQTAKKDANQAKLSERRRKRLQELEGQIADLKKKLNEQSKLLKLKESTERTVSKLNQEIRMMKNQRVQLMRQMKEDAEKFRQWKQKKDKEVIQLKERDRKRQYELLKLERNFQKQSNVLRRKTEEAAAANKRLKDALQKQREVADKRKETQSRGMEGTAARVKNWLGNEIEVMVSTEEAKRHLNDLLEDRKILAQDVAQLKEKKESGENPPPKLRRRTFSLTEVRGQVSESEDSITKQIESLETEMEFRSAQIADLQQKLLDAESEDRPKQRWENIATILEAKCALKYLIGELVSSKIQVSKLESSLKQSKTSCADMQKMLFEERNHFAEIETELQAELVRMEQQHQEKVLYLLSQLQQSQMAEKQLEESVSEKEQQLLSTLKCQDEELEKMREVCEQNQQLLRENEIIKQKLTLLQVASRQKHLPKDTLLSPDSSFEYVPPKPKPSRVKEKFLEQSMDIEDLKYCSEHSVNEHEDGDGDDDEGDDEEWKPTKLVKVSRKNIQGCSCKGWCGNKQCGCRKQKSDCGVDCCCDPTKCRNRQQGKDSLGTVERTQDSEGSFKLEDPTEVTPGLSFFNPVCATPNSKILKEMCDVEQVLSKKTPPAPSPFDLPELKHVATEYQENKAPGKKKKRALASNTSFFSGCSPIEEEAH

SEQ ID NO: 861033 - protein, 419 aa, Homo sapiens
MKEEVKGIPVRVALRCRPLVPKEISEGCQMCLSFVPGEPQVVVGTDKSFTYDFVFDPSTEQEEVFNTAVAPLIKGVFKGYNATVLAYGQTGSGKTYSMGGAYTAEQENEPTVGVIPRVIQLLFKEIDKKSDFEFTLKVSYLEIYNEEILDLLCPSREKAQINIREDPKEGIKIVGLTEKTVLVALDTVSCLEQGNNSRTVASTAMNSQSSRSHAIFTISLEQRKKSDKNSSFRSKLHLVDLAGSERQKKTKAEGDRLKEGININRGLLCLGNVISALGDDKKGGFVPYRDSKLTRLLQDSLGGNSHTLMIACVSPADSNLEETLNTLRYADRARKIKNKPIVNIDPQTAELNHLKQQVQQLQVLLLQAHGGTLPGSITYVKHNGSKSQSYTKRYTQSREMQIKTPMRYHLMPIRMATVK

SEQ ID NO: 861034 - protein, 1232 aa, Homo sapiens; identical to SEQ ID NO: 861029

SEQ ID NO: 861035 - protein, 1232 aa, Homo sapiens; identical to SEQ ID NO: 861029

SEQ ID NO: 861036 - protein, 1232 aa, Homo sapiens; identical to SEQ ID NO: 861029

SEQ ID NO: 861037 - protein, 623 aa, Homo sapiens
  misc_feature (599)..(599): Xaa can be any naturally occurring amino acid
MKEEVKGIPVRVALRCRPLVPKEISEGCQMCLSFVPGEPQVVVGTDKSFTYDFVFDPSTEQEEVFNTAVAPLIKGVFKGYNATVLAYGQTGSGKTYSMGGAYTAEQENEPTVGVIPRVIQLLFKEIDKKSDFEFTLKVSYLEIYNEEILDLLCPSREKAQINIREDPKEGIKIVGLTEKTVLVALDTVSCLEQGNNSRTVASTAMNSQSSRSHAIFTISLEQRKKSDKNSSFRSKLHLVDLAGSERQKKTKAEGDRLKEGININRGLLCLGNVISALGDDKKGGFVPYRDSKLTRLLQDSLGGNSHTLMIACVSPADSNLEETLNTLRYADRARKIKNKPIVNIDPQTAELNHLKQQVQQLQVLLLQAHGGTLPGSITVEPSENLQSLMEKNQSLVEENEKLSRGLSEAAGQTAQMLERIILTEQANEKMNAKLEELRQHAACKLDLQKLVETLEDQELKENVEIICNLQQLITQLSDETVACMAAAIDTAVEQEAQVETSPETSRSSDAFTTQHALRQAQMSKELVELNKALALKEALARKMTQNDSQLQPIQYQYQDNIKELELEVINLQKEKEELVLELQTAKKDANQAKLSEPAXNVSELRQCCLKKLMTANFELRSRR

SEQ ID NO: 861038 - protein, 185 aa, Homo sapiens
ANNSISCNRQSGVKVEAQCKVELRGNGIYDNRGHGIITKGDSTIVIENDIIGNRGSGLQLLPRSDTKVIKNRIHSFRAYGIAVRGRAKALVQENIIFQGKTSKTIFQQISNNRECIMQNNKFLVFKKKSDTWRLVNPPARPHLENSLRRPSAAHNGQKVTAMATRITARVEGGYHSNRSVFCTIL

SEQ ID NO: 861039 - protein, 228 aa, Homo sapiens
ANNSISCNRQSGVKVEAQCKVELRGNGIYDNRGHGIITKGDSTIVIENDIIGNRGSGLQLLPRSDTKVIKNRIHSFRAYGIAVRGRAKALVQENIIFQGKTSKTIFQQISNNRECIMQNNKFLVFKKKLSAWGCLNESSRATVSSLKKPGPHPGIVAARAPCNPASCRLQSEKGLCLALCQARAEDSPGGNKLFKSQGYVVSDLSSAGYWLCDLGQLTSHLRALVKSI

SEQ ID NO: 861040 - protein, 185 aa, Homo sapiens; identical to SEQ ID NO: 861038

SEQ ID NO: 861041 - protein, 185 aa, Homo sapiens; identical to SEQ ID NO: 861038

SEQ ID NO: 861042 - protein, 121 aa, Homo sapiens
MRLAGGEAAAGRAADSGGLGHIPGADRSPAGVTGSFAECSTAPSRSWRRWPGRTERRGCSAVLARWPSGAADAAAPLPGAVAALDGAVGPRRRLRVALEPHLGDDAAPPALHAVPAAGAAR

SEQ ID NO: 861043 - protein, 169 aa, Homo sapiens
MCRATLGLPLPPIVIQPARRSLPPIVTPASRRLGPRGGRHLGSVSTAMAATQELLLQLQKDNRDGRQRKQELEKLMRGLEAESESLPQPAPAGPERAGAEAAAEAKPGSAASARGGARGGAGARAAGAQKTGGGGAPQGGLGEEESWNGAGPRVGWGRAGGRGQDPGVG

SEQ ID NO: 861044 - protein, 169 aa, Homo sapiens; identical to SEQ ID NO: 861043

SEQ ID NO: 861045 - protein, 213 aa, Homo sapiens
MRLAGGEAAAGRAADSGGLGHIPGADRSPAGAAPLRRQGASRLSSPRPGAVSLPTHRQDASPRPQSALSPAPGGAGEGDGGCGGAGRLAEWPGTVRELGLRARRGTVGPGRAGLPPACLSPAGVTGSFAECSTAPSRSWRRWPGRTERRGCSAVLARWPSGAADAAAPLPGAVAALDGAVGPRRRLRVALEPHLGDDAAPPALHAVPAAGAAR

SEQ ID NO: 861046 - protein, 213 aa, Homo sapiens; identical to SEQ ID NO: 861045

SEQ ID NO: 861047 - protein, 131 aa, Homo sapiens
MEEMARADRVSACAGPGGVGWSGTPLPIPPAVPPPPPPGNRAGAAGAEVDWMRPSLPAGDAAVRRSSRAGHQALLTLPLLFLGLSLLWTVLLDPGAVSAWLWSLTSETTLRRLRYTLSPLLELRANGLLPT

SEQ ID NO: 861048 - protein, 129 aa, Homo sapiens
MPVPAGVTGSFAECSTAPSRSWRRWPGRTERRGCSAVLARWPSGEQGGGAAAVPHVPARAAAHLPAFALQALLTLPLLFLGLSLLWTVLLDPGAVSAWLWSLTSETTLRRLRYTLSPLLELRANGLLPT

SEQ ID NO: 861049 - protein, 121 aa, Homo sapiens; identical to SEQ ID NO: 861042

SEQ ID NO: 861050 - protein, 169 aa, Homo sapiens; identical to SEQ ID NO: 861043

SEQ ID NO: 861051 - protein, 105 aa, Homo sapiens
MAFECGWGRACRPAPAESNPGVHTQDALQTAEAWAIFQEQTVVLQVRPHSDAKVPPASPPPDLGRCDGQLRRVQYSTESLMEEMARADRETRLFGGPRALAIRRC

SEQ ID NO: 861052 - protein, 131 aa, Homo sapiens; identical to SEQ ID NO: 861047

SEQ ID NO: 861053 - protein, 131 aa, Homo sapiens
MEEMARADRVSACAGPGGVGWSGTPLPIPPAVPPPPPPGNRAGAAGAEVAWMRPSLPAGDAAVRRSSRAGHQALLTLPLLFLGLSLLWTVLLDPGAVSAWLWSLTSETTLRRLRYTLSPLLELRANGLLPT

SEQ ID NO: 861054 - protein, 989 aa, Homo sapiens
APGPALLKMAADSEPESEVFEITDFTTASEWERFISKVEEVLNDWKLIGNSLGKPLEKGIFTSGTWEEKSDEISFADFKFSVTHHYLVQESTDKEGKDELLEDVVPQSMQDLLGMNNDFPPRAHCLVRWYGLREFVVIAPAAHSDAVLSESKCNLLLSSVSIALGNTGCQVPLFVQIHHKWRRMYVGECQGPGVRTDFEMVHLRKVPNQYTHLSGLLDIFKSKIGCPLTPLPPVSIAIRFTYVLQDWQQYFWPQQPPDIDALVGGEVGGLEFGKLPFGACEDPISELHLATTWPHLTEGIIVDNDVYSDLDPIQAPHWSVRVRKAENPQCLLGDFVTEFFKICRRKESTDEILGRSAFEEEGKETADITHALSKLTEPASVPIHKLSVSNMVHTAKKKIRKHRGVEESPLNNDVLNTILLFLFPDAVSEKPLDGTTSTDNNNPPSESEDYNLYNQFKSAPSDSLTYKLALCLCMINFYHGGLKGVAHLWQEFVLEMRFRWENNFLIPGLASGPPDLRCCLLHQKLQMLNCCIERKKARDEGKKTSASDVTNIYPGDAGKAGDQLVPDNLKETDKEKGEVGKSWDSWSDSEEEFFECLSDTEELKGNGQESGKKGGPKEMANLRPEGRLYQHGKLTLLHNGEPLYIPVTQEPAPMTEDLLEEQSEVLAKLGTSAEGAHLRARMQSACLLSDMESFKAANPGCSLEDFVRWYSPRDYIEEEVIDEKGNVVLKGELSARMKIPSNMWVEAWETAKPIPARRQRRLFDDTREAEKVLHYLAIQKPADLARHLLPCVIHAAVLKVKEEESLENISSVKKIIKQIISHSSKVLHFPNPEDKKLEEIIHQITNVEALIARARSLKAKFGTEKCEQEEEKEDLERFVSCLLEQPEVLVTGAGRGHAGRIIHKLFVNAQRAAAMTPPEEELKRMGSPEERRQNSVSDFPPPAGREFILRTTVPRPAPYSKALPQRMYSVLTKEDFRLAGAFSSDTSFF

SEQ ID NO: 861055 - protein, 998 aa, Homo sapiens
APGPALLKMAADSEPESEVFEITDFTTASEWERFISKVEEVLNDWKLIGNSLGKPLEKGIFTSGTWEEKSDEISFADFKFSVTHHYLVQESTDKEGKDELLEDVVPQSMQDLLGMNNDFPPRAHCLVRWYGLREFVVIAPAAHSDAVLSESKCNLLLSSVSIALGNTGCQVPLFVQIHHKWRRMYVGECQGPGVRTDFEMVHLRKVPNQYTHLSGLLDIFKSKIGCPLTPLPPVSIAIRFTYVLQDWQQYFWPQQPPDIDALVGGEVGGLEFGKLPFGACEDPISELHLATTWPHLTEGIIVDNDVYSDLDPIQAPHWSVRVRKAENPQCLLGDFVTEFFKICRRKESTDEILGRSAFEEEGKETADITHALSKLTEPASVPIHKLSVSNMVHTAKKKIRKHRGVEESPLNNDVLNTILLFLFPDAVSEKPLDGTTSTDNNNPPSESEDYNLYNQFKSAPSDSLTYKLALCLCMINFYHGGLKGVAHLWQEFVLEMRFRWENNFLIPGLASGPPDLRCCLLHQKLQMLNFALGFRFFFGQNAQRKARDEGKKTSASDVTNIYPGDAGKAGDQLVPDNLKETDKEKGEVGKSWDSWSDSEEEFFECLSDTEELKGNGQESGKKGGPKEMANLRPEGRLYQHGKLTLLHNGEPLYIPVTQEPAPMTEDLLEEQSEVLAKLGTSAEGAHLRARMQSACLLSDMESFKAANPGCSLEDFVRWYSPRDYIEEEVIDEKGNVVLKGELSARMKIPSNMWVEAWETAKPIPARRQRRLFDDTREAEKVLHYLAIQKPADLARHLLPCVIHAAVLKVKEEESLENISSVKKIIKQIISHSSKVLHFPNPEDKKLEEIIHQITNVEALIARARSLKAKFGTEKCEQEEEKEDLERFVSCLLEQPEVLVTGAGRGHAGRIIHKLFVNAQRAAAMTPPEEELKRMGSPEERRQNSVSDFPPPAGREFILRTTVPRPAPYSKALPQRMYSVLTKEDFRLAGAFSSDTSFF

SEQ ID NO: 861056 - protein, 842 aa, Homo sapiens
APGPALLKMAADSEPESEVFEITDFTTASEWERFISKVEEVLNDWKLIGNSLGKPLEKGIFTSGTWEEKSDEISFADFKFSVTHHYLVQESTDKEGKDELLEDVVPQSMQDLLGMNNDFPPRAHCLVRWYGLREFVVIAPAAHSDAVLSESKCNLLLSSVSIALGNTGCQVPLFVQIHHKWRRMYVGECQGPGVRTDFEMVHLRKVPNQYTHLSGLLDIFKSKIGCPLTPLPPVSIAIRFTYVLQDWQQYFWPQQPPDIDALVGGEVGGLEFGKLPFGACEDPISELHLATTWPHLTEGIIVDNDVYSDLDPIQAPHWSVRVRKAENPQCLLGDFVTEFFKICRRKESTDEILGRSAFEEEGKETADITHALSKLTEPASVPIHKLSVSNMVHTAKKKIRKHRGVEESPLNNDVLNTILLFLFPDAVSEKPLDGTTSTDNNNPPSESEDYNLYNQFKSAPSDSLTYKLALCLCMINFYHGGLKGVAHLWQEFVLEMRFRWENNFLIPGLASGPPDLRCCLLHQKLQMLNCCIERKKARDEGKKTSASDVTNIYPGDAGKAGDQLVPDNLKETDKEKGEVGKSWDSWSDSEEEFFECLSDTEELKGNGQESGKKGGPKEMANLRPEGRLYQHGKLTLLHNGEPLYIPVTQEPAPMTEDLLEEQSEVLAKLGTSAEGAHLRARMQSACLLSDMESFKAANPGCSLEDFVRWYSPRDYIEEEVIDEKGNVVLKGELSARMKIPSNMWVEAWETAKPIPARRQRRLFDDTREAEKVLHYLAIQKPADLARHLLPCVIHAAVLKVKEEESLENISSVKKIIKQIISHSSKVLHFPNPEDKKLEVSLM

SEQ ID NO: 861057 - protein, 980 aa, Homo sapiens
APGPALLKMAADSEPESEVFEITDFTTASEWERFISKVEEVLNDWKLIGNSLGKPLEKGIFTSGTWEEKSDEISFADFKFSVTHHYLVQESTDKEGKDELLEDVVPQSMQDLLGMNNDFPPRAHCLVRWYGLREFVVIAPAAHSDAVLSESKCNLLLSSVSIALGNTGCQVPLFVQIHHKWRRMYVGECQGPGVRTDFEMVHLRKVPNQYTHLSGLLDIFKSKIGCPLTPLPPVSIAIRFTYVLQDWQQYFWPQQPPDIDALVGGEVGGLEFGKLPFGACEDPISELHLATTWPHLTEGIIVDNDVYSDLDPIQAPHWSVRVRKAENPQCLLGDFVTEFFKICRRKESTDEILGRSAFEEEGKETADITHALSKLTEPASVPIHKLSVSNMVHTAKKKIRKHRGVEESPLNNDVLNTILLFLFPDAVSEKPLDGTTSTDNNNPPSESEDYNLYNQFKSAPSDSLTYKLALCLCMINFYHGGLKGVAHLWQEFVLEMRFRWENNFLIPGLASGPPDLRCCLLHQKLQMLNCCIERKKARDEGKKTSASDVTNIYPGDAGKAGDQLVPDNLKETDKEKGEVGKSWDSWSDSEEEFFECLSDTEELKGNGQESGKKGGPKEMANLRPEGRLYQHGKLTLLHNGEPLYIPVTQEPAPMTEDLLEEQSEVLAKLGTSAEGAHLRARMQSACLLSDMESFKAANPGCSLEDFVRWYSPRDYIEEEVIDEKGNVVLKGELSARMKIPSNMWVEAWETAKPIPARRQRRLFDDTREAEKVLHYLAIQKPADLARHLLPCVIHAAVLKVKEEESLENISSVKKIIKQIISHSSKVLHFPNPEDKKLEEIIHQITNVEALIARARSLKAKFGTEKCEQEEEKEDLERFVSCLLEQPEVLVTGAGRGHAGRIIHKLFVNAQRAAAMTPPEEELKRMGSPEERRQNSVSDFPPPAGREFILRTTVPRPAPYSKALPQRMYSVLTKEDFRLAG

SEQ ID NO: 861058 - protein, 917 aa, Homo sapiens
APGPALLKMAADSEPESEVFEITDFTTASEWERFISKVEEVLNDWKLIGNSLGKPLEKGIFTSGTWEEKSDEISFADFKFSVTHHYLVQESTDKEGKDELLEDVVPQSMQDLLGMNNDFPPRAHCLVRWYGLREFVVIAPAAHSDAVLSESKCNLLLSSVSIALGNTGCQVPLFVQIHHKWRRMYVGECQGPGVRTDFEMVHLRKVPNQYTHLSGLLDIFKSKIGCPLTPLPPVSIAIRFTYVLQDWQQYFWPQQPPDIDALVGGEVGGLEFGKLPFGACEDPISELHLATTWPHLTEGIIVDNDVYSDLDPIQAPHWSVRVRKAENPQCLLGDFVTEFFKICRRKESTDEILGRSAFEEEGKETADITHALSKLTEPASVPIHKLSVSNMVHTAKKKIRKHRGVEESPLNNDVLNTILLFLFPDAVSEKPLDGTTSTDNNNPPSESEDYNLYNQFKSAPSDSLTYKLALCLCMINFYHGGLKGVAHLWQEFVLEMRFRWENNFLIPGLASGPPDLRCCLLHQKLQMLNCCIERKKARDEGKKTSASDVTNIYPGDAGKAGDQLVPDNLKETDKEKGEVGKSWDSWSDSEEEFFECLSDTEELKGNGQESGKKGGPKEMANLRPEGRLYQHGKLTLLHNGEPLYIPVTQEPAPMTEDLLEEQSEVLAKLGTSAEGAHLRARMQSACLLSDMESFKAANPGCSLEDFVRWYSPRDYIEEEVIDEKGNVVLKGELSARMKIPSNMWVEAWETAKPIPARRQRRLFDDTREAEKVLHYLAIQKPADLARHLLPCVIHAAVLKVKEEESLENISSVKKIIKQIISHSSKVLHFPNPEDKKLEEIIHQITNVEALIARARSLKAKFGTEKCEQEEEKEDLERFVSCLLEQPEVLVTGAGRGHAGRIIHKLFVNAQRVCESHY

SEQ ID NO: 861059 - protein, 812 aa, Homo sapiens
APGPALLKMAADSEPESEVFEITDFTTASEWERFISKVEEVLNDWKLIGNSLGKPLEKGIFTSGTWEEKSDEISFADFKFSVTHHYLVQESTDKEGKDELLEDVVPQSMQDLLGMNNDFPPRAHCLVRWYGLREFVVIAPAAHSDAVLSESKCNLLLSSVSIALGNTGCQVPLFVQIHHKWRRMYVGECQGPGVRTDFEMVHLRKVPNQYTHLSGLLDIFKSKIGCPLTPLPPVSIAIRFTYVLQDWQQYFWPQQPPDIDALVGGEVGGLEFGKLPFGACEDPISELHLATTWPHLTEGIIVDNDVYSDLDPIQAPHWSVRVRKAENPQCLLGDFVTEFFKICRRKESTDEILGRSAFEEEGKETADITHALSKLTEPASVPIHKLSVSNMVHTAKKKIRKHRGVEESPLNNDVLNTILLFLFPDAVSEKPLDGTTSTDNNNPPSESEDYNLYNQFKSAPSDSLTYKLALCLCMINFYHGGLKGVAHLWQEFVLEMRFRWENNFLIPGLASGPPDLRCCLLHQKLQMLNCCIERKKARDEGKKTSASDVTNIYPGDAGKAGDQLVPDNLKETDKEKGEVGKSWDSWSDSEEEFFECLSDTEELKGNGQESGKKGGPKEMANLRPEGRLYQHGKLTLLHNGEPLYIPVTQEPAPMTEDLLEEQSEVLAKLGTSAEGAHLRARMQSACLLSDMESFKAANPGCSLEDFVRWYSPRDYIEEEVIDEKGNVVLKGELSARMKIPSNMWVEAWETAKPIPARRQRRLFDDTREAEKVLHYLAIQKPADLARHLLPCVIHAAVLKVKEEASDRNMSAI

SEQ ID NO: 861060 - protein, 500 aa, Homo sapiens
APGPALLKMAADSEPESEVFEITDFTTASEWERFISKVEEVLNDWKLIGNSLGKPLEKGIFTSGTWEEKSDEISFADFKFSVTHHYLVQESTDKEGKDELLEDVVPQSMQDLLGMNNDFPPRAHCLVRWYGLREFVVIAPAAHSDAVLSESKCNLLLSSVSIALGNTGCQVPLFVQIHHKWRRMYVGECQGPGVRTDFEMVHLRKVPNQYTHLSGLLDIFKSKIGCPLTPLPPVSIAIRFTYVLQDWQQYFWPQQPPDIDALVGGEVGGLEFGKLPFGACEDPISELHLATTWPHLTEGIIVDNDVYSDLDPIQAPHWSVRVRKAENPQCLLGDFVTEFFKICRRKESTDEILGRSAFEEEGKETADITHALSKLTEPASVPIHKLSVSNMVHTAKKKIRKHRGVEESPLNNDVLNTILLFLFPDAVSEKPLDGTTSTDNNNPPSESEDYNLYNQFKSAPSDSLTYKLALCLCMINFYHGGLKGVAHLWSSGREFSSSRA

SEQ ID NO: 861061 - protein, 989 aa, Homo sapiens; identical to SEQ ID NO: 861054

SEQ ID NO: 861062 - protein, 962 aa, Homo sapiens
APGPALLKMAADSEPESEVFEITDFTTASEWERFISKVEEVLNDWKLIGNSLGKPLEKGIFTSGTWEEKSDEISFADFKFSVTHHYLVQESTDKEGKDELLEDVVPQSMQDLLGMNNDFPPRAHCLVRWYGLREFVVIAPAAHSDAVLSESKCNLLLSSVSIALGNTGCQVPLFVQIHHKWRRMYVGECQGPGVRTDFEMVHLRKVPNQYTHLSGLLDIFKSKIGCPLTPLPPVSIAIRFTYVLQDWQQYFVASATSSELHLATTWPHLTEGIIVDNDVYSDLDPIQAPHWSVRVRKAENPQCLLGDFVTEFFKICRRKESTDEILGRSAFEEEGKETADITHALSKLTEPASVPIHKLSVSNMVHTAKKKIRKHRGVEESPLNNDVLNTILLFLFPDAVSEKPLDGTTSTDNNNPPSESEDYNLYNQFKSAPSDSLTYKLALCLCMINFYHGGLKGVAHLWQEFVLEMRFRWENNFLIPGLASGPPDLRCCLLHQKLQMLNCCIERKKARDEGKKTSASDVTNIYPGDAGKAGDQLVPDNLKETDKEKGEVGKSWDSWSDSEEEFFECLSDTEELKGNGQESGKKGGPKEMANLRPEGRLYQHGKLTLLHNGEPLYIPVTQEPAPMTEDLLEEQSEVLAKLGTSAEGAHLRARMQSACLLSDMESFKAANPGCSLEDFVRWYSPRDYIEEEVIDEKGNVVLKGELSARMKIPSNMWVEAWETAKPIPARRQRRLFDDTREAEKVLHYLAIQKPADLARHLLPCVIHAAVLKVKEEESLENISSVKKIIKQIISHSSKVLHFPNPEDKKLEEIIHQITNVEALIARARSLKAKFGTEKCEQEEEKEDLERFVSCLLEQPEVLVTGAGRGHAGRIIHKLFVNAQRAAAMTPPEEELKRMGSPEERRQNSVSDFPPPAGREFILRTTVPRPAPYSKALPQRMYSVLTKEDFRLAGAFSSDTSFF

SEQ ID NO: 861063 - protein, 124 aa, Homo sapiens
MKGHLQVYSLFGENTVHPLRQSFVVTGAGRGHAGRIIHKLFVNAQRAAAMTPPEEELKRMGSPEERRQNSVSDFPPPAGREFILRTTVPRPAPYSKALPQRMYSVLTKEDFRLAGAFSSDTSFF

SEQ ID NO: 861064 - protein, 980 aa, Homo sapiens; identical to SEQ ID NO: 861057

SEQ ID NO: 861065 - protein, 344 aa, Homo sapiens
APGPALLKMAADSEPESEVFEITDFTTASEWERFISKVEEVLNDWKLIGNSLGKPLEKGIFTSGTWEEKSDEISFADFKFSVTHHYLVQESTDKEGKDELLEDVVPQSMQDLLGMNNDFPPRAHCLVRWYGLREFVVIAPAAHSDAVLSESKCNLLLSSVSIALGNTGCQVPLFVQIHHKWRRMYVGECQGPGVRTDFEMVHLRKVPNQYTHLSGLLDIFKSKIGCPLTPLPPVSIAIRFTYVLQDWQQYFWPQQPPDIDALVGGEVGGLEFGKLPFGACEDPISELHLATTWPHLTEGIIVDNDVYSDLDPIQAPHWSVRVRKAENPQCLLGDFVTEFFKIAV

SEQ ID NO: 861066 - protein, 103 aa, Homo sapiens
RPQRLGRLGFPLPPRTPKDTPNPRPAGPALARPKYYLAQASARGTPKLPMYPAPEGLHSQEVPMYPNTGRHPAPPSQTRKKVNLTTTYSPKTTYFVLAGLPAT

SEQ ID NO: 861067 - protein, 347 aa, Homo sapiens
TGSGVRRKRWQPHSPLGGRGARPWGGESPAPQVRAMGRRRAARGPGAEGGRPRHLPTRSLEAFAEEVGAALQASVEPGAADGEGGPGPAALPCTLAMWELGHCDPRRCTGRKLARLGLVRCLRLGHRFGGLVLSPVGKQYASPADRQLVAQSGVAVIDCSWARLDETPFGKMRGSHLRLLPYLVAANPVNYGRPYRLSCVEAFAATFCIVGFPDLAVILLRKFKWGKGFLDLNRQLLDKYAACGSPEEVLQAEQEFLANAKESPQEEEIDPFDVDSGREFGNPNRPVASTRLPSDTDDSDASEDPGPGAERGGASSSCCEEEQTQGRGAEARAPAEVWKGIKKRQRD

SEQ ID NO: 861068 - protein, 219 aa, Homo sapiens
TGSGVRRKRWQPHSPLGGRGARPWGGESPAPQVRAMGRRRAARGPGAEGGRPRHLPTRSLEAFAEEVGAALQASVEPGAADGEGGPGPAALPCTLAMWELGHCDPRRCTGRKLARLGLVRCLRLGHRFGGLVLSPVGKQYASPADRQLVAQSGVAVIDCSWARLDETPFGKMRGSHLRLLPYLVAANPVNYGRPYRLSCVEAFAATFCIVGESSGPTAV

SEQ ID NO: 861069 - protein, 306 aa, Homo sapiens
TGSGVRRKRWQPHSPLGGRGARPWGGESPAPQVRAMGRRRAARGPGAEGGRPRHLPTRSLEAFAEEVGAALQASVEPGAADGEGGPGPAALPCTLAMWELGHCDPRRCTGRKLARLGLVRCLRLGHRFGGLVLSPLRLLPYLVAANPVNYGRPYRLSCVEAFAATFCIVGFPDLAVILLRKFKWGKGFLDLNRQLLDKYAACGSPEEVLQAEQEFLANAKESPQEEEIDPFDVDSGREFGNPNRPVASTRLPSDTDDSDASEDPGPGAERGGASSSCCEEEQTQGRGAEARAPAEVWKGIKKRQRD

SEQ ID NO: 861070 - protein, 317 aa, Homo sapiens
MARYEAGCRKMAALRALCGFRGVAAQVLRPGAGVRLPIQPSRGVRQWQPDVEWAQQFGGAVMYPSKETAHWKPPPWNDVDPPKDTIVKNITLNFGPQHPAAHGVLRLVMELSGEMVRKCDPHIGLLHRGTEKLIEYKTYLQALPYFDRLDYVSMMCNEQAYSLAVEKLLNIRPPPRAQWIRVLFGEITRLLNHIMAVTTHALDLGAMTPFFWLFEEREKMFEFYERVSGARMHAAYIRPGGVHQTYLGFGALSVLDSLFGESGECDHMDLGNGPAWRVRTKTYLVGGARQDQDANPFFTDESGPGKPGGSPHVKRAD

SEQ ID NO: 861071 - protein, 463 aa, Homo sapiens
MAALRALCGFRGVAAQVLRPGAGVRLPIQPSRGVRQWQPDVEWAQQFGGAVMYPSKETAHWKPPPWNDVDPPKDTIVKNITLNFGPQHPAAHGVLRLVMELSGEMVRKCDPHIGLLHRGTEKLIEYKTYLQALPYFDRLDYVSMMCNEQAYSLAVEKLLNIRPPPRAQWIRVLFGEITRLLNHIMAVTTHALDLGAMTPFFWLFEEREKMFEFYERVSGARMHAAYIRPGGVHQDLPLGLMDDIYQFSKNFSLRLDELEELLTNNRIWRNRTIDIGVVTAEEALNYGFSGVMLRGSGIQWDLRKTQPYDVYDQVEFDVPVGSRGDCYDRYLCRVEEMRQSLRIIAQCLNKMPPGEIKVDDAKVSPPKRAEMKTSMESLIHHFKLYTEGYQVPPGATYTAIEAPKGEFGVYLVSDGSSRPYRCKIKAPGFAHLAGLDKMSKGHMLADVVAIIGTQDIVFGEVDR

SEQ ID NO: 861072 - protein, 463 aa, Homo sapiens; identical to SEQ ID NO: 861071

SEQ ID NO: 861073 - protein, 457 aa, Homo sapiens
MAALRALCGFRGVAAQVLRPGAGVRLPIQPSRGVRQWQPDVEWAQQFGGAVMYPSKETAHWKPPPWNDVDPPKDTIVKNITLNFGPQHPAAHGVLRLVMELSGEMVRKCDPHIGLLHRGTEKLIEYKTYLQALPYFDRLDYVSMMCNEQAYSLAVEKLLNIRPPPRAQWIRVLFGEITRLLNHIMAVTTHALDLGAMTPFFWLFEEREKMFEFYERVSGARMHAAYIRPGGVHQDLPLGLMDDIYQFSKNFSLRLDELEELLTNNRIWRNRTIDIGVVTAEEALNYGFSGVMLRGSGIQWDLRKTQPYDVYDQVEFDVPVGSRGDCYDRYLCRVEEMRQSLRIIAQCLNKMPPGEIKVDDAKVSPPKRAEMKTSMESLIHHFKLYTEGYQVPPGATYTAIEAPKGEFGVYLVSDGSSRPYRCKIKAPGFAHLAGLDKMSKGHMLADVVAIIGTRPIV

SEQ ID NO: 861074 - protein, 484 aa, Homo sapiens
MAALRALCGFRGVAAQVLRPGAGVRLPIQPSRGVRQWQPDVEWAQQFGGAVMYPSKETAHWKPPPWNDVDPPKDTIVKNITLNFGPQHPAAHGVLRLVMELSGEMVRKCDPHIGLLHRGTEKLIEYKTYLQALPYFDRLDYVSMMCNEQAYSLAVEKLLNIRPPPRAQWIRVLFGEITRLLNHIMAVTTHALDLGAMTPFFWLFEEREKMFEFYERVSGARMHAAYIRPGGVHQDLPLGLMDDIYQFSKNFSLRLDELEELLTNNRIWRNRTIDIGVVTAEEALNYGFSGVMLRGSGIQWDLRKTQPYDVYDQVEFDVPVGSRGDCYDRYLCRVEEMRQSLRIIAQCLNKMPPGEIKVDDAKVSPPKRAEMKSFTLIAQTGVQSRLTATSASQTSMESLIHHFKLYTEGYQVPPGATYTAIEAPKGEFGVYLVSDGSSRPYRCKIKAPGFAHLAGLDKMSKGHMLADVVAIIGTQDIVFGEVDR

SEQ ID NO: 861075 - protein, 366 aa, Homo sapiens
MAALRALCGFRGVAAQVLRPGAGVRLPIQPSRGVRQWQPDVEWAQQFGGAVMYPSKETAHWKPPPWNDVDPPKDTIVKNITLNFGPQHPAAHGVLRLVMELSGEMVRKCDPHIGLLHRGTEKLIEYKTYLQALPYFDRLDYVSMMCNEQAYSLAVEKLLNIRPPPRAQWIRVLFGEITRLLNHIMAVTTHALDLGAMTPFFWLFEEREKMFEFYERVSGARMHAAYIRPGGVHQDLPLGLMDDIYQFSKNFSLRLDELEELLTNNRIWRNRTIDIGVVTAEEALNYGFSGVMLRGSGIQWDLRKTQPYDVYDQVEFDVPVGSRGDCYDRYLCRVEEMRQSLRIIAQCLNKMPRPHCWLVLTGILIE

SEQ ID NO: 861076 - protein, 437 aa, Homo sapiens
MAALRALCGFRGVAAQVLRPGAGVRLPIQPSRGVRQWQPDVEWAQQFGGAVMYPSKETAHWKPPPWNDVDPPKDTIVKNITLNFGPQHPAAHGVLRLVMELSGEMVRKCDPHIGLLHRGTEKLIEYKTYLQALPYFDRLDYVSMMCNEQAYSLAVEKLLNIRPPPRAQWIRVLFGEITRLLNHIMAVTTHALDLGAMTPFFWLFEEREKMFEFYERVSGARMHAAYIRPGGVHQLLTNNRIWRNRTIDIGVVTAEEALNYGFSGVMLRGSGIQWDLRKTQPYDVYDQVEFDVPVGSRGDCYDRYLCRVEEMRQSLRIIAQCLNKMPPGEIKVDDAKVSPPKRAEMKTSMESLIHHFKLYTEGYQVPPGATYTAIEAPKGEFGVYLVSDGSSRPYRCKIKAPGFAHLAGLDKMSKGHMLADVVAIIGTQDIVFGEVDR

SEQ ID NO: 861077 - protein, 412 aa, Homo sapiens [sequence omitted]

SEQ ID NO: 861078 - protein, 365 aa, Homo sapiens
MELSGEMVRKCDPHIGLLHRGTEKLIEYKTYLQALPYFDRLDYVSMMCNEQAYSLAVEKLLNIRPPPRAQWIRVLFGEITRLLNHIMAVTTHALDLGAMTPFFWLFEEREKMFEFYERVSGARMHAAYIRPGGVHQDLPLGLMDDIYQFSKNFSLRLDELEELLTNNRIWRNRTIDIGVVTAEEALNYGFSGVMLRGSGIQWDLRKTQPYDVYDQVEFDVPVGSRGDCYDRYLCRVEEMRQSLRIIAQCLNKMPPGEIKVDDAKVSPPKRAEMKTSMESLIHHFKLYTEGYQVPPGATYTAIEAPKGEFGVYLVSDGSSRPYRCKIKAPGFAHLAGLDKMSKGHMLADVVAIIGTQDIVFGEVDR

SEQ ID NO: 861079 - protein, 424 aa, Homo sapiens
AGSLHLGMMWAVSLLGYITAHWKPPPWNDVDPPKDTIVKNITLNFGPQHPAAHGVLRLVMELSGEMVRKCDPHIGLLHRGTEKLIEYKTYLQALPYFDRLDYVSMMCNEQAYSLAVEKLLNIRPPPRAQWIRVLFGEITRLLNHIMAVTTHALDLGAMTPFFWLFEEREKMFEFYERVSGARMHAAYIRPGGVHQDLPLGLMDDIYQFSKNFSLRLDELEELLTNNRIWRNRTIDIGVVTAEEALNYGFSGVMLRGSGIQWDLRKTQPYDVYDQVEFDVPVGSRGDCYDRYLCRVEEMRQSLRIIAQCLNKMPPGEIKVDDAKVSPPKRAEMKTSMESLIHHFKLYTEGYQVPPGATYTAIEAPKGEFGVYLVSDGSSRPYRCKIKAPGFAHLAGLDKMSKGHMLADVVAIIGTQDIVFGEVDR

SEQ ID NO: 861080 - protein, 254 aa, Homo sapiens
MFEFYERVSGARMHAAYIRPGGVHQDLPLGLMDDIYQFSKNFSLRLDELEELLTNNRIWRNRTIDIGVVTAEEALNYGFSGVMLRGSGIQWDLRKTQPYDVYDQVEFDVPVGSRGDCYDRYLCRVEEMRQSLRIIAQCLNKMPPGEIKVDDAKVSPPKRAEMKTSMESLIHHFKLYTEGYQVPPGATYTAIEAPKGEFGVYLVSDGSSRPYRCKIKAPGFAHLAGLDKMSKGHMLADVVAIIGTQDIVFGEVDR

SEQ ID NO: 861081 - protein, 210 aa, Homo sapiens
MAALRALCGFRGVAAQVLRPGAGVRLPIQPSRGVRQWQPDVEWAQQFGGAVMYPSKETAHWKPPPWNDVDPPKDTIVKNITLNFGPQHPAAHGVLRLVMELSGEMVRKCDPHIGLLHRGTEKLIEYKTYLQALPYFDRLDYVSMMCNEQAYSLAVEKLLNIRPPPRAQWIRVLFGEITRLLNHIMAVTTHALDLGAMTPFFWLFEEREKR

SEQ ID NO: 861082 - protein, 192 aa, Homo sapiens
MAALRALCGFRGVAAQVLRPGAGVRLPIQPSRGVRQWQPDVEWAQQFGGAVMYPSKETAHWKPPPWNDVDPPKDTIVKNITLNFGPQHPAAHGVLRLVMELSGEMVRKCDPHIGLLHRGTEKLIEYKTYLQALPYFDRLDYVSMMCNEQAYSLAVEKLLNIRPPPRAQWIRDHGCDHTCPGPWGHDPFLLAV

SEQ ID NO: 861083 - protein, 31 aa, Homo sapiens
VLLLLCLIFLRYLCRVEEMRQSLRIIAQCLN

SEQ ID NO: 861084 - protein, 463 aa, Homo sapiens; identical to SEQ ID NO: 861071

SEQ ID NO: 861085 - protein, 463 aa, Homo sapiens; identical to SEQ ID NO: 861071

SEQ ID NO: 861086 - protein, 463 aa, Homo sapiens; identical to SEQ ID NO: 861071

SEQ ID NO: 861087 - protein, 444 aa, Homo sapiens
MAALRALCGFRGVAAQVLRPGAGVRLPIQPSRGVRQWQPDVEWAQQFGGAVMYPSKETAHWKPPPWNDVDPPKDTIVKNITLNFGPQHPAAHGVLRLVMELSGEMVRKCDPHIGLLHRGTEKLIEYKTYLQALPYFDRLDYVSMMCNEQAYSLAVEKLLNIRPPPRAQWIRVLFGEITRLLNHIMAVTTHALDLGAMTPFFWLFEEREKMFEFYERVSGARMHAAYIRPGGVHQDLPLGLMDDIYQFSKNFSLRLDELEELLTNNRIWRNRTIDIGVVTAEEALNYGFSGVMLRGSGIQWDLRKTQPYDVYDQVEFDVPVGSRGDCYDRYLCRVEEMRQSLRIIAQCLNKMPPGEIKVDDAKVSPPKRAEMKTSMESLIHHFKLYTEGYQVPPGATYTAIEAPKGEFGVYLVSAGLDKMSKGHMLADVVAIIGTQDIVFGEVDR

SEQ ID NO: 861088 - protein, 466 aa, Homo sapiens
MAALRALCGFRGVAAQVLRPGAGVRLPIQPSRGVRQWQPDVEWAQQFGGAVMYPSKETAHWKPPPWNDVDPPKDTIVKNITLNFGPQHPAAHGVLRLVMELSGEMVRKCDPHIGLLHRGTEKLIEYKTYLQALPYFDRLDYVSMMCNEQAYSLAVEKLLNIRPPPRAQWIRVLFGEITRLLNHIMAVTTHALDLGAMTPFFWLFEEREKMFEFYERVSGARMHAAYIRPGGVHQDLPLGLMDDIYQFSKNFSLRLDELEELLTNNRIWRNRTIDIGVVTAEEALNYGFSGVMLRGSGIQWDLRKTQPYDVYDQVEFDVPVGSRGDCYDRYLCRVEEMRQSLRIIAQCLNKMPPGEIKVDDAKVSPPKRAEMKTSMESLIHHFKLYTEGYQVPPGATYTAIEAPKGEFGVYLVSDGSSRPYRCKIKAPGFAHLVRINPSNYNSNELNLTLVEVFMNSSFSSHLASLN

SEQ ID NO: 861089 - protein, 305 aa, Homo sapiens
MAALRALCGFRGVAAQVLRPGAGVRLPIQPSRGVRQWQPDVEWAQQFGGAVMYPSKETAHWKPPPWNDVDPPKDTIVKNITLNFGPQHPAAHGVLRLVMELSGEMVRKCDPHIGLLHRGTEKLIEYKTYLQALPYFDRLDYVSMMCNEQAYSLAVEKLLNIRPPPRAQWIRVLFGEITRLLNHIMAVTTHALDLGAMTPFFWLFEEREKMFEFYERVSGARMHAAYIRPGGVHQDLPLGLMDDIYQFSKNFSLRLDELEELLTNNRIWMAAAALIDARSRLLVLPIWLVWTRCLRDTCWQMSLPS

SEQ ID NO: 861090 - protein, 459 aa, Homo sapiens
LGAQRVTGRIAFRSASRNCQTFVPLFRTGVRQWQPDVEWAQQFGGAVMYPSKETAHWKPPPWNDVDPPKDTIVKNITLNFGPQHPAAHGVLRLVMELSGEMVRKCDPHIGLLHRGTEKLIEYKTYLQALPYFDRLDYVSMMCNEQAYSLAVEKLLNIRPPPRAQWIRVLFGEITRLLNHIMAVTTHALDLGAMTPFFWLFEEREKMFEFYERVSGARMHAAYIRPGGVHQDLPLGLMDDIYQFSKNFSLRLDELEELLTNNRIWRNRTIDIGVVTAEEALNYGFSGVMLRGSGIQWDLRKTQPYDVYDQVEFDVPVGSRGDCYDRYLCRVEEMRQSLRIIAQCLNKMPPGEIKVDDAKVSPPKRAEMKTSMESLIHHFKLYTEGYQVPPGATYTAIEAPKGEFGVYLVSDGSSRPYRCKIKAPGFAHLAGLDKMSKGHMLADVVAIIGTQDIVFGEVDR

SEQ ID NO: 861091 - protein, 451 aa, Homo sapiens
MARYEAGCRKMAALRALCGFRGVAAQVLRPGAGVRLPIQPSRGDRVAAWKPPPWNDVDPPKDTIVKNITLNFGPQHPAAHGVLRLVMELSGEMVRKCDPHIGLLHRGTEKLIEYKTYLQALPYFDRLDYVSMMCNEQAYSLAVEKLLNIRPPPRAQWIRVLFGEITRLLNHIMAVTTHALDLGAMTPFFWLFEEREKMFEFYERVSGARMHAAYIRPGGVHQDLPLGLMDDIYQFSKNFSLRLDELEELLTNNRIWRNRTIDIGVVTAEEALNYGFSGVMLRGSGIQWDLRKTQPYDVYDQVEFDVPVGSRGDCYDRYLCRVEEMRQSLRIIAQCLNKMPPGEIKVDDAKVSPPKRAEMKTSMESLIHHFKLYTEGYQVPPGATYTAIEAPKGEFGVYLVSDGSSRPYRCKIKAPGFAHLAGLDKMSKGHMLADVVAIIGTQDIVFGEVDR

SEQ ID NO: 861092 - protein, 398 aa, Homo sapiens
MNDVDPPKDTIVKNITLNFGPQHPAAHGVLRLVMELSGEMVRKCDPHIGLLHRGTEKLIEYKTYLQALPYFDRLDYVSMMCNEQAYSLAVEKLLNIRPPPRAQWIRVLFGEITRLLNHIMAVTTHALDLGAMTPFFWLFEEREKMFEFYERVSGARMHAAYIRPGGVHQDLPLGLMDDIYQFSKNFSLRLDELEELLTNNRIWRNRTIDIGVVTAEEALNYGFSGVMLRGSGIQWDLRKTQPYDVYDQVEFDVPVGSRGDCYDRYLCRVEEMRQSLRIIAQCLNKMPPGEIKVDDAKVSPPKRAEMKTSMESLIHHFKLYTEGYQVPPGATYTAIEAPKGEFGVYLVSDGSSRPYRCKIKAPGFAHLAGLDKMSKGHMLADVVAIIGTQDIVFGEVDR

SEQ ID NO: 861093 - protein, 307 aa, Homo sapiens
MAALRALCGFRGVAAQVLRPGAGVRLPIQPSRGVRQWQPDVEWAQQFGGAVMYPSKETAHWKPPPWNDVDPPKDTIVKNITLNFGPQHPAAHGVLRLVMELSGEMVRKCDPHIGLLHRGTEKLIEYKTYLQALPYFDRLDYVSMMCNEQAYSLAVEKLLNIRPPPRAQWIRVLFGEITRLLNHIMAVTTHALDLGAMTPFFWLFEEREKMFEFYERVSGARMHAAYIRPGGVHQTYLGFGALSVLDSLFGESGECDHMDLGNGPAWRVRTKTYLVGGARQDQDANPFFTDESGPGKPGGSPHVKRAD

SEQ ID NO: 861094 - protein, 246 aa, Homo sapiens
MAALRALCGFRGVAAQVLRPGAGVRLPIQPSRGVRQWQPDVEWAQQFGGAVMYPSKETAHWKPPPWNDVDPPKDTIVKNITLNFGPQHPPYDVYDQVEFDVPVGSRGDCYDRYLCRVEEMRQSLRIIAQCLNKMPPGEIKVDDAKVSPPKRAEMKTSMESLIHHFKLYTEGYQVPPGATYTAIEAPKGEFGVYLVSDGSSRPYRCKIKAPGFAHLAGLDKMSKGHMLADVVAIIGTQDIVFGEVDR

SEQ ID NO: 861095 - protein, 102 aa, Homo sapiens
KLTARYEAWVATSMESLIHHFKLYTEGYQVPPGATYTAIEAPKGEFGVYLVSDGSSRPYRCKIKAPGFAHLAGLDKMSKGHMLADVVAIIGTQDIVFGEVDR

SEQ ID NO: 861096 - protein, 2505 aa, Homo sapiens
MFSPIMLFLNLATAHQEIEYISPPLEHGSNQALRSTALETLHESALLSGELALKTLCNKMDTGDTALGQKATSRSGETDKASGRWRQEQSAVIKMSTFGSHEGQRQPQIEPEQIGNTASAQLFGSGKLASPSEVVQQVAEKQYPPHRPSPYSCQHSLSFPQHSLPQGVMHSTKPHQSLEGPPWLFPGPLPSVASEDLFPFPIHGHSGGYPRKKISSLNPAYSQYSQKSIEQAEEAHKKEHKPKKPGKYICPYCSRACAKPSVLKKHIRSHTGERPYPCIPCGFSFKTKSNLYKHRKSHAHAIKAGLVPFTESAVSKLDLEAGFIDVEAEIHSDGEQSTDTDEESSLFAEASDKMSPGPPIPLDIASRGGYHGSLEESLGGPMKVPILIIPKSGIPLPNESSQYIGPDMLPNPSLNTKADDSHTVKQKLALRLSEKKGQDSEPSLNLLSPHSKGSTDSGYFSRSESAEQQISPPNTNAKSYEEIIFGKYCRLSPRNALSVTTTSQERAAMGRKGIMEPLPHVNTRLDVKMFEDPVSQLIPSKGDVDPSQTSMLKSTKFNSESRQPQIIPSSIRNEGKLYPANFQGSNPVLLEAPVDSSPLIRSNSVPTSSATNLTIPPSLRGSHSFDERMTGSDDVFYPGTVGIPPQRMLRRQAAFELPSVQEGHVEVEHHGRMLKGISSSSLKEKKLSPGDRVGYDYDVCRKPYKKWEDSETPKQNYRDISCLSSLKHGGEYFMDPVVPLQGVPSMFGTTCENRKRRKEKSVGDEEDTPMICSSIVSTPVGIMASDYDPKLQMQEGVRSGFAMAGHENLSHGHTERFDPCRPQLQPGSPSLVSEESPSAIDSDKMSDLGGRKPPGNVISVIQHTNSLSRPNSFERSESAELVACTQDKAPSPSETCDSEISEAPVSPEWAPPGDGAESGGKPSPSQQVQQQSYHTQPRLVRQHNIQVPEIRVTEEPDKPEKEKEAQSKEPEKPVEEFQWPQRSETLSQLPAEKLPPKKKRLRLADMEHSSGESSFESTGTGLSRSPSQESNLSHSSSFSMSFEREETSKLSALPKQDEFGKHSEFLTVPAGSYSLSVPGHHHQKEMRRCSSEQMPCPHPAEVPEVRSKSFDYGNLSHAPVSGAAASTVSPSRERKKCFLVRQASFSGSPEISQGEVGMDQSVKQEQLEHLHAGLRSGWHHGPPAVLPPLQQEDPGKQVAGPCPPLSSGPLHLAQPQIMHMDSQESLRNPLIQPTSYMTSKHLPEQPHLFPHQETIPFSPIQNALFQFQYPTVCMVHLPAQQPPWWQAHFPHPFAQHPQKSYGKPSFQTEIHSSYPLEHVAEHTGKKPAEYAHTKEQTYPCYSGASGLHPKNLLPKFPSDQSSKSTETPSEQVLQEDFASANAGSLQSLPGTVVPVRIQTHVPSYGSVMYTSISQILGQNSPAIVICKVDENMTQRTLVTNAAMQGIGFNIAQVLGQHAGLEKYPIWKAPQTLPLGLESSIPLCLPSTSDSVATLGGSKRMLSPASSLELFMETKQQKRVKEEKMYGQIVEELSAVELTNSDIKKDLSRPQKPQLVRQGCASEPKDGLQSGSSSFSSLSPSSSQDYPSVSPSSREPFPPSKEMLSGSRAPLPGQKSSGPSESKESSDELDIDETASDMSMSPQSSSLPAGDGQLEEEGKGHKRPVGMLVRMASAPSGNVADSTLLLTDMADFQQILQFPSLRTTTTVSWCFLNYTKPNYVQQATFKSSVYASWCISSCNPNPSGLNTKTTLALLRSKQKITAEIYTLAAMHRPGTGKLTSSSAWKQFTQMKPDASFLFGSKLERKLVGNILKERGKGDIHGDKDIGSKQTEPIRIKIFEGGYKSNEDYVYVRGRGRGKYICEECGIRCKKPSMLKKHIRTHTDVRPYVCKLCNFAFKTKGNLTKHMKSKAHMKKCLELGVSMTSVDDTETEEAENLEDLHKAAEKHSMSSISTDHQFSDAEESDGEDGDDNDDDDEDEDDFDDQGDLTPKTRSRSTSPQPPRFSSLPVNVGAVPHGVPSDSSLGHSSLISYLVTLPSIRVTQLMTPSDSCEDTQMTEYQRLFQSKSTDSEPDKDRLDIPSCMDEECMLPSEPSSSPRDFSPSSHHSSPGYDSSPCRDNSPKRYLIPKGDLSPRRHLSPRRDLSPMRHLSPRKEAALRREMSQRDVSPRRHLSPRRPVSPGKDITARRDLSPRRERRYMTTIRAPSPRRALYHNPPLSMGQYLQAEPIVLGPPNLRRGLPQVPYFSLYGDQEGAYEHPGSSLFPEGPNDYVFSHLPLHSQQQVRAPIPMVPVGGIQMVHSMPPALSSLHPSPTLPLPMEGFEEKKGASGESFSKDPYVLSKQHEKRGPHALQSSGPPSTPSSPRLLMKQSTSEDSLNATEREQEENIQTCTKAIASLRIATEEAALLGPDQPARVQEPHQNPLGSAHVSIRHFSRPEPGQPCTSATHPDLHDGEKDNFGTSQTPLAHSTFYSKSCVDDKQLDFHSSKELSSSTEESKDPSSEKSQLH

SEQ ID NO: 861097 - protein, 2271 aa, Homo sapiens
IYRISLAVPFPGKYICPYCSRACAKPSVLKKHIRSHTGERPYPCIPCGFSFKTKSNLYKHRKSHAHAIKAGLVPFTESAVSKLDLEAGFIDVEAEIHSDGEQSTDTDEESSLFAEASDKMSPGPPIPLDIASRGGYHGSLEESLGGPMKVPILIIPKSGIPLPNESSQYIGPDMLPNPSLNTKADDSHTVKQKLALRLSEKKGQDSEPSLNLLSPHSKGSTDSGYFSRSESAEQQISPPNTNAKSYEEIIFGKYCRLSPRNALSVTTTSQERAAMGRKGIMEPLPHVNTRLDVKMFEDPVSQLIPSKGDVDPSQTSMLKSTKFNSESRQPQIIPSSIRNEGKLYPANFQGSNPVLLEAPVDSSPLIRSNSVPTSSATNLTIPPSLRGSHSFDERMTGSDDVFYPGTVGIPPQRMLRRQAAFELPSVQEGHVEVEHHGRMLKGISSSSLKEKKLSPGDRVGYDYDVCRKPYKKWEDSETPKQNYRDISCLSSLKHGGEYFMDPVVPLQGVPSMFGTTCENRKRRKEKSVGDEEDTPMICSSIVSTPVGIMASDYDPKLQMQEGVRSGFAMAGHENLSHGHTERFDPCRPQLQPGSPSLVSEESPSAIDSDKMSDLGGRKPPGNVISVIQHTNSLSRPNSFERSESAELVACTQDKAPSPSETCDSEISEAPVSPEWAPPGDGAESGGKPSPSQQVQQQSYHTQPRLVRQHNIQVPEIRVTEEPDKPEKEKEAQSKEPEKPVEEFQWPQRSETLSQLPAEKLPPKKKRLRLADMEHSSGESSFESTGTGLSRSPSQESNLSHSSSFSMSFEREETSKLSALPKQDEFGKHSEFLTVPAGSYSLSVPGHHHQKEMRRCSSEQMPCPHPAEVPEVRSKSFDYGNLSHAPVSGAAASTVSPSRERKKCFLVRQASFSGSPEISQGEVGMDQSVKQEQLEHLHAGLRSGWHHGPPAVLPPLQQEDPGKQVAGPCPPLSSGPLHLAQPQIMHMDSQESLRNPLIQPTSYMTSKHLPEQPHLFPHQETIPFSPIQNALFQFQYPTVCMVHLPAQQPPWWQAHFPHPFAQHPQKSYGKPSFQTEIHSSYPLEHVAEHTGKKPAEYAHTKEQTYPCYSGASGLHPKNLLPKFPSDQSSKSTETPSEQVLQEDFASANAGSLQSLPGTVVPVRIQTHVPSYGSVMYTSISQILGQNSPAIVICKVDENMTQRTLVTNAAMQGIGFNIAQVLGQHAGLEKYPIWKAPQTLPLGLESSIPLCLPSTSDSVATLGGSKRMLSPASSLELFMETKQQKRVKEEKMYGQIVEELSAVELTNSDIKKDLSRPQKPQLVRQGCASEPKDGLQSGSSSFSSLSPSSSQDYPSVSPSSREPFPPSKEMLSGSRAPLPGQKSSGPSESKESSDELDIDETASDMSMSPQSSSLPAGDGQLEEEGKGHKRPVGMLVRMASAPSGNVADSTLLLTDMADFQQILQFPSLRTTTTVSWCFLNYTKPNYVQQATFKSSVYASWCISSCNPNPSGLNTKTTLALLRSKQKITAEIYTLAAMHRPGTGKLTSSSAWKQFTQMKPDASFLFGSKLERKLVGNILKERGKGDIHGDKDIGSKQTEPIRIKIFEGGYKSNEDYVYVRGRGRGKYICEECGIRCKKPSMLKKHIRTHTDVRPYVCKLCNFAFKTKGNLTKHMKSKAHMKKCLELGVSMTSVDDTETEEAENLEDLHKAAEKHSMSSISTDHQFSDAEESDGEDGDDNDDDDEDEDDFDDQGDLTPKTRSRSTSPQPPRFSSLPVNVGAVPHGVPSDSSLGHSSLISYLVTLPSIRVTQLMTPSDSCEDTQMTEYQRLFQSKSTDSEPDKDRLDIPSCMDEECMLPSEPSSSPRDFSPSSHHSSPGYDSSPCRDNSPKRYLIPKGDLSPRRHLSPRRDLSPMRHLSPRKEAALRREMSQRDVSPRRHLSPRRPVSPGKDITARRDLSPRRERRYMTTIRAPSPRRALYHNPPLSMGQYLQAEPIVLGPPNLRRGLPQVPYFSLYGDQEGAYEHPGSSLFPEGPNDYVFSHLPLHSQQQVRAPIPMVPVGGIQMVHSMPPALSSLHPSPTLPLPMEGFEEKKGASGESFSKDPYVLSKQHEKRGPHALQSSGPPSTPSSPRLLMKQSTSEDSLNATEREQEENIQTCTKAIASLRIATEEAALLGPDQPARVQEPHQNPLGSAHVSIRHFSRPEPGQPCTSATHPDLHDGEKDNFGTSQTPLAHSTFYSKSCVDDKQLDFHSSKELSSSTEESKDPSSEKSQLH

SEQ ID NO: 861098 - protein, 201 aa, Homo sapiens
SGSRAPLPGQKSSGPSESKESSDELDIDETASDMSMSPQSSSLPAGDGQLEEEGKGHKRPVGMLVRMASAPSGNVADSTLLLTDMADFQQILQFPSLRTTTTVSWCFLNYTKPNYVQQATFKSSVYASWCISSCNPNPSGLNTKTTLALLRSKQKITAEIYTLAAMHRPGTGKLTSSSAWKQFTQVTNTVLGRTLYCGFDC

SEQ ID NO: 861099 - protein, 2509 aa, Homo sapiens
TLLANAHRLWCACGRFQREGAISKFADTLEHGSNQALRSTALETLHESALLSGELALKTLCNKMDTGDTALGQKATSRSGETDKASGRWRQEQSAVIKMSTFGSHEGQRQPQIEPEQIGNTASAQLFGSGKLASPSEVVQQVAEKQYPPHRPSPYSCQHSLSFPQHSLPQGVMHSTKPHQSLEGPPWLFPGPLPSVASEDLFPFPIHGHSGGYPRKKISSLNPAYSQYSQKSIEQAEEAHKKEHKPKKPGKYICPYCSRACAKPSVLKKHIRSHTGERPYPCIPCGFSFKTKSNLYKHRKSHAHAIKAGLVPFTESAVSKLDLEAGFIDVEAEIHSDGEQSTDTDEESSLFAEASDKMSPGPPIPLDIASRGGYHGSLEESLGGPMKVPILIIPKSGIPLPNESSQYIGPDMLPNPSLNTKADDSHTVKQKLALRLSEKKGQDSEPSLNLLSPHSKGSTDSGYFSRSESAEQQISPPNTNAKSYEEIIFGKYCRLSPRNALSVTTTSQERAAMGRKGIMEPLPHVNTRLDVKMFEDPVSQLIPSKGDVDPSQTSMLKSTKFNSESRQPQIIPSSIRNEGKLYPANFQGSNPVLLEAPVDSSPLIRSNSVPTSSATNLTIPPSLRGSHSFDERMTGSDDVFYPGTVGIPPQRMLRRQAAFELPSVQEGHVEVEHHGRMLKGISSSSLKEKKLSPGDRVGYDYDVCRKPYKKWEDSETPKQNYRDISCLSSLKHGGEYFMDPVVPLQGVPSMFGTTCENRKRRKEKSVGDEEDTPMICSSIVSTPVGIMASDYDPKLQMQEGVRSGFAMAGHENLSHGHTERFDPCRPQLQPGSPSLVSEESPSAIDSDKMSDLGGRKPPGNVISVIQHTNSLSRPNSFERSESAELVACTQDKAPSPSETCDSEISEAPVSPEWAPPGDGAESGGKPSPSQQVQQQSYHTQPRLVRQHNIQVPEIRVTEEPDKPEKEKEAQSKEPEKPVEEFQWPQRSETLSQLPAEKLPPKKKRLRLADMEHSSGESSFESTGTGLSRSPSQESNLSHSSSFSMSFEREETSKLSALPKQDEFGKHSEFLTVPAGSYSLSVPGHHHQKEMRRCSSEQMPCPHPAEVPEVRSKSFDYGNLSHAPVSGAAASTVSPSRERKKCFLVRQASFSGSPEISQGEVGMDQSVKQEQLEHLHAGLRSGWHHGPPAVLPPLQQEDPGKQVAGPCPPLSSGPLHLAQPQIMHMDSQESLRNPLIQPTSYMTSKHLPEQPHLFPHQETIPFSPIQNALFQFQYPTVCMVHLPAQQPPWWQAHFPHPFAQHPQKSYGKPSFQTEIHSSYPLEHVAEHTGKKPAEYAHTKEQTYPCYSGASGLHPKNLLPKFPSDQSSKSTETPSEQVLQEDFASANAGSLQSLPGTVVPVRIQTHVPSYGSVMYTSISQILGQNSPAIVICKVDENMTQRTLVTNAAMQGIGFNIAQVLGQHAGLEKYPIWKAPQTLPLGLESSIPLCLPSTSDSVATLGGSKRMLSPASSLELFMETKQQKRVKEEKMYGQIVEELSAVELTNSDIKKDLSRPQKPQLVRQGCASEPKDGLQSGSSSFSSLSPSSSQDYPSVSPSSREPFPPSKEMLSGSRAPLPGQKSSGPSESKESSDELDIDETASDMSMSPQSSSLPAGDGQLEEEGKGHKRPVGMLVRMASAPSGNVADSTLLLTDMADFQQILQFPSLRTTTTVSWCFLNYTKPNYVQQATFKSSVYASWCISSCNPNPSGLNTKTTLALLRSKQKITAEIYTLAAMHRPGTGKLTSSSAWKQFTQMKPDASFLFGSKLERKLVGNILKERGKGDIHGDKDIGSKQTEPIRIKIFEGGYKSNEDYVYVRGRGRGKYICEECGIRCKKPSMLKKHIRTHTDVRPYVCKLCNFAFKTKGNLTKHMKSKAHMKKCLELGVSMTSVDDTETEEAENLEDLHKAAEKHSMSSISTDHQFSDAEESDGEDGDDNDDDDEDEDDFDDQGDLTPKTRSRSTSPQPPRFSSLPVNVGAVPHGVPSDSSLGHSSLISYLVTLPSIRVTQLMTPSDSCEDTQMTEYQRLFQSKSTDSEPDKDRLDIPSCMDEECMLPSEPSSSPRDFSPSSHHSSPGYDSSPCRDNSPKRYLIPKGDLSPRRHLSPRRDLSPMRHLSPRKEAALRREMSQRDVSPRRHLSPRRPVSPGKDITARRDLSPRRERRYMTTIRAPSPRRALYHNPPLSMGQYLQAEPIVLGPPNLRRGLPQVPYFSLYGDQEGAYEHPGSSLFPEGPNDYVFSHLPLHSQQQVRAPIPMVPVGGIQMVHSMPPALSSLHPSPTLPLPMEGFEEKKGASGESFSKDPYVLSKQHEKRGPHALQSSGPPSTPSSPRLLMKQSTSEDSLNATEREQEENIQTCTKAIASLRIATEEAALLGPDQPARVQEPHQNPLGSAHVSIRHFSRPEPGQPCTSATHPDLHDGEKDNFGTSQTPLAHSTFYSKSCVDDKQLDFHSSKELSSSTEESKDPSSEKSQLH

SEQ ID NO: 861100 - protein, 1851 aa, Homo sapiens
TLLANAHRLWCACGRFQREGAISKFADTLEHGSNQALRSTALETLHESALLSGELALKTLCNKMDTGDTALGQKATSRSGETDKASGRWRQEQSAVIKMSTFGSHEGQRQPQIEPEQIGNTASAQLFGSGKLASPSEVVQQVAEKQYPPHRPSPYSCQHSLSFPQHSLPQGVMHSTKPHQSLEGPPWLFPGPLPSVASEDLFPFPIHGHSGGYPRKKISSLNPAYSQYSQKSIEQAEEAHKKEHKPKKPGKYICPYCSRACAKPSVLKKHIRSHTGERPYPCIPCGFSFKTKSNLYKHRKSHAHAIKAGLVPFTESAVSKLDLEAGFIDVEAEIHSDGEQSTDTDEESSLFAEASDKMSPGPPIPLDIASRGGYHGSLEESLGGPMKVPILIIPKSGIPLPNESSQYIGPDMLPNPSLNTKADDSHTVKQKLALRLSEKKGQDSEPSLNLLSPHSKGSTDSGYFSRSESAEQQISPPNTNAKSYEEIIFGKYCRLSPRNALSVTTTSQERAAMGRKGIMEPLPHVNTRLDVKMFEDPVSQLIPSKGDVDPSQTSMLKSTKFNSESRQPQIIPSSIRNEGKLYPANFQGSNPVLLEAPVDSSPLIRSNSVPTSSATNLTIPPSLRGSHSFDERMTGSDDVFYPGTVGIPPQRMLRRQAAFELPSVQEGHVEVEHHGRMLKGISSSSLKEKKLSPGDRVGYDYDVCRKPYKKWEDSETPKQNYRDISCLSSLKHGGEYFMDPVVPLQGVPSMFGTTCENRKRRKEKSVGDEEDTPMICSSIVSTPVGIMASDYDPKLQMQEGVRSGFAMAGHENLSHGHTERFDPCRPQLQPGSPSLVSEESPSAIDSDKMSDLGGRKPPGNVISVIQHTNSLSRPNSFERSESAELVACTQDKAPSPSETCDSEISEAPVSPEWAPPGDGAESGGKPSPSQQVQQQSYHTQPRLVRQHNIQVPEIRVTEEPDKPEKEKEAQSKEPEKPVEEFQWPQRSETLSQLPAEKLPPKKKRLRLADMEHSSGESSFESTGTGLSRSPSQESNLSHSSSFSMSFEREETSKLSALPKQDEFGKHSEFLTVPAGSYSLSVPGHHHQKEMRRCSSEQMPCPHPAEVPEVRSKSFDYGNLSHAPVSGAAASTVSPSRERKKCFLVRQASFSGSPEISQGEVGMDQSVKQEQLEHLHAGLRSGWHHGPPAVLPPLQQEDPGKQVAGPCPPLSSGPLHLAQPQIMHMDSQESLRNPLIQPTSYMTSKHLPEQPHLFPHQETIPFSPIQNALFQFQYPTVCMVHLPAQQPPWWQAHFPHPFAQHPQKSYGKPSFQTEIHSSYPLEHVAEHTGKKPAEYAHTKEQTYPCYSGASGLHPKNLLPKFPSDQSSKSTETPSEQVLQEDFASANAGSLQSLPGTVVPVRIQTHVPSYGSVMYTSISQILGQNSPAIVICKVDENMTQRTLVTNAAMQGIGFNIAQVLGQHAGLEKYPIWKAPQTLPLGLESSIPLCLPSTSDSVATLGGSKRMLSPASSLELFMETKQQKRVKEEKMYGQIVEELSAVELTNSDIKKDLSRPQKPQLVRQGCASEPKDGLQSGSSSFSSLSPSSSQDYPSVSPSSREPFPPSKEMLSGSRAPLPGQKSSGPSESKESSDELDIDETASDMSMSPQSSSLPAGDGQLEEEGKGHKRPVGMLVRMASAPSGNVADSTLLLTDMADFQQILQFPSLRTTTTVSWCFLNYTKPNYVQQATFKSSVYASWCISSCNPNPSGLNTKTTLALLRSKQKITAEIYTLAAMHRPGTGKLTSSSAWKQFTQMKPDASFLFGSKLERKLVGNILKERGKGDIHGDKDIGSKQTEPIRIKIFEGGYKSNLSH

SEQ ID NO: 861101 - protein, 128 aa, Homo sapiens
  misc_feature (6)..(6): Xaa can be any naturally occurring amino acid
  misc_feature (11)..(11): Xaa can be any naturally occurring amino acid
  misc_feature (35)..(37): Xaa can be any naturally occurring amino acid
  misc_feature (46)..(46): Xaa can be any naturally occurring amino acid
SSMNTXSPSQXPQQEEEKPKTSETTPPKKRGTNPXXXRARCCVKEXPHKKEVNRTHACFALQDEILQRLLFSEMKMKVLENQMFIIWNKMNHHGRSSRHRNFPMKKHRMRRHESICPTLSDCTSSSPS

SEQ ID NO: 861102 - protein, 146 aa, Homo sapiens
SAGTIGAVAAWLMSYKPALFGFLFLLLLLSNWLVKYEHKLTLPEPQQEEEKPKTSENDSKNSKAVNTKEVNRTHACFALQDEILQRLLFSEMKMKVLENQMFIIWNKMNHHGRSSRHRNFPMKKHRMRRHESICPTLSDCTSSSPS

SEQ ID NO: 861103 - protein, 471 aa, Homo sapiens
GAAGRTAAAPRGRAPVGAGQGRARRAVAAERAAWVLAAGFAETRSRGLPSRARSGRGGMKGALGSPVAAAGAAMQESFGCVVANRFHQLLDDESDPFDILREAERRRQQQLQRKRRDEAAAAAGAGPRGGRSPAGASGHRAGAGGRRESQKERKSLPAPVAQRPDSPGGGLQAPGQKRTPRRGEQQGWNDSRGPEGMLERAERRSYREYRPYETERQADFTAEKFPDEKPGDRFDRDRPLRGRGGPRGGMRGRGRGGPGNRVFDAFDQRGKREFERYGGNDKIAVRTEDNMGGCGVRTWGSGKDTSDVEPTAPMEEPTVVEESQGTPEEESPAKVPELEVEEETQVQEMTLDEWKNLQEQTRPKPEFNIRKPESTVPSKAVVIHKSKYRDDMVKDDYEDDSHVFRKPANDITSQLEINFGNLPRPGRGARGGTRGGRGRIRRAENYGPRAEVVMQDVAPNPDDPEDFPALS

SEQ ID NO: 861104 - protein, 317 aa, Homo sapiens
GAAGRTAAAPRGRAPVGAGQGQKRTPRRGEQQGWNDSRGPEGMLERAERRSYREYRPYETERQADFTAEKFPDEKPGDRFDRDRPLRGRGGPRGGMRGRGRGGPGNRVFDAFDQRGKREFERYGGNDKIAVRTEDNMGGCGVRTWGSGKDTSDVEPTAPMEEPTVVEESQGTPEEESPAKVPELEVEEETQVQEMTLDEWKNLQEQTRPKPEFNIRKPESTVPSKAVVIHKSKYRDDMVKDDYEDDSHVFRKPANDITSQLEINFGNLPRPGRGARGGTRGGRGRIRRAENYGPRAEVVMQDVAPNPDDPEDFPALS

SEQ ID NO: 861105 - protein, 283 aa, Homo sapiens
GAAGRTAAAPRGRAPVGAGQGRARRAVAAERAAWVLAAGFAETRSRGLPSRARSGRGGMKGALGSPVAAAGAAMQESFGCVVANRFHQLLDDESDPFDILREAERRRQQQLQRKRRDEAAAAAGAGPRGGRSPAGASGHRAGAGGRRESQKERKSLPAPVAQRPDSPGGGLQAPGQKRTPRRGEQQGWNDSRGPEGMLERAERRSYREYRPYETERQADFTAEKFPDEKPGDRFDRDRPLRGRGGPRGGMRGRGRGGPGNRVFDAFDQRGKREFERYGGNDKM

SEQ ID NO: 861106 - protein, 471 aa, Homo sapiens; identical to SEQ ID NO: 861103

SEQ ID NO: 861107 - protein, 317 aa, Homo sapiens
MEAPTVVEESQCTPEEESPASQKRTPRRGEQQGWNDSRGPEGMLERAERRSYREYRPYETERQADFTAEKFPDEKPGDRFDRDRPLRGRGGPRGGMRGRGRGGPGNRVFDAFDQRGKREFERYGGNDKIAVRTEDNMGGCGVRTWGSGKDTSDVEPTAPMEEPTVVEESQGTPEEESPAKVPELEVEEETQVQEMTLDEWKNLQEQTRPKPEFNIRKPESTVPSKAVVIHKSKYRDDMVKDDYEDDSHVFRKPANDITSQLEINFGNLPRPGRGARGGTRGGRGRIRRAENYGPRAEVVMQDVAPNPDDPEDFPALS

SEQ ID NO: 861108 - protein, 657 aa, Homo sapiens
MRRAVCFPALCLLLNLHAAGCFSGNNDHFLAINQKKSGKPVFIYKHSQDIEKSLDIAPQKIYRHSYHSSSEAQVSKRHQIVNSAFPRPAYDPSLNLLAMDGQDLEVENLPIPAANVIVVTLQMDVNKLNITLLRIFRQGVAAALGLLPQQVHINRLIGKKNSIELFVSPINRKTGISDALPSEEVLRSLNINVLHQSLSQFGITEVSPEKNVLQGQHEADKIWSKEGFYAVVIFLSIFVIIVTCLMILYRLKERFQLSLRQDKEKNQEIHLSPITLQPALSEAKTVHSMVQPEQAPKVLNVVVDPQGRGAPEIRATTATSVCPSPFKMKPIGLQERRGSNVSLTLDMSSLGNIEPFVSIPTPREKVAMEYLQSASRILTRSQLRDVVASSHLLQSEFMEIPMNFVDPKEIDIPRHGTKNRYKTILPNPLSRVCLRPKNVTDSLSTYINANYIRGYSGKEKAFIATQGPMINTVDDFWQMVWQEDSPVIVMITKLKEKNEKCVLYWPEKRGIYGKVEVLVISVNECDNYTIRNLVLKQGSHTQHVKHYWYTSWPDHKTPDSAQPLLQLMLDVEEDRLASQGRGPVVVHCSAGIGRTGCFIATSIGCQQLKEEGVVDALSIVCQLRMDRGGMVQTSEQYEFVHHALCLYESRLSAETVQ

SEQ ID NO: 861109 - protein, 457 aa, Homo sapiens
NRTLLPMNQKNVLQGQHEADKIWSKEGFYAVVIFLSIFVIIVTCLMILYRLKERFQLSLRQDKEKNQEIHLSPITLQPALSEAKTVHSMVQPEQAPKVLNVVVDPQGRGAPEIRATTATSVCPSPFKMKPIGLQERRGSNVSLTLDMSSLGNIEPFVSIPTPREKVAMEYLQSASRILTRSQLRDVVASSHLLQSEFMEIPMNFVDPKEIDIPRHGTKNRYKTILPNPLSRVCLRPKNVTDSLSTYINANYIRGYSGKEKAFIATQGPMINTVDDFWQMVWQEDSPVIVMITKLKEKNEKCVLYWPEKRGIYGKVEVLVISVNECDNYTIRNLVLKQGSHTQHVKHYWYTSWPDHKTPDSAQPLLQLMLDVEEDRLASQGRGPVVVHCSAGIGRTGCFIATSIGCQQLKEEGVVDALSIVCQLRMDRGGMVQTSEQYEFVHHALCLYESRLSAETVQ

SEQ ID NO: 861110 - protein, 392 aa, Homo sapiens
MILYRLKERFQLSLRQDKEKNQEIHLSPITLQPALSEAKTVHSMVQPEQAPKVLNVVVDPQGRGAPEIRATTATSVCPSPFKMKPIGLQERRGSNVSLTLDMSSLGNIEPFVSIPTPREKVAMEYLQSASRILTRSQLRDVVASSHLLQSEFMEIPMNFVDPKEIDIPRHGTKNRYKTILPNPLSRVCLRPKNVTDSLSTYINANYIRGYSGKEKAFIATQGPMINTVDDFWQMVWQEDSPVIVMITKLKEKNEKCVLYWPEKRGIYGKVEQGSHTQHVKHYWYTSWPDHKTPDSAQPLLQLMLDVEEDRLASQGRGPVVVHCSAGIGRTGCFIATSIGCQQLKEEGVVDALSIVCQLRMDRGGMVQTSEQYEFVHHALCLYESRLSAETVQ

SEQ ID NO: 861111 - protein, 412 aa, Homo sapiens
MILYRLKERFQLSLRQDKEKNQEIHLSPITLQPALSEAKTVHSMVQPEQAPKVLNVVVDPQGRGAPEIRATTATSVCPSPFKMKPIGLQERRGSNVSLTLDMSSLGNIEPFVSIPTPREKVAMEYLQSASRILTRSQLRDVVASSHLLQSEFMEIPMNFVDPKEIDIPRHGTKNRYKTILPNPLSRVCLRPKNVTDSLSTYINANYIRGYSGKEKAFIATQGPMINTVDDFWQMVWQEDSPVIVMITKLKEKNEKCVLYWPEKRGIYGKVEVLVISVNECDNYTIRNLVLKQGSHTQHVKHYWYTSWPDHKTPDSAQPLLQLMLDVEEDRLASQGRGPVVVHCSAGIGRTGCFIATSIGCQQLKEEGVVDALSIVCQLRMDRGGMVQTSEQYEFVHHALCLYESRLSAETVQ

SEQ ID NO: 861112 - protein, 159 aa, Homo sapiens
MRRKGGNCLRLRGWGGAQEATRARDTSSAKRRVSSRAPSPPLFLVSRVFRIPPRFRFGFWDCYLVGCESHPPPRSVALGGVRAGCEPKRAKCELMDHAQELHALLGSLLLFLYIMYSRRVQVSTSFLEQPKTNFLPFLVSTENFRVVLKNKRQDLYTHK

SEQ ID NO: 861113 - protein, 306 aa, Homo sapiens
MSEVTRSLLQRWGASFRRGADFDSWGQLVEAIDEYQILARHLQKEAQAQHNNSEFTEEQKKTIGKIATCLELRSAALQSTQSQEEFKLEDLKKLEPILKNILTYNKEFPFDVQPVPLRRILAPGEEENLEFEEDEEEGGAGAGSPDSFPARVPGTLLPRLPSEPGMTLLTIRIEKIGLKDAGQCIDPYITVSVKDLNGIDLTPVQDTPVASRKEDTYVHFNVDIELQKHVEKLTKGAAIFFEFKHYKPKKRFTSTKCFAFMEMDEIKPGPIVIELYKKPTDFKRKKLQLLTKKPLYLHLHQTLHKE

SEQ ID NO: 861114 - protein, 306 aa, Homo sapiens; identical to SEQ ID NO: 861113

SEQ ID NO: 861115 - protein, 306 aa, Homo sapiens; identical to SEQ ID NO: 861113

SEQ ID NO: 861116 - protein, 306 aa, Homo sapiens; identical to SEQ ID NO: 861113

SEQ ID NO: 861117 - protein, 296 aa, Homo sapiens
MDFLSVVCFKALEGDFWSTVQGLWRLILARHLQKEAQAQHNNSEFTEEQKKTIGKIATCLELRSAALQSTQSQEEFKLEDLKKLEPILKNILTYNKEFPFDVQPVPLRRILAPGEEENLEFEEDEEEGGAGAGSPDSFPARVPGTLLPRLPSEPGMTLLTIRIEKIGLKDAGQCIDPYITVSVKDLNGIDLTPVQDTPVASRKEDTYVHFNVDIELQKHVEKLTKGAAIFFEFKHYKPKKRFTSTKCFAFMEMDEIKPGPIVIELYKKPTDFKRKKLQLLTKKPLYLHLHQTLHKE

SEQ ID NO: 861118 - protein, 110 aa, Homo sapiens
MLVTLSPFSAPGPCAEVRALPAPAAEPEPAWEEAPPERALELEGAPAKDQTNEELPEITEVPESIKRRLGGRVPAATPAPRGNLLLQAWMRVHSWASRLFAPNVLPGTGP

SEQ ID NO: 861119 - protein, 163 aa, Homo sapiens
MRRRLIPHPRRLSPVVIRRIQVPQDSLGQALAGQATPEIPLGLQLHTVLVQEIQELIEAQTRAPGPCAEVRALPAPAAEPEPAWEEAPPERALELEGAPAKDQTNEELPEITEVPESIKRRLGGRVPAATPAPRGNLLLQAWMRVHSWASRLFAPNVLPGTGP

SEQ ID NO: 861120 - protein, 915 aa, Homo sapiens
MDLRVGQRPPVEPPPEPTLLALQRPQRLHHHLFLAGLQQQRSVEPMRLSMDTPMPELQVGPQEQELRQLLHKDKSKRSAVASSVVKQKLAEVILKKQQAALERTVHPNSPGIPYRTLEPLETEGATRSMLSSFLPPVPSLPSDPPEHFPLRKTVSEPNLKLRYKPKKSLERRKNPLLRKESAPPSLRRRPAETLGDSSPSSSSTPASGCSSPNDSEHGPNPILGSEADSDRRTHPTLGPRGPILGSPHTPLFLPHGLEPEAGGTLPSRLQPILLLDPSGSHAPLLTVPGLGPLPFHFAQSLMTTERLSGSGLHWPLSRTRSEPLPPSATAPPPPGPMQPRLEQLKTHVQVIKRSAKPSEKPRLRQIPSAEDLETDGGGPGQVVDDGLEHRELGHGQPEARGPAPLQQHPQVLLWEQQRLAGRLPRGSTGDTVLLPLAQGGHRPLSRAQSSPAAPASLSAPEPASQARVLSSSETPARTLPFTTGLIYDSVMLKHQCSCGDNSRHPEHAGRIQSIWSRLQERGLRSQCECLRGRKASLEELQSVHSERHVLLYGTNPLSRLKLDNGKLAGLLAQRMFVMLPCGGVGVDTDTIWNELHSSNAARWAAGSVTDLAFKVASRELKNGFAVVRPPGHHADHSTAMGFCFFNSVAIACRQLQQQSKASKILIVDWDVHHGNGTQQTFYQDPSVLYISLHRHDDGNFFPGSGAVDEVGAGSGEGFNVNVAWAGGLDPPMGDPEYLAAFRIVVMPIAREFSPDLVLVSAGFDAAEGHPAPLGGYHVSAKCFGYMTQQLMNLAGGAVVLALEGGHDLTAICDASEACVAALLGNRVDPLSEEGWKQKPNLNAIRSLEAVIRVHSKYWGCMQRLASCPDSWVPRVPGADKEEVEAVTALASLSVGILAEDRPSEQLVEEEEPMNL

SEQ ID NO: 861121 - protein, 1016 aa, Homo sapiens
SSVSPSVKWGENSKHTSQSRAEEVDYGEENEDGTQVSPGAHYCSPTGAGCPRPCADTPGPQPQPMDLRVGQRPPVEPPPEPTLLALQRPQRLHHHLFLAGLQQQRSVEPMRLSMDTPMPELQVGPQEQELRQLLHKDKSKRSAVASSVVKQKLAEVILKKQQAALERTVHPNSPGIPYRTLEPLETEGATRSMLSSFLPPVPSLPSDPPEHFPLRKTVSEPNLKLRYKPKKSLERRKNPLLRKESAPPSLRRRPAETLGDSSPSSSSTPASGCSSPNDSEHGPNPILGSEALLGQRLRLQETSVAPFALPTVSLLPAITLGLPAPARADSDRRTHPTLGPRGPILGSPHTPLFLPHGLEPEAGGTLPSRLQPILLLDPSGSHAPLLTVPGLGPLPFHFAQSLMTTERLSGSGLHWPLSRTRSEPLPPSATAPPPPGPMQPRLEQLKTHVQVIKRSAKPSEKPRLRQIPSAEDLETDGGGPGQVVDDGLEHRELGHGQPEARGPAPLQQHPQVLLWEQQRLAGRLPRGSTGDTVLLPLAQGGHRPLSRAQSSPAAPASLSAPEPASQARVLSSSETPARTLPFTTGLIYDSVMLKHQCSCGDNSRHPEHAGRIQSIWSRLQERGLRSQCECLRGRKASLEELQSVHSERHVLLYGTNPLSRLKLDNGKLAGLLAQRMFVMLPCGGVGVDTDTIWNELHSSNAARWAAGSVTDLAFKVASRELKNGFAVVRPPGHHADHSTAMGFCFFNSVAIACRQLQQQSKASKILIVDWDVHHGNGTQQTFYQDPSVLYISLHRHDDGNFFPGSGAVDEVGAGSGEGFNVNVAWAGGLDPPMGDPEYLAAFRIVVMPIAREFSPDLVLVSAGFDAAEGHPAPLGGYHVSAKCFGYMTQQLMNLAGGAVVLALEGGHDLTAICDASEACVAALLGNRVDPLSEEGWKQKPNLNAIRSLEAVIRVHSKYWGCMQRLASCPDSWVPRVPGADKEEVEAVTALASLSVGILAEDRPSEQLVEEEEPMNL

SEQ ID NO: 861122 - protein, 1201 aa, Homo sapiens
SSVSPSVKWGENSKHTSQSRAEEVDYGEENEDGTQVSPGAHYCSPTGAGCPRPCADTPGPQPQPMDLRVGQRPPVEPPPEPTLLALQRPQRLHHHLFLAGLQQQRSVEPMRLSMDTPMPELQVGPQEQELRQLLHKDKSKRSAVASSVVKQKLAEVILKKQQAALERTVHPNSPGIPYRTLEPLETEGATRSMLSSFLPPVPSLPSDPPEHFPLRKTVSEPNLKLRYKPKKSLERRKNPLLRKESAPPSLRRRPAETLGDSSPSSSSTPASGCSSPNDSEHGPNPILGSEADSDRRTHPTLGPRGPILGSPHTPLFLPHGLEPEAGGTLPSRLQPILLLDPSGSHAPLLTVPGLGPLPFHFAQSLMTTERLSGSGLHWPLSRTRSEPLPPSATAPPPPGPMQPRLEQLKTHVQVIKRSAKPSEKPRLRQIPSAEDLETDGGGPGQVVDDGLEHRELGHGQPEARGPAPLQQHPQVLLWEQQRLAGRLPRGSTGDTVLLPLAQGGHRPLSRAQSSPAAPASLSAPEPASQARVLSSSETPARTLPFTTGSLYRSSIPGSHGVSILRVVGVLDAQKLTLPPSNEQDPPLKTSHGSDWNSHFSKAGFVYHMVQCHRGLLSSRFGGFLGILFPPAAPWEPLWVHDTCVRCCTLGLMLCSEHLRAWCWALESWATQQSCPHVGRPWLCGSHVGWSCVDVLAAATWGSVWACVDRCEGLGLGEGQDEMQACVGVRGVYPPGSMWVPAVAVLACSLQPRPWGVRTPWVPALTLAPAGLIYDSVMLKHQCSCGDNSRHPEHAGRIQSIWSRLQERGLRSQCECLRGRKASLEELQSVHSERHVLLYGTNPLSRLKLDNGKLAGLLAQRMFVMLPCGGVGVDTDTIWNELHSSNAARWAAGSVTDLAFKVASRELKNGFAVVRPPGHHADHSTAMGFCFFNSVAIACRQLQQQSKASKILIVDWDVHHGNGTQQTFYQDPSVLYISLHRHDDGNFFPGSGAVDEVGAGSGEGFNVNVAWAGGLDPPMGDPEYLAAFRIVVMPIAREFSPDLVLVSAGFDAAEGHPAPLGGYHVSAKCFGYMTQQLMNLAGGAVVLALEGGHDLTAICDASEACVAALLGNRVDPLSEEGWKQKPNLNAIRSLEAVIRVHSKYWGCMQRLASCPDSWVPRVPGADKEEVEAVTALASLSVGILAEDRPSEQLVEEEEPMNL

SEQ ID NO: 861123 - protein, 915 aa, Homo sapiens; identical to SEQ ID NO: 861120

SEQ ID NO: 861124 - protein, 612 aa, Homo sapiens
SSVSPSVKWGENSKHTSQSRAEEVDYGEENEDGTQVSPGAHYCSPTGAGCPRPCADTPGPQPQPMDLRVGQRPPVEPPPEPTLLALQRPQRLHHHLFLAGLQQQRSVEPMRLSMDTPMPELQVGPQEQELRQLLHKDKSKRSAVASSVVKQKLAEVILKKQQAALERTVHPNSPGIPYRTLEPLETEGATRSMLSSFLPPVPSLPSDPPEHFPLRKTVSEPNLKLRYKPKKSLERRKNPLLRKESAPPSLRRRPAETLGDSSPSSSSTPASGCSSPNDSEHGPNPILGSEADSDRRTHPTLGPRGPILGSPHTPLFLPHGLEPEAGGTLPSRLQPILLLDPSGSHAPLLTVPGLGPLPFHFAQSLMTTERLSGSGLHWPLSRTRSEPLPPSATAPPPPGPMQPRLEQLKTHVQVIKRSAKPSEKPRLRQIPSAEDLETDGGGPGQVVDDGLEHRELGHGQPEARGPAPLQQHPQVLLWEQQRLAGRLPRGSTGDTVLLPLAQGGHRPLSRAQSSPAAPASLSAPEPASQARVLSSSETPARTLPFTTGETGRRVAGGGRGSAARVHVGVLVSLGTFLEATECLALLGPRSTHGAHGTAGYCIWPMRTKAHEI

SEQ ID NO: 861125 - protein, 612 aa, Homo sapiens; identical to SEQ ID NO: 861124

SEQ ID NO: 861126 - protein, 612 aa, Homo sapiens; identical to SEQ ID NO: 861124

SEQ ID NO: 861127 - protein, 612 aa, Homo sapiens; identical to SEQ ID NO: 861124

SEQ ID NO: 861128 - protein, 612 aa, Homo sapiens; identical to SEQ ID NO: 861124

SEQ ID NO: 861129 - protein, 911 aa, Homo sapiens
SSVSPSVKWGENSKHTSQSRAEEVDYGEENEDGTQVSPGAHYCSPTGAGCPRPCADTPGPQPQPMDLRVGQRPPVEPPPEPTLLALQRPQRLHHHLFLAGLQQQRSVEPMRLSMDTPMPELQVGPQEQELRQLLHKDKSKRSAVASSVVKQKLAEVILKKQQAALERTVHPNSPGIPYRTLEPLETEGATRSMLSSFLPPVPSLPSDPPEHFPLRKTVSEPNLKLRYKPKKSLERRKNPLLRKESAPPSLRRRPAETLGDSSPSSSSTPASGCSSPNDSEHGPNPILGSEADSDRRTHPTLGPRGPILGSPHTPLFLPHGLEPEAGGTLPSRLQPILLLDPSGSHAPLLTVPGLGPLPFHFAQSLMTTERLSGSGLHWPLSRTRSEPLPPSATAPPPPGPMQPRLEQLKTHVQVIKRSAKPSEKPRLRQIPSAEDLETDGGGPGQVVDDGLEHRELGHGQPEARGPAPLQQHPQVLLWEQQRLAGRLPRGSTGDTVLLPLAQGGHRPLSRAQSSPAAPASLSAPEPASQARVLSSSETPARTLPFTTGLIYDSVMLKHQCSCGDNSRHPEHAGRIQSIWSRLQERGLRSQCECLRGRKASLEELQSVHSERHVLLYGTNPLSRLKLDNGKLAGLLAQRMFVMLPCGGVGVDTDTIWNELHSSNAARWAAGSVTDLAFKVASRELKNGFAVVRPPGHHADHSTAMGFCFFNSVAIACRQLQQQSKASKILIVDWVVMIRIIADNIEYTTNHIQTLMVLHMMDLILTITHFTDDRRAPWQLDPADFYKTQWALLSLDCLETGIFRGSGAWIESVMPMRGRSPRLNGGCGEWDGLRYPGPRGGRPAFVPALWFLGGRCIVCECGSVASGGGHTPGGVAGGSVLGGTSYEGAPPPVVVPWLWGALARRVYDTPVR

SEQ ID NO: 861130 - protein, 611 aa, Homo sapiens
SSVSPSVKWGENSKHTSQSRAEEVDYGEENEDGTQVSPGAHYCSPTGAGCPRPCADTPGPQPQPMDLRVGQRPPVEPPPEPTLLALQRPQRLHHHLFLAGLQQQRSVEPMRLSMDTPMPELQVGPQEQELRQLLHKDKSKRSAVASSVVKQKLAEVILKKQQAALERTVHPNSPGIPYRTLEPLETEGATRSMLSSFLPPVPSLPSDPPEHFPLRKTVSEPNLKLRYKPKKSLERRKNPLLRKESAPPSLRRRPAETLGDSSPSSSSTPASGCSSPNDSEHGPNPILGSEADSDRRTHPTLGPRGPILGSPHTPLFLPHGLEPEAGGTLPSRLQPILLLDPSGSHAPLLTVPGLGPLPFHFAQSLMTTERLSGSGLHWPLSRTRSEPLPPSATAPPPPGPMQPRLEQLKTHVQVIKRSAKPSEKPRLRQIPSAEDLETDGGGPGQVVDDGLEHRELGHGQPEARGPAPLQQHPQVLLWEQQRLAGRLPRGSTGDTVLLPLAQGGHRPLSRAQSSPAAPASLSAPEPASQARVLSSSETPARTLPFTTGLIYDSVMLKHQCSCGDNSRHPEHAGRIQSIWSRLQELAEVILKKQQAALERTVHPNSPGIPYR

SEQ ID NO: 861131 - protein, 952 aa, Homo sapiens
MDLRVGQRPPVEPPPEPTLLALQRPQRLHHHLFLAGLQQQRSVEPMRLSMDTPMPELQVGPQEQELRQLLHKDKSKRSAVASSVVKQKLAEVILKKQQAALERTVHPNSPGIPYRTLEPLETEGATRSMLSSFLPPVPSLPSDPPEHFPLRKTVSEPNLKLRYKPKKSLERRKNPLLRKESAPPSLRRRPAETLGDSSPSSSSTPASGCSSPNDSEHGPNPILGSEALLGQRLRLQETSVAPFALPTVSLLPAITLGLPAPARADSDRRTHPTLGPRGPILGSPHTPLFLPHGLEPEAGGTLPSRLQPILLLDPSGSHAPLLTVPGLGPLPFHFAQSLMTTERLSGSGLHWPLSRTRSEPLPPSATAPPPPGPMQPRLEQLKTHVQVIKRSAKPSEKPRLRQIPSAEDLETDGGGPGQVVDDGLEHRELGHGQPEARGPAPLQQHPQVLLWEQQRLAGRLPRGSTGDTVLLPLAQGGHRPLSRAQSSPAAPASLSAPEPASQARVLSSSETPARTLPFTTGLIYDSVMLKHQCSCGDNSRHPEHAGRIQSIWSRLQERGLRSQCECLRGRKASLEELQSVHSERHVLLYGTNPLSRLKLDNGKLAGLLAQRMFVMLPCGGVGVDTDTIWNELHSSNAARWAAGSVTDLAFKVASRELKNGFAVVRPPGHHADHSTAMGFCFFNSVAIACRQLQQQSKASKILIVDWDVHHGNGTQQTFYQDPSVLYISLHRHDDGNFFPGSGAVDEVGAGSGEGFNVNVAWAGGLDPPMGDPEYLAAFRIVVMPIAREFSPDLVLVSAGFDAAEGHPAPLGGYHVSAKCFGYMTQQLMNLAGGAVVLALEGGHDLTAICDASEACVAALLGNRVDPLSEEGWKQKPNLNAIRSLEAVIRVHSKYWGCMQRLASCPDSWVPRVPGADKEEVEAVTALASLSVGILAEDRPSEQLVEEEEPMNL

SEQ ID NO: 861132 - protein, 480 aa, Homo sapiens
MQACVGVRGVYPPGSMWVPAVAVLACSLQPRPWGVRTPWVPALTLAPAGLIYDSVMLKHQCSCGDNSRHPEHAGRIQSIWSRLQERGLRSQCECLRGRKASLEELQSVHSERHVLLYGTNPLSRLKLDNGKLAGLLAQRMFVMLPCGGVGVDTDTIWNELHSSNAARWAAGSVTDLAFKVASRELKNGFAVVRPPGHHADHSTAMGFCFFNSVAIACRQLQQQSKASKILIVDWDVHHGNGTQQTFYQDPSVLYISLHRHDDGNFFPGSGAVDEVGAGSGEGFNVNVAWAGGLDPPMGDPEYLAAFRIVVMPIAREFSPDLVLVSAGFDAAEGHPAPLGGYHVSAKCFGYMTQQLMNLAGGAVVLALEGGHDLTAICDASEACVAALLGNRVDPLSEEGWKQKPNLNAIRSLEAVIRVHSKYWGCMQRLASCPDSWVPRVPGADKEEVEAVTALASLSVGILAEDRPSEQLVEEEEPMNL

SEQ ID NO: 861133 - protein, 339 aa, Homo sapiens
MRALTLAPQVDTDTIWNELHSSNAARWAAGSVTDLAFKVASRELKNGFAVVRPPGHHADHSTAMGFCFFNSVAIACRQLQQQSKASKILIVDWDVHHGNGTQQTFYQDPSVLYISLHRHDDGNFFPGSGAVDEVGAGSGEGFNVNVAWAGGLDPPMGDPEYLAAFRIVVMPIAREFSPDLVLVSAGFDAAEGHPAPLGGYHVSAKCFGYMTQQLMNLAGGAVVLALEGGHDLTAICDASEACVAALLGNRVDPLSEEGWKQKPNLNAIRSLEAVIRVHSKYWGCMQRLASCPDSWVPRVPGADKEEVEAVTALASLSVGILAEDRPSEQLVEEEEPMNL

SEQ ID NO: 861134 - protein, 612 aa, Homo sapiens; identical to SEQ ID NO: 861124

SEQ ID NO: 861135 - protein, 170 aa, Homo sapiens
MLGTRLGGVRLVLVSAGFDAAEGHPAPLGGYHVSAKCFGYMTQQLMNLAGGAVVLALEGGHDLTAICDASEACVAALLGNRVDPLSEEGWKQKPNLNAIRSLEAVIRVHSKYWGCMQRLASCPDSWVPRVPGADKEEVEAVTALASLSVGILAEDRPSEQLVEEEEPMNL

SEQ ID NO: 861136 - protein, 915 aa, Homo sapiens; identical to SEQ ID NO: 861120

SEQ ID NO: 861137 - protein, 612 aa, Homo sapiens; identical to SEQ ID NO: 861124

SEQ ID NO: 861138 - protein, 416 aa, Homo sapiens
SSVSPSVKWGENSKHTSQSRAEEVDYGEENEDGTQVSPGAHYCSPTGAGCPRPCADTPGPQPQPMDLRVGQRPPVEPPPEPTLLALQRPQRLHHHLFLAGLQQQRSVEPMRLSMDTPMPELQVGPQEQELRQLLHKDKSKRSAVASSVVKQKLAEVILKKQQAALERTVHPNSPGIPYRTLEPLETEGATRSMLSSFLPPVPSLPSDPPEHFPLRKTVSEPNLKLRYKPKKSLERRKNPLLRKESAPPSLRRRPAETLGDSSPSSSSTPASGCSSPNDSEHGPNPILGSEADSDRRTHPTLGPRGPILGSPHTPLFLPHGLEPEAGGTLPSRLQPILLLDPSGSHAPLLTGESAASSGKGLGPCTLLRAKLGMDPSFLPISVPLSCALPCCTLAPHPIPSLPSIAPCGSHLIHTPS

SEQ ID NO: 861139 - protein, 501 aa, Homo sapiens
MDTQAGSVDEENGRQLGEVELQCGICTKWFTADTFGIDTSSCLPFMTNYSFHCNVCHHSGNTYFLRKQANLKEMCLSALANLTWQSRTQDEHPKTMFSKDKDIIPFIDKYWECMTTRQRPGKMTWPNNIVKTMSKERDVFLVKEHPDPGSKDPEEDYPKFGLLDQDLSNIGPAYDNQKQSSAVSTSGNLNGGIAAGSSGKGRGAKRKQQDGGTTGTTKKARSDPLFSAQRLPPHGYPLEHPFNKDGYRYILAEPDPHAPDPEKLELDCWAGKPIPGDLYRACLYERVLLALHDRAPQLKISDDRLTVVGEKGYSMVRASHGVRKGAWYFEITVDEMPPDTAARLGWSQPLGNLQAPLGYDKFSYSWRSKKGTKFHQSIGKHYSSGYGQGDVLGFYINLPEDTETAKSLPDTYKDKALIKFKSYLYFEEKDFVDKAEKSLKQTPHSEVSINFGPCFKYPPKDLTYRPMSDMGWGAVVEHTLADVLYHVETEVDGRRSPPWEP

SEQ ID NO: 861140 - protein, 259 aa, Homo sapiens
MAAAGAGPGQEAGAGPGPGAVANATGAEEGEMKPVAAGAAAPPGEGISAAPTVEPSSGEAEGGEANLVDVSGGLETESSNGKDTLEGAGDTSEVMDTQAGSVDEENGRQLGEVELQCGICTKWFTADTFGIDTSSCLPFMTNYSFHCNVCHHSGNTYFLRKQANLKEMCLSALANLTWQSRTQDEHPKTMFSKDKMECSDAISAQCTLCLLGPRDSPASASRVAGITGMRHHAQLIFCIFSRDRISPCWPGSSPTDLMI

SEQ ID NO: 861141 - protein, 628 aa, Homo sapiens
MAAAGAGPGQEAGAGPGPGAVANATGAEEGEMKPVAAGAAAPPGEGISAAPTVEPSSGEAEGGEANLVDVSGGLETESSNGKDTLEGAGDTSEVMDTQAGSVDEENGRQLGEVELQCGICTKWFTADTFGIDTSSCLPFMTNYSFHCNVCHHSGNTYFLRKQANLKEMCLSALANLTWQSRTQDEHPKTMFSKDKDIIPFIDKYWECMTTRQRPGKMTWPNNIVKTMSKERDVFLVKEHPDPGSKDPEEDYPKFGLLDQDLSNIGPAYDNQKQSSAVSTSGNLNGGIAAGSSGKGRGAKRKQQDGGTTGTTKKARSDPLFSAQRLPPHGYPLEHPFNKDGYRYILAEPDPHAPDPEKLELDCWAGKPIPGDLYRACLYERVLLALHDRAPQLKISDDRLTVVGEKGYSMVRASHGVRKGAWYFEITVDEMPPDTAARLGWSQPLGNLQAPLGYDKFSYSWRSKKGTKFHQSIGKHYSSGYGQGDVLGFYINLPEDTETAKSLPDTYKDKALIKFKSYLYFEEKDFVDKAEKSLKQTPHSEIIFYKNGVNQGVAYKDIFEGVYFPAISLYKSCTVSINFGPCFKYPPKDLTYRPMSDMGWGAVVEHTLADVLYHVETEVDGRRSPPWEP

SEQ ID NO: 861142 - protein, 628 aa, Homo sapiens; identical to SEQ ID NO: 861141

SEQ ID NO: 861143 - protein, 420 aa, Homo sapiens
MVRVALSLNPILKPSEENIEEFNDIQGQGHQGHHQHEDDEEDYPKLGLLDQDLSNIGPAYDNQKQSSAVSTSGNLNGGIAAGSSGKGRGAKRKQQDGGTTGTTKKARSDPLFSAQRLPPHGYPLEHPFNKDGYRYILAEPDPHAPDPEKLELDCWAGKPIPGDLYRACLYERVLLALHDRAPQLKISDDRLTVVGEKGYSMVRASHGVRKGAWYFEITVDEMPPDTAARLGWSQPLGNLQAPLGYDKFSYSWRSKKGTKFHQSIGKHYSSGYGQGDVLGFYINLPEDTETAKSLPDTYKDKALIKFKSYLYFEEKDFVDKAEKSLKQTPHSEIIFYKNGVNQGVAYKDIFEGVYFPAISLYKSCTVSINFGPCFKYPPKDLTYRPMSDMGWGAVVEHTLADVLYHVETEVDGRRSPPWEP

SEQ ID NO: 861144 - protein, 251 aa, Homo sapiens
MTRSECKRGKVVRKGARKKRWGIEGMKKGYSMVRASHGVRKGAWYFEITVDEMPPDTAARLGWSQPLGNLQAPLGYDKFSYSWRSKKGTKFHQSIGKHYSSGYGQGDVLGFYINLPEDTETAKSLPDTYKDKALIKFKSYLYFEEKDFVDKAEKSLKQTPHSEIIFYKNGVNQGVAYKDIFEGVYFPAISLYKSCTVSINFGPCFKYPPKDLTYRPMSDMGWGAVVEHTLADVLYHVETEVDGRRSPPWEP

SEQ ID NO: 861145 - protein, 628 aa, Homo sapiens; identical to SEQ ID NO: 861141

SEQ ID NO: 861146 - protein, 628 aa, Homo sapiens; identical to SEQ ID NO: 861141

SEQ ID NO: 861147 - protein, 527 aa, Homo sapiens
MAAAGAGPGQEAGAGPGPGAVANATGAEEGEMKPVAAGAAAPPGEGISAAPTVEPSSGEAEGGEANLVDVSGGLETESSNGKDTLEGAGDTSEVMDTQAGSVDEENGRQLGEVELQCGICTKWFTADTFGIDTSSCLPFMTNYSFHCNVCHHSGNTYFLRKQANLKEMCLSALANLTWQSRTQDEHPKTMFSKDKDIIPFIDKYWECMTTRQRPGKMTWPNNIVKTMSKERDVFLVKEHPDPGSKDPEEDYPKFGLLDQDLSNIGPAYDNQKQSSAVSTSGNLNGGIAAGSSGKGRGAKRKQQDGGTTGTTKKARSDPLFSAQRLPPHGYPLEHPFNKDGYRYILAEPDPHAPDPEKLELDCWAGKPIPGDLYRACLYERVLLALHDRAPQLKISDDRLTVVGEKGYSMVRASHGVRKGAWYFEITVDEMPPDTAARLGWSQPLGNLQAPLGYDKFSYSWRSKKGTKFHQSIGPYELDKPKEKGKITIIKKEGKAAEAVAAAVGTGATTAAVMAAAGIAAIGPWPLS

SEQ ID NO: 861148 - protein, 534 aa, Homo sapiens
MDTQAGSVDEENGRQLGEVELQCGICTKWFTADTFGIDTSSCLPFMTNYSFHCNVCHHSGNTYFLRKQANLKEMCLSALANLTWQSRTQDEHPKTMFSKDKDIIPFIDKYWECMTTRQRPGKMTWPNNIVKTMSKERDVFLVKEHPDPGSKDPEEDYPKFGLLDQDLSNIGPAYDNQKQSSAVSTSGNLNGGIAAGSSGKGRGAKRKQQDGGTTGTTKKARSDPLFSAQRLPPHGYPLEHPFNKDGYRYILAEPDPHAPDPEKLELDCWAGKPIPGDLYRACLYERVLLALHDRAPQLKISDDRLTVVGEKGYSMVRASHGVRKGAWYFEITVDEMPPDTAARLGWSQPLGNLQAPLGYDKFSYSWRSKKGTKFHQSIGKHYSSGYGQGDVLGFYINLPEDTETAKSLPDTYKDKALIKFKSYLYFEEKDFVDKAEKSLKQTPHSEIIFYKNGVNQGVAYKDIFEGVYFPAISLYKSCTVSINFGPCFKYPPKDLTYRPMSDMGWGAVVEHTLADVLYHVETEVDGRRSPPWEP

SEQ ID NO: 861149 - protein, 628 aa, Homo sapiens; identical to SEQ ID NO: 861141

SEQ ID NO: 861150 - protein, 628 aa, Homo sapiens; identical to SEQ ID NO: 861141

SEQ ID NO: 861151 - protein, 456 aa, Homo sapiens
KGRGAKRKQQDGGTTGTTREGPEDIIPFIDKYWECMTTRQRPGKMTWPNNIVKTMSKERDVFLVKEHPDPGSKDPEEDYPKFGLLDQDLSNIGPAYDNQKQSSAVSTSGNLNGGIAAGSSGKGRGAKRKQQDGGTTGTTKKARSDPLFSAQRLPPHGYPLEHPFNKDGYRYILAEPDPHAPDPEKLELDCWAGKPIPGDLYRACLYERVLLALHDRAPQLKISDDRLTVVGEKGYSMVRASHGVRKGAWYFEITVDEMPPDTAARLGWSQPLGNLQAPLGYDKFSYSWRSKKGTKFHQSIGKHYSSGYGQGDVLGFYINLPEDTETAKSLPDTYKDKALIKFKSYLYFEEKDFVDKAEKSLKQTPHSEIIFYKNGVNQGVAYKDIFEGVYFPAISLYKSCTVSINFGPCFKYPPKDLTYRPMSDMGWGAVVEHTLADVLYHVETEVDGRRSPPWEP

SEQ ID NO: 861152 - protein, 413 aa, Homo sapiens
MFINSKTLLLFESKERDVFLVKEHPDPGSKDPEEDYPKFGLLDQDLSNIGPAYDNQKQSSAVSTSGNLNGGIAAGSSGKGRGAKRKQQDGGTTGTTKKARSDPLFSAQRLPPHGYPLEHPFNKDGYRYILAEPDPHAPDPEKLELDCWAGKPIPGDLYRACLYERVLLALHDRAPQLKISDDRLTVVGEKGYSMVRASHGVRKGAWYFEITVDEMPPDTAARLGWSQPLGNLQAPLGYDKFSYSWRSKKGTKFHQSIGKHYSSGYGQGDVLGFYINLPEDTETAKSLPDTYKDKALIKFKSYLYFEEKDFVDKAEKSLKQTPHSEIIFYKNGVNQGVAYKDIFEGVYFPAISLYKSCTVSINFGPCFKYPPKDLTYRPMSDMGWGAVVEHTLADVLYHVETEVDGRRSPPWEP

SEQ ID NO: 861153 - protein, 628 aa, Homo sapiens; identical to SEQ ID NO: 861141

SEQ ID NO: 861154 - protein, 591 aa, Homo sapiens
MAAAGAGPGQEAGAGPGPGAVANATGAEEGEMKPVAAGAAAPPGEGISAAPTVEPSSGEAEGGEANLVDVSGGLETESSNGKDTLEGAGDTSEVMDTQAGSVDEENGRQLGEVELQCGICTKWFTADTFGIDTSSCLPFMTNYSFHCNVCHHSGNTYFLRKQANLKEMCLSALANLTWQSRTQDEHPKTMFSKDKDIIPFIDKYWECMTTRQRPGKMTWPNNIVKTMSKERDVFLVKEHPDPGSKDPEEDYPKFGLLDQDLSNIGPAYDNQKQSSAVSTSGNLNGGIAAGSSGKGRGAKRKQQDGGTTGTTKKARSDPLFSAQRLPPHGYPLEHPFNKDGYRYILAEPDPHAPDPEKLELDCWAGKPIPGDLYRACLYERVLLALHDRAPQLKISDDRLTVVGEKGYSMVRASHGVRKGAWYFEITVDEMPPDTAARLGWSQPLGNLQAPLGYDKFSYSWRSKKGTKFHQSIGKHYSSGYGQGDVLGFYINLPEDTETAKSLPDTYKDKALIKFKSYLYFEEKDFVDKAEKSLKQTPHSEIIFYKNGVNQGVAYKDIFEGVYFPAISLYKSCTFPLTLDLELTYHVEKIQL

SEQ ID NO: 861155 - protein, 206 aa, Homo sapiens
MELTQPAEDLIQTQQTPASELGDPEDPGEEAADGSDTVVLSLFPCTPEPVNPEPDASVSSPQAGSSLKHSTTLTNRQRGNEVSALPATLDSLSIHQLAAQGELDQLKEHLRKGDNLVNKPDERGFTPLIWASAFGEIETVRFLLEWGADPHILAKERESALSLASTGGYTDIVGLLLERDVDINIYDWNGGTPLLLRCAREPREMR

SEQ ID NO: 861156 - protein, 111 aa, Homo sapiens
QPRRLEKPPWNWICSWETRMSWGNSSVTHWEGPGLSSNMSPHPGRKDVFFQTAECCDSALNSPCSLSLDKPKSGSCRFHKTSQGLGLGTALVRIPAPPQATGRRDLGYALA

SEQ ID NO: 861157 - protein, 206 aa, Homo sapiens; identical to SEQ ID NO: 861155

SEQ ID NO: 861158 - protein, 206 aa, Homo sapiens; identical to SEQ ID NO: 861155

SEQ ID NO: 861159 - protein, 206 aa, Homo sapiens; identical to SEQ ID NO: 861155

SEQ ID NO: 861160 - protein, 184 aa, Homo sapiens
MELTQPAEDLIQTQQTPASELGDPEDPGEEAADGSDTVVLSLFPCTPEPVNPEPDASVSSPQAGSSLKHSTTLTNRQRGNEVSALPATLDCDNLVNKPDERGFTPLIWASAFGEIETVRFLLEWGADPHILAKERESALSLASTGGYTDIVGLLLERDVDINIYDWNGGTPLLLRCAREPREMR

SEQ ID NO: 861161 - protein, 206 aa, Homo sapiens; identical to SEQ ID NO: 861155

SEQ ID NO: 861162 - protein, 102 aa, Homo sapiens [sequence omitted]

SEQ ID NO: 861163 - protein, 186 aa, Homo sapiens
MELTQPAEDLIQTQQTPASELGDPEDPGEEAADGSDTVVLSLFPCTPEPVNPEPDASVSSPQAGSSLKHSTTLTNRQRGNEVSALPATLDSLSIHQLAAQGELDQLKEHLRKGDNLVNKPDERGFTGADPHILAKERESALSLASTGGYTDIVGLLLERDVDINIYDWNGGTPLLLRCAREPREMR

SEQ ID NO: 861164 - protein, 184 aa, Homo sapiens; identical to SEQ ID NO: 861160

SEQ ID NO: 861165 - protein, 102 aa, Homo sapiens [sequence omitted]

SEQ ID NO: 861166 - protein, 206 aa, Homo sapiens; identical to SEQ ID NO: 861155

SEQ ID NO: 861167 - protein, 122 aa, Homo sapiens
AAPATGEATLKLDLQLGDTDELGKLQRHPLGGPWKQTGKLRRKLTAGTEPCYACLIHIVLGMEGKKEIRHMFLSWSKRCFFPNCRVLRFSTELTLEAPGSRRREGLRPALSSAEGLTPRSVH

SEQ ID NO: 861168 - protein, 206 aa, Homo sapiens; identical to SEQ ID NO: 861155

SEQ ID NO: 861169 - protein, 184 aa, Homo sapiens; identical to SEQ ID NO: 861160

SEQ ID NO: 861170 - protein, 247 aa, Homo sapiens
LKQTVSPRTHTSLVATFGPPSFERTGLSARGDRGGSWGAFPMELTQPAEDLIQTQQTPASELGDPEDPGEEAADGSDTVVLSLFPCTPEPVNPEPDASVSSPQAGSSLKHSTTLTNRQRGNEVSALPATLDSLSIHQLAAQGELDQLKEHLRKGDNLVNKPDERGFTPLIWASAFGEIETVRFLLEWGADPHILAKERESALSLASTGGYTDIVGLLLERDVDINIYDWNGGTPLLLRCAREPREMR

SEQ ID NO: 861171 - protein, 127 aa, Homo sapiens
MSEDSASVLPQPLSIHQLAAQGELDQLKEHLRKGDNLVNKPDERGFTPLIWASAFGEIETVRFLLEWGADPHILAKERESALSLASTGGYTDIVGLLLERDVDINIYDWNGGTPLLLRCAREPREMR

SEQ ID NO: 861172 - protein, 102 aa, Homo sapiens [sequence omitted]

SEQ ID NO: 861173 - protein, 203 aa, Homo sapiens
MELTQPAEDLIQTQQTPASELGDPEDPGEEAADGSDTVVLSLFPCTPEPVNPEPDASVSSPQAGSSLKHSTTLTNRQRGNEVSALPATLDSLSIHQLAAQGELDQLKEHLRKGDNLVNKPDERGFTPLIWASAFGEIETVRFLLEWVRPSPAGQRGGFPGALGWAGVLAVSAGALSLRCGCWLGAVAHACNPSTLGGRGGWIT

SEQ ID NO: 861174 - protein, 262 aa, Homo sapiens
  misc_feature (188)..(188): Xaa can be any naturally occurring amino acid
MELTQPAEDLIQTQQTPASELGDPEDPGEEAADGSDTVVLSLFPCTPEPVNPEPDASVSSPQAGSSLKHSTTLTNRQRGNEVSALPATLDCDNLVNKPDERGFTPLIWASAFGEIETVRFLLEWGADPHILAKERESALSLASTGGYTDIVGLLLERDVDINIYDWMEGTHCCTLCAEPREWVGWWPXADSHERSGNQMTAGPDTKDRIRHIQSQDWRDWRAADHTASPGPRSGGGGAQKLEKPSGRESFPQTAYNKTKRGP

SEQ ID NO: 861175 - protein, 267 aa, Homo sapiens
MYELRDWDFNISREAGVCIMTWKAAADRMDGTFNLPSDGSAVDVHINMEQAPIQSEPRVRLVMAQHMIRDIQTLLSRMECRGGPQPQHSQPPPQPPAVTPEPVALSSQTSEPVESEAPPREPMEAEEVEERAPAQNPELTPGPAPAGPTPAPETNAPNHPSPAEYVEVLQELQRLESRLQPFLQRYYEVLGAAATTDYNNNHEGREEDQRLINLVGESLRLLGNTFVALSDLRCNLACTPPRHLHVVRPMLITPMVSADIPKILGPV

SEQ ID NO: 861176 - protein, 109 aa, Homo sapiens
RWTSGHGLFCSREPPSGAGGGSRDEQDGASAETEPWAAAVPPEWVPIIQQDIQSQRKVKPQPPLSDAYLSGMPAKRRKLRSDIQKRLQEDPNYSPQRFPNAQRAFADDP

SEQ ID NO: 861177 - protein, 138 aa, Homo sapiens
  misc_feature (7)..(7): Xaa can be any naturally occurring amino acid
EGGNPPXIPGDMELGAEEFPDFKRENASPAPGTTAEEAMSRGPPPAPEGGSRDEQDGASAETEPWAAAVPPEWVPIIQQDIQSQRKVKPQPPLSDAYLSGMPAKRRKLRSDIQKRLQEDPNYSPQRFPNAQRAFADDP

SEQ ID NO: 861178 - protein, 1063 aa, Homo sapiens
KSLPDLQRRVQGPRRVSSEPRVRLVMAQHMIRDIQTLLSRMETLPYLQCRGGPQPQHSQPPPQPPAVTPEPVALSSQTSEPVESEAPPREPMEAEEVEERAPAQNPELTPGPAPAGPTPAPETNAPNHPSPAEYVEVLQELQRLESRLQPFLQRYYEVLGAAATTDYNNNHEGREEDQRLINLVGESLRLLGNTFVALSDLRCNLACTPPRHLHVVRPMSHYTTPMVLQQAAIPIQINVGTTVTMTGNGTRPPPTPNAEAPPPGPGQASSVAPSSTNVESSAEGAPPPGPAPPPATSHPRVIRISHQSVEPVVMMHMNIQDSGTQPGGVPSAPTGPLGPPGHGQTLGSTLIQLPSLPPEFMHAVAHQITHQAMVAAVASAAAGNDLEGEAWEVGHSPWWQLAGKGLASALFGLSLLPPTGQQVPGFPTAPTRVVIARPTPPQARPSHPGGPPVSGTLQGAGLGTNASLAQMVSGLVGQLLMQPVLVAQGTPGMAPPPAPATASASAGTTNTATTAGPAPGGPAQPPPTPQPSMADLQFSQLLGNLLGPAGPGAGGSGVASPTITVAMPGVPAFLQGMTDFLQATQTAPPPPPPPPPPPPAPEQQTMPPPGSPSGGAGSPGGLGLESLSPEFFTSVVQGVLSSLLGSLGARAGSSESIAAFIQRLSGSSNIFEPGADGALGFFGALLSLLCQNFSMVDVVMLLHGHFQPLQRLQPQLRSFFHQHYLGGQEPTPSNIRMATHTLITGLEEYVRESFSLVQVQPGVDIIRTNLEFLQEQFNSIAAHVLHCTDSGFGARLLELCNQGLFECLALNLHCLGGQQMELAAVINGRIRRMSRGVNPSLVSWLTTMMGLRLQVVLEHMPVGPDAILRYVRRVGDPPQPLPEEPMEVQGAERASPEPQRENASPAPGTTAEEAMSRGPPPAPEGGSRDEQDGASAETEPWAAAVPPEWVPIIQQDIQSQRKVKPQPPLSDAYLSGMPAKRRKTMQGEGPQLLLSEAVSRAAKAAGARPLTSPESLSRDLEAPEVQESYRQQLRSDIQKRLQEDPNYSPQRFPNAQRAFADDP

SEQ ID NO: 861179 - protein, 593 aa, Homo sapiens
MVSGLVGQLLMQPVLVAQGTPGMAPPPAPATASASAGTTNTATTAGPAPGGPAQPPPTPQPSMADLQFSQLLGNLLGPAGPGAGGSGVASPTITVAMPGVPAFLQGMTDFLQATQTAPPPPPPPPPPPPAPEQQTMPPPGSPSGGAGSPGGLGLESLSPEFFTSVVQGVLSSLLGSLGARAGSSESIAAFIQRLSGSSNIFEPGADGALGFFGALLSLLCQNFSMVDVVMLLHGHFQPLQRLQPQLRSFFHQHYLGGQEPTPSNIRMATHTLITGLEEYVRESFSLVQVQPGVDIIRTNLEFLQEQFNSIAAHVLHCTDSGFGARLLELCNQGLFECLALNLHCLGGQQMELAAVINGRIRRMSRGVNPSLVSWLTTMMGLRLQVVLEHMPVGPDAILRYVRRVGDPPQPLPEEPMEVQGAERASPEPQRENASPAPGTTAEEAMSRGPPPAPEGGSRDEQDGASAETEPWAAAVPPEWVPIIQQDIQSQRKVKPQPPLSDAYLSGMPAKRRKTMQGEGPQLLLSEAVSRAAKAAGARPLTSPESLSRDLEAPEVQESYRQQLRSDIQKRLQEDPNYSPQRFPNAQRAFADDP

SEQ ID NO: 861180 - protein, 1038 aa, Homo sapiens
KSLPDLQRRVQGPRRVSSEPRVRLVMAQHMIRDIQTLLSRMETLPYLQCRGGPQPQHSQPPPQPPAVTPEPVALSSQTSEPVESEAPPREPMEAEEVEERAPAQNPELTPGPAPAGPTPAPETNAPNHPSPAEYVEVLQELQRLESRLQPFLQRYYEVLGAAATTDYNNNHEGREEDQRLINLVGESLRLLGNTFVALSDLRCNLACTPPRHLHVVRPMSHYTTPMVLQQAAIPIQINVGTTVTMTGNGTRPPPTPNAEAPPPGPGQASSVAPSSTNVESSAEGAPPPGPAPPPATSHPRVIRISHQSVEPVVMMHMNIQDSGTQPGGVPSAPTGPLGPPGHGQTLGSTLIQLPSLPPEFMHAVAHQITHQAMVALAGKGLASALFGLSLLPPTGQQVPGFPTAPTRVVIARPTPPQARPSHPGGPPVSGTLQGAGLGTNASLAQMVSGLVGQLLMQPVLVAQGTPGMAPPPAPATASASAGTTNTATTAGPAPGGPAQPPPTPQPSMADLQFSQLLGNLLGPAGPGAGGSGVASPTITVAMPGVPAFLQGMTDFLQATQTAPPPPPPPPPPPPAPEQQTMPPPGSPSGGAGSPGGLGLESLSPEFFTSVVQGVLSSLLGSLGARAGSSESIAAFIQRLSGSSNIFEPGADGALGFFGALLSLLCQNFSMVDVVMLLHGHFQPLQRLQPQLRSFFHQHYLGGQEPTPSNIRMATHTLITGLEEYVRESFSLVQVQPGVDIIRTNLEFLQEQFNSIAAHVLHCTDSGFGARLLELCNQGLFECLALNLHCLGGQQMELAAVINGRIRRMSRGVNPSLVSWLTTMMGLRLQVVLEHMPVGPDAILRYVRRVGDPPQPLPEEPMEVQGAERASPEPQRENASPAPGTTAEEAMSRGPPPAPEGGSRDEQDGASAETEPWAAAVPPEWVPIIQQDIQSQRKVKPQPPLSDAYLSGMPAKRRKTMQGEGPQLLLSEAVSRAAKAAGARPLTSPESLSRDLEAPEVQESYRQQLRSDIQKRLQEDPNYSPQRFPNAQRAFADDP

SEQ ID NO: 861181 - protein, 1085 aa, Homo sapiens
KSLPDLQRRVQGPRRVSSEPRVRLVMAQHMIRDIQTLLSRMETLPYLQCRGGPQPQHSQPPPQPPAVTPEPVALSSQTSEPVESEAPPREPMEAEEVEERAPAQNPELTPGPAPAGPTPAPETNAPNHPSPAEYVEVLQELQRLESRLQPFLQRYYEVLGAAATTDYNNNHEGREEDQRLINLVGESLRLLGNTFVALSDLRCNLACTPPRHLHVVRPMSHYTTPMVLQQAAIPIQINVGTTVTMTGNGTRPPPTPNAEAPPPGPGQASSVAPSSTNVESSAEGAPPPGPAPPPATSHPRVIRISHQSVEPVVMMHMNIQGPLSLSPCPDSGTQPGGVPSAPTGPLGPPGHGQTLGVRVRASGQAELWVEKGKELSGWVEGVQVQGYIRPAPQAPPSSSCPPCPLSSCTPSPTRSLIRPWWHWLARAWPSALFGLSLLPPTGQQVPGFPTAPTRVVIARPTPPQARPSHPGGPPVSGTLQGAGLGTNASLAQMVSGLVGQLLMQPVLVAQGTPGMAPPPAPATASASAGTTNTATTAGPAPGGPAQPPPTPQPSMADLQFSQLLGNLLGPAGPGAGGSGVASPTITVAMPGVPAFLQGMTDFLQATQTAPPPPPPPPPPPPAPEQQTMPPPGSPSGGAGSPGGLGLESLSPEFFTSVVQGVLSSLLGSLGARAGSSESIAAFIQRLSGSSNIFEPGADGALGFFGALLSLLCQNFSMVDVVMLLHGHFQPLQRLQPQLRSFFHQHYLGGQEPTPSNIRMATHTLITGLEEYVRESFSLVQVQPGVDIIRTNLEFLQEQFNSIAAHVLHCTDSGFGARLLELCNQGLFECLALNLHCLGGQQMELAAVINGRIRRMSRGVNPSLVSWLTTMMGLRLQVVLEHMPVGPDAILRYVRRVGDPPQPLPEEPMEVQGAERASPEPQRENASPAPGTTAEEAMSRGPPPAPEGGSRDEQDGASAETEPWAAAVPPEWVPIIQQDIQSQRKVKPQPPLSDAYLSGMPAKRRKTMQGEGPQLLLSEAVSRAAKAAGARPLTSPESLSRDLEAPEVQESYRQQLRSDIQKRLQEDPNYSPQRFPNAQRAFADDP

SEQ ID NO: 861182 - protein, 1026 aa, Homo sapiens
KSLPDLQRRVQGPRRVSSEPRVRLVMAQHMIRDIQTLLSRMETLPYLQCRGGPQPQHSQPPPQPPAVTPEPVALSSQTSEPVESEAPPREPMEAEEVEERAPAQNPELTPGPAPAGPTPAPETNAPNHPSPAEYVEVLQELQRLESRLQPFLQRYYEVLGAAATTDYNNNHEGREEDQRLINLVGESLRLLGNTFVALSDLRCNLACTPPRHLHVVRPMSHYTTPMVLQQAAIPIQINVGTTVTMTGNGTRPPPTPNAEAPPPGPGQASSVAPSSTNVESSAEGAPPPGPAPPPATSHPRVIRISHQSVEPVVMMHMNIQDSGTQPGGVPSAPTGPLGPPGHGQTLGSTLIQLPSLPPEFMHAVAHQITHQAMVAAVASAAAGQQVPGFPTAPTRVVIARPTPPQARPSHPGGPPVSGTLQGAGLGTNASLAQMVSGLVGQLLMQPVLVAQGTPGMAPPPAPATASASAGTTNTATTAGPAPGGPAQPPPTPQPSMADLQFSQLLGNLLGPAGPGAGGSGVASPTITVAMPGVPAFLQGMTDFLQATQTAPPPPPPPPPPPPAPEQQTMPPPGSPSGGAGSPGGLGLESLSPEFFTSVVQGVLSSLLGSLGARAGSSESIAAFIQRLSGSSNIFEPGADGALGFFGALLSLLCQNFSMVDVVMLLHGHFQPLQRLQPQLRSFFHQHYLGGQEPTPSNIRMATHTLITGLEEYVRESFSLVQVQPGVDIIRTNLEFLQEQFNSIAAHVLHCTDSGFGARLLELCNQGLFECLALNLHCLGGQQMELAAVINGRIRRMSRGVNPSLVSWLTTMMGLRLQVVLEHMPVGPDAILRYVRRVGDPPQPLPEEPMEVQGAERASPEPQRENASPAPGTTAEEAMSRGPPPAPEGGSRDEQDGASAETEPWAAAVPPEWVPIIQQDIQSQRKVKPQPPLSDAYLSGMPAKRRKTMQGEGPQLLLSEAVSRAAKAAGARPLTSPESLSRDLEAPEVQESYRQQLRSDIQKRLQEDPNYSPQRFPNAQRAFADDP

SEQ ID NO: 861183 - protein, 1026 aa, Homo sapiens; identical to SEQ ID NO: 861182

SEQ ID NO: 861184 - protein, 977 aa, Homo sapiens
KSLPDLQRRVQGPRRVSSEPRVRLVMAQHMIRDIQTLLSRMETLPYLQCRGGPQPQHSQPPPQPPAVTPEPVALSSQTSEPVESEAPPREPMEAEEVEERAPAQNPELTPGPAPAGPTPAPETNAPNHPSPAEYVEVLQELQRLESRLQPFLQRYYEVLGAAATTDYNNNHEGREEDQRLINLVGESLRLLGNTFVALSDLRCNLACTPPRHLHVVRPMSHYTTPMVLQQAAIPIQINVGTTVTMTGNGTRPPPTPNAEAPPPGPGQASSVAPSSTNVESSAEGAPPPGPAPPPATSHPRVIRISHQSVEPVVMMHMNIQDSGTQPGGVPSAPTGPLGPPGHGQTLGSTLIQLPSLPPEFMHAVAHQITHQAMVAAVASAAAGQQVPGFPTAPTRVVIARPTPPQARPSHPGGPPVSGTLQGAGLGTNASLAQMVSGLVGQLLMQPVLVAQGTPGMAPPPAPATASASAGTTNTATTAGPAPGGPAQPPPTPQPSMADLQFSQLLGNLLGPAGPGAGGSGVASPTITVAMPGVPAFLQGMTDFLQATQTAPPPPPPPPPPPPAPEQQTMPPPGSPSGGAGSPGGLGLESLSPEFFTSVVQGVLSSLLGSLGARAGSSESIAAFIQRLSGSSNIFEPGADGALGFFGALLSLLCQNFSMVDVVMLLHGHFQPLQRLQPQLRSFFHQHYLGGQEPTPSNIRMATHTLITGLEEYVRESFSLVQVQPGVDIIRTNLEFLQEQFNSIAAHVLHCTDSGFGARLLELCNQGLFECLALNLHCLGGQQMELAAVINGRIRRMSRGVNPSLVSWLTTMMGLRLQVVLEHMPVGPDAILRYVRRVGDPPQPLPEEPMEVQGAERASPEPQRENASPAPGTTAEEAMSRGPPPAPEGGSRDEQDGASAETEPWAAAVPPEWVPIIQQDIQSQRKVKPQPPLSDAYLSGMPAKRRKLRSDIQKRLQEDPNYSPQRFPNAQRAFADDP

SEQ ID NO: 861185 - protein, 977 aa, Homo sapiens; identical to SEQ ID NO: 861184

SEQ ID NO: 861186 - protein, 1020 aa, Homo sapiens
KSLPDLQRRVQGPRRVSSEPRVRLVMAQHMIRDIQTLLSRMETLPYLQCRGGPQPQHSQPPPQPPAVTPEPVALSSQTSEPVESEAPPREPMEAEEVEERAPAQNPELTPGPAPAGPTPAPETNAPNHPSPAEYVEVLQELQRLESRLQPFLQRYYEVLGAAATTDYNNNHEGREEDQRLINLVGESLRLLGNTFVALSDLRCNLACTPPRHLHVVRPMSHYTTPMVLQQAAIPIQINVGTTVTMTGNGTRPPPTPNAEAPPPGPGQASSVAPSSTNVESSAEGAPPPGPAPPPATSHPRVIRISHQSVEPVVMMHMNIQDSGTQPGGVPSAPTGPLGPPGHGQTLGSTLIQLPSLPPEFMHAVAHQITHQAMVAAVASAAAGQQVPGFPTAPTRVVIARPTPPQARPSHPGGPPVSGTLQGAGLGTNASLAQMVSGLVGQLLMQPVLVAQGTPGMAPPPAPATASASAGTTNTATTAGPAPGGPAQPPPTPQPSMADLQFSQLLGNLLGPAGPGAGGSGVASPTITVAMPGVPAFLQGMTDFLQATQTAPPPPPPPPPPPPAPEQQTMPPPGSPSGGAGSPGGLGLESLSPEFFTSVVQGVLSSLLGSLGARAGSSESIAAFIQRLSGSSNIFEPGADGALGFFGALLSLLCQNFSMVDVVMLLHGHFQPLQRLQPQLRSFFHQHYLGGQEPTPSNIRMATHTLITGLEEYVRESFSLVQVQPGVDIIRTNLEFLQEQFNSIAAHVLHCTDSGFGARLLELCNQGLFECLALNLHCLGGQQMELAAVINGRIRRMSRGVNPSLVSWLTTMMGLRLQVVLEHMPVGPDAILRYVRRPLPEEPMEVQGAERASPEPQRENASPAPGTTAEEAMSRGPPPAPEGGSRDEQDGASAETEPWAAAVPPEWVPIIQQDIQSQRKVKPQPPLSDAYLSGMPAKRRKTMQGEGPQLLLSEAVSRAAKAAGARPLTSPESLSRDLEAPEVQESYRQQLRSDIQKRLQEDPNYSPQRFPNAQRAFADDP

SEQ ID NO: 861187 - protein, 970 aa, Homo sapiens
KSLPDLQRRVQGPRRVSSEPRVRLVMAQHMIRDIQTLLSRMETLPYLQCRGGPQPQHSQPPPQPPAVTPEPVALSSQTSEPVESEAPPREPMEAEEVEERAPAQNPELTPGPAPAGPTPAPETNAPNHPSPAEYVEVLQELQRLESRLQPFLQRYYEVLGAAATTDYNNNHEGREEDQRLINLVGESLRLLGNTFVALSDLRCNLACTPPRHLHVVRPMSHYTTPMVLQQAAIPIQINVGTTVTMTGNGTRPPPTPNAEAPPPGPGQASSVAPSSTNVESSAEGAPPPGPAPPPATSHPRVIRISHQSVEPVVMMHMNIQDSGTQPGGVPSAPTGPLGPPGHGQTLGSTLIQLPSLPPEFMHAVAHQITHQAMVAAVASAAAGQQVPGFPTAPTRVVIARPTPPQARPSHPGGPPVSGTLQGAGLGTNASLAQMVSGLVGQLLMQPVLVAQGTPGMAPPPAPATASASAGTTNTATTAGPAPGGPAQPPPTPQPSMADLQFSQLLGNLLGPAGPGAGGSGVASPTITVAMPGVPAFLQGMTDFLQATQTAPPPPPPPPPPPPAPEQQTMPPPGSPSGGAGSPGGLGLESLSPEFFTSVVQGVLSSLLGSLGARAGSSESIAAFIQRLSGSSNIFEPGADGALGFFGALLSLLCQNFSMVDVVMLLHGHFQPLQRLQPQLRSFFHQHYLGGQEPTPSNIRMATHTLITGLEEYVRESFSLVQVQPGVDIIRTNLEFLQEQFNSIAAHVLHCTDSGFGARLLELCNQGLFECLALNLHCLGGQQMELAAVINGRIRRMSRGVNPSLVSWLTTMMGLRLQVVLEHMPVGPDAILRYVRRVGDPPQPLPEEPMEVQGAERASPEPQRENASPAPGTTAEEAMSRGPPPAPEGGSRDEQDGASAETEPWAAAVPPEWVPIIQQDIQSQRKVKPQPPLSDAYLSGMPAKRRKLHPVHPGSPLKEQEVDLGTWPLLL

SEQ ID NO: 861188 - protein, 978 aa, Homo sapiens
KSLPDLQRRVQGPRRVSSEPRVRLVMAQHMIRDIQTLLSRMETLPYLQCRGGPQPQHSQPPPQPPAVTPEPVALSSQTSEPVESEAPPREPMEAEEVEERAPAQNPELTPGPAPAGPTPAPETNAPNHPSPAEYVEVLQELQRLESRLQPFLQRYYEVLGAAATTDYNNNHEGREEDQRLINLVGESLRLLGNTFVALSDLRCNLACTPPRHLHVVRPMSHYTTPMVLQQAAIPIQINVGTTVTMTGNGTRPPPTPNAEAPPPGPGQASSVAPSSTNVESSAEGAPPPGPAPPPATSHPRVIRISHQSVEPVVMMHMNIQDSGTQPGGVPSAPTGPLGPPGHGQTLGSTLIQLPSLPPEFMHAVAHQITHQAMVAAVASAAAGQQVPGFPTAPTRVVIARPTPPQARPSHPGGPPVSGTLQGAGLGTNASLAQMVSGLVGQLLMQPVLVAQGTPGMAPPPAPATASASAGTTNTATTAGPAPGGPAQPPPTPQPSMADLQFSQLLGNLLGPAGPGAGGSGVASPTITVAMPGVPAFLQGMTDFLQATQTAPPPPPPPPPPPPAPEQQTMPPPGSPSGGAGSPGGLGLESLSPEFFTSVVQGVLSSLLGSLGARAGSSESIAAFIQRLSGSSNIFEPGADGALGFFGALLSLLCQNFSMVDVVMLLHGHFQPLQRLQPQLRSFFHQHYLGGQEPTPSNIRMATHTLITGLEEYVRESFSLVQVQPGVDIIRTNLEFLQEQFNSIAAHVLHCTDSGFGARLLELCNQGLFECLALNLHCLGGQQMELAAVINGRIRRMSRGVNPSLVSWLTTMMGLRLQVVLEHMPVGPDAILRYVRRVGDPPQPLPEEPMEVQGAERASPEPQEWVPIIQQDIQSQRKVKPQPPLSDAYLSGMPAKRRKTMQGEGPQLLLSEAVSRAAKAAGARPLTSPESLSRDLEAPEVQESYRQQLRSDIQKRLQEDPNYSPQRFPNAQRAFADDP

SEQ ID NO: 861189 - protein, 387 aa, Homo sapiens
KSLPDLQRRVQGPRRVSSEPRVRLVMAQHMIRDIQTLLSRMETLPYLQCRGGPQPQHSQPPPQPPAVTPEPVALSSQTSEPVESEAPPREPMEAEEVEERAPAQNPELTPGPAPAGPTPAPETNAPNHPSPAEYVEVLQELQRLESRLQPFLQRYYEVLGAAATTDYNNNHEGREEDQRLINLVGESLRLLGNTFVALSDLRCNLACTPPRHLHVVRPMSHYTTPMVLQQAAIPIQINVGTTVTMTGNGTRPPPTPNAEAPPPGPGQASSVAPSSTNVESSAEGAPPPGPAPPPATSHPRVIRISHQSVEPVVMMHMNIQDSGTQPGGVPSAPTGPLGPPGHGQTLDGNPHIDHGARRVCAGEFFLGAGSARCGHHPDKPGISPRAV

SEQ ID NO: 861190 - protein, 587 aa, Homo sapiens
KSLPDLQRRVQGPRRVSSEPRVRLVMAQHMIRDIQTLLSRMETLPYLQCRGGPQPQHSQPPPQPPAVTPEPVALSSQTSEPVESEAPPREPMEAEEVEERAPAQNPELTPGPAPAGPTPAPETNAPNHPSPAEYVEVLQELQRLESRLQPFLQRYYEVLGAAATTDYNNNHEGREEDQRLINLVGESLRLLGNTFVALSDLRCNLACTPPRHLHVVRPMSHYTTPMVLQQAAIPIQINVGTTVTMTGNGTRPPPTPNAEAPPPGPGQASSVAPSSTNVESSAEGAPPPGPAPPPATSHPRVIRISHQSVEPVVMMHMNIQDSGTQPGGVPSAPTGPLGPPGHGQTLGSTLIQLPSLPPEFMHAVAHQITHQAMVAAVASAAAGQQVPGFPTAPTRVVIARPTPPQARPSHPGGPPVSGTLQGAGLGTNASLAQMVSGLVGQLLMQPVLVAQGTPGMAPPPAPATASASAGTTNTATTAGPAPGGPAQPPPTPQPSMADLQFSQLLGNLLGPAGPGAGGSGVASPTITVAMPGVPAFLQGMTDFLQATQTAPPPPPPASTPTTCPRAADHAPTRLPFWWRRESWRPGS

SEQ ID NO: 861191 - protein, 852 aa, Homo sapiens
KSLPDLQRRVQGPRRVSSEPRVRLVMAQHMIRDIQTLLSRMETLPYLQCRGGPQPQHSQPPPQPPAVTPEPVALSSQTSEPVESEAPPREPMEAEEVEERAPAQNPELTPGPAPAGPTPAPETNAPNHPSPAEYVEVLQELQRLESRLQPFLQRYYEVLGAAATTDYNNNHEGREEDQRLINLVGESLRLLGNTFVALSDLRCNLACTPPRHLHVVRPMSHYTTPMVLQQAAIPIQINVGTTVTMTGNGTRPPPTPNAEAPPPGPGQASSVAPSSTNVESSAEGAPPPGPAPPPATSHPRVIRISHQSVEPVVMMHMNIQDSGTQPGGVPSAPTGPLGPPGHGQTLGSTLIQLPSLPPEFMHAVAHQITHQAMVAAVASAAAGQQVPGFPTAPTRVVIARPTPPQARPSHPGGPPVSGTLQGAGLGTNASLAQMVSGLVGQLLMQPVLVAQGTPGMAPPPAPATASASAGTTNTATTAGPAPGGPAQPPPTPQPSMADLQFSQLLGNLLGPAGPGAGGSGVASPTITVAMPGVPAFLQGMTDFLQATQTAPPPPPPPPPPPPAPEQQTMPPPGSPSGGAGSPGGLGLESLSPEFFTSVVQGVLSSLLGSLGARAGSSESIAAFIQRLSGSSNIFEPGADGALGFFGALLSLLCQNFSMVDVVMLLHGHFQPLQRLQPQLRSFFHQHYLGGQEPTPSNIRMATHTLITGLEEYVRESFSLVQVQPGVDIIRTNLEFLQEQFNSIAAHVLHCTDSGFGARLLELCNQGLFECLALNLHCLGGQQMELAAVINGRIRRMSRGVNPSLVSWLTTMMGLRLQVVLEHMPVGPDAILRYVRRVGDPPQPLPDVSMASE

SEQ ID NO: 861192 - protein, 534 aa, Homo sapiens
KSLPDLQRRVQGPRRVSSEPRVRLVMAQHMIRDIQTLLSRMETLPYLQCRGGPQPQHSQPPPQPPAVTPEPVALSSQTSEPVESEAPPREPMEAEEVEERAPAQNPELTPGPAPAGPTPAPETNAPNHPSPAEYVEVLQELQRLESRLQPFLQRYYEVLGAAATTDYNNNHEGREEDQRLINLVGESLRLLGNTFVALSDLRCNLACTPPRHLHVVRPMSHYTTPMVLQQAAIPIQINVGTTVTMTGNGTRPPPTPNAEAPPPGPGQASSVAPSSTNVESSAEGAPPPGPAPPPATSHPRVIRISHQSVEPVVMMHMNIQDSGTQPGGVPSAPTGPLGPPGHGQTLGSTLIQLPSLPPEFMHAVAHQITHQAMVAAVASAAAGNDLEGEAWEVGHSPWWQLAGKGLALSPLRSVSSATHRTAGARLPNSSNPGGDCPAHSSTGSAFPSWRAPSLWDTAGRRSGYQCLVGPDGERPCGAASYAASPCGSGDPRYGSTASPCHCFCQCWHHQHSYHSWPRSWGACPASTHPSTLHG

SEQ ID NO: 861193 - protein, 519 aa, Homo sapiens
KSLPDLQRRVQGPRRVSSEPRVRLVMAQHMIRDIQTLLSRMETLPYLQCRGGPQPQHSQPPPQPPAVTPEPVALSSQTSEPVESEAPPREPMEAEEVEERAPAQNPELTPGPAPAGPTPAPETNAPNHPSPAEYVEVLQELQRLESRLQPFLQRYYEVLGAAATTDYNNNHEGREEDQRLINLVGESLRLLGNTFVALSDLRCNLACTPPRHLHVVRPMSHYTTPMVLQQAAIPIQINVGTTVTMTGNGTRPPPTPNAEAPPPGPGQASSVAPSSTNVESSAEGAPPPGPAPPPATSHPRVIRISHQSVEPVVMMHMNIQDSGTQPGGVPSAPTGPLGPPGHGQTLGQQVPGFPTAPTRVVIARPTPPQARPSHPGGPPVSGTLQGAGLGTNASLAQMVSGLVGQLLMQPVLVAQGTPGMAPPPAPATASASAGTTNTATTAGPAPGGPAQPPPTPQPSMADLQFSQLLGNLLGPAGPGAGGSGVASPTITVAMPGVPAFLQGMTDFLQATQTAPAAAK

SEQ ID NO: 861194 - protein, 744 aa, Homo sapiens
KSLPDLQRRVQGPRRVSSEPRVRLVMAQHMIRDIQTLLSRMETLPYLQCRGGPQPQHSQPPPQPPAVTPEPVALSSQTSEPVESEAPPREPMEAEEVEERAPAQNPELTPGPAPAGPTPAPETNAPNHPSPAEYVEVLQELQRLESRLQPFLQRYYEVLGAAATTDYNNNHEGREEDQRLINLVGESLRLLGNTFVALSDLRCNLACTPPRHLHVVRPMSHYTTPMVLQQAAIPIQINVGTTVTMTGNGTRPPPTPNAEAPPPGPGQASSVAPSSTNVESSAEGAPPPGPAPPPATSHPRVIRISHQSVEPVVMMHMNIQDSGTQPGGVPSAPTGPLGPPGHGQTLGSTLIQLPSLPPEFMHAVAHQITHQAMVAAVASAAAGQQVPGFPTAPTRVVIARPTPPQARPSHPGGPPVSGTLQGAGLGTNASLAQMVSGLVGQLLMQPVLVAQGTPGMAPPPAPATASASAGTTNTATTAGPAPGGPAQPPPTPQPSMADLQFSQLLGNLLGPAGPGAGGSGVASPTITVAMPGVPAFLQGMTDFLQATQTAPPPPPPPPPPPPAPEQQTMPPPGSPSGGAGSPGGLGLESLSPEFFTSVVQGVLSSLLGSLGARAGSSESIAAFIQRLSGSSNIFEPGADGALGFFGALLSLLCQNFSMVDVVMLLHGHFQPLQRLQPQLRSFFHQHYLGGQEPTPSNIRMATHTLITGLEEYVRESFVSNPSLFLSSPGSGQGSCLLHSQSYDS

SEQ ID NO: 861195 - protein, 49 aa, Homo sapiens
GEKEVGLQGMNWRCGGLSVGFSQNNFPYPFPRVTALLWMFTSTWNRPRF

SEQ ID NO: 861196 - protein, 217 aa, Homo sapiens
DSDDGVLGFVLHLMGHALTLISLAGSRLTISSAPTGPLGPPGHGQTLGQQVPGFPTAPTRVVIARPTPPQARPSHPGGPPVSGTLQGAGLGTNASLAQMVSGLVGQLLMQPVLVAQGTPGMAPPPAPATASASAGTTNTATTAGPAPGGPAQPPPTPQPSMADLQFSQLLGNLLGPAGPGAGGSGVASPTITVAMPGVPAFLQGMTDFLQVSGWLAI

SEQ ID NO: 861197 - protein, 105 aa, Homo sapiens
MERVSRMVALDLTLILFSLPTPCPQTMQGEGPQLLLSEAVSRAAKAAGARPLTSPESLSRDLEAPEVQESYRQQLRSDIQKRLQEDPNYSPQRFPNAQRAFADDP

SEQ ID NO: 861198 - protein, 1026 aa, Homo sapiens; identical to SEQ ID NO: 861182

SEQ ID NO: 861199 - protein, 990 aa, Homo sapiens
KSLPDLQRRVQGPRRVSSEPRVRLVMAQHMIRDIQTLLSRMETLPYLQCRGGPQPQHSQPPPQPPAVTPEPVALSSQTSEPVESEAPPREPMEAEEVEERAPAQNPELTPGPAPAGPTPAPETNAPNHPSPAEYVEVLQELQRLESRLQPFLQRYYEVLGAAATTDYNNNHEGREEDQRLINLVGESLRLLGNTFVALSDLRCNLACTPPRHLHVVRPMSHYTTPMVLQQAAIPIQINVGTTVTMTGNGTRPPPTPNAEAPPPGPGQASSVAPSSTNVESSAEGAPPPGPAPPPATSHPRVIRISHQSVEPVVMMHMNIQDSGTQPGGVPSAPTGPLGPPGHGQTLGQQVPGFPTAPTRVVIARPTPPQARPSHPGGPPVSGTLQGAGLGTNASLAQMVSGLVGQLLMQPVLVAQGTPGMAPPPAPATASASAGTTNTATTAGPAPGGPAQPPPTPQPSMADLQFSQLLGNLLGPAGPGAGGSGVASPTITVAMPGVPAFLQGMTDFLQATQTAPPPPPPPPPPPPAPEQQTMPPPGSPSGGAGSPGGLGLESLSPEFFTSVVQGVLSSLLGSLGARAGSSESIAAFIQRLSGSSNIFEPGADGALGFFGALLSLLCQNFSMVDVVMLLHGHFQPLQRLQPQLRSFFHQHYLGGQEPTPSNIRMATHTLITGLEEYVRESFSLVQVQPGVDIIRTNLEFLQEQFNSIAAHVLHCTDSGFGARLLELCNQGLFECLALNLHCLGGQQMELAAVINGRIRRMSRGVNPSLVSWLTTMMGLRLQVVLEHMPVGPDAILRYVRRVGDPPQPLPEEPMEVQGAERASPEPQRENASPAPGTTAEEAMSRGPPPAPEGGSRDEQDGASAETEPWAAAVPPEWVPIIQQDIQSQRKVKPQPPLSDAYLSGMPAKRRKTMQGEGPQLLLSEAVSRAAKAAGARPLTSPESLSRDLEAPEVQESYRQQLRSDIQKRLQEDPNYSPQRFPNAQRAFADDP

SEQ ID NO: 861200 - protein, 593 aa, Homo sapiens; identical to SEQ ID NO: 861179

SEQ ID NO: 861201 - protein, 977 aa, Homo sapiens; identical to SEQ ID NO: 861184

SEQ ID NO: 861202 - protein, 998 aa, Homo sapiens
KSLPDLQRRVQGPRRVSSEPRVRLVMAQHMIRDIQTLLSRMETLPYLQCRGGPQPQHSQPPPQPPAVTPEPVALSSQTSEPVESEAPPREPMEAEEVEERAPAQNPELTPGPAPAGPTPAPETNAPNHPSPAEYVEVLQELQRLESRLQPFLQRYYEVLGAAATTDYNNNHEGREEDQRLINLVGESLRLLGNTFVALSDLRCNLACTPPRHLHVVRPMSHYTTPMVLQQAAIPIQINVGTTVTMTGNGTRPPPTPNAEAPPPGPGQASSVAPSSTNVESSAEGAPPPGPAPPPATSHPRVIRISHQSVEPVVMMHMNIQDSGTQPGGVPSAPTGPLGPPGHGQTLGSTLIQLPSLPPEFMHAVAHQITHQAMVAAVASAAAGQQVPGFPTAPTRVVIARPTPPQARPSHPGGPPVSGTLQGAGLGTNASLAQMVSGLVGQLLMQPVLVAQGTPGMAPPPAPATASASAGTTNTATTAGPAPGGPAQPPPTPQPSMADLQFSQLLGNLLGPAGPGAGGSGVASPTITVAMPGVPAFLQGMTDFLQATQTAPPPPPPPPPPPPAPEQQTMPPPGSPSGGAGSPGGLGLESLSPEFFTSVVQGVLSSLLGSLGARAGSSESIAAFIQRLSGSSNIFEPGADGALGFFGALLSLLCQNFSMVDVVMLLHGHFQPLQRLQPQLRSFFHQHYLGGQEPTPSNIRMATHTLITGLEEYVRESFSLVQVQPGVDIIRTNLEFLQEQFNSIAAHVLHCTDSGFGARLLELCNQGLFECLALNLHCLGGQQMELAAVINGRIRRMSRGVNPSLVSWLTTMMGLRLQVVLEHMPVGPDAILRYVRRVGDPPQPLPEEPMEVQGAERASPEPQRENASPAPGTTAEEAMSRGPPPAPEGGSRDEQDGASAETEPWAAAVPPEWVPIIQQDIQSQRKVKPQPPLSDAYLSGMPAKRRKTMQGEGPQLLLSEAVSRAAKAAGARPLTSPESLSRDLEAPEVQESYRQQVPP

SEQ ID NO: 861203 - protein, 977 aa, Homo sapiens; identical to SEQ ID NO: 861184

SEQ ID NO: 861204 - protein, 1095 aa, Homo sapiens
KSLPDLQRRVQGPRRVSSEPRVRLVMAQHMIRDIQTLLSRMETLPYLQCRGGPQPQHSQPPPQPPAVTPEPVALSSQTSEPVESEAPPREPMEAEEVEERAPAQNPELTPGPAPAGPTPAPETNAPNHPSPAEYVEVLQELQRLESRLQPFLQRYYEVLGAAATTDYNNNHEGREEDQRLINLVGESLRLLGNTFVALSDLRCNLACTPPRHLHVVRPMSHYTTPMVLQQAAIPIQINVGTTVTMTGNGTRPPPTPNAEAPPPGPGQASSVAPSSTNVESSAEGAPPPGPAPPPATSHPRVIRISHQSVEPVVMMHMNIQDSGTQPGGVPSAPTGPLGPPGHGQTLGSTLIQLPSLPPEFMHAVAHQITHQAMVAAVASAAAGQQVPGFPTAPTRVVIARPTPPQARPSHPGGPPVSGTLQGAGLGTNASLAQMVSGLVGQLLMQPVLVAQGTPGMAPPPAPATASASAGTTNTATTAGPAPGGPAQPPPTPQPSMADLQFSQLLGNLLGPAGPGAGGSGVASPTITVAMPGVPAFLQGMTDFLQATQTAPPPPPPPPPPPPAPEQQTMPPPGSPSGGAGSPGGLGLESLSPEFFTSVVQGVLSSLLGSLGARAGSSESIAAFIQRLSGSSNIFEPGADGALGFFGALLSLLCQNFSMVDVVMLLHGHFQPLQRLQPQLRSFFHQHYLGGQEPTPSNIRMATHTLITGLEEYVRESFVSNPSLFLSSPGSGQGSCLLHSQSYDSGFWDLCVILSLSPWCRFSQVWTSSGQTWNFSKSSLIALLRMCCIAQVRGWPGGGKWGLLHVQGCHVPAFPPCILPTDSGFGARLLELCNQGLFECLALNLHCLGGQQMELAAVINGRIRRMSRGVNPSLVSWLTTMMGLRLQVVLEHMPVGPDAILRYVRRVGDPPQPLPEEPMEVQGAERASPEPQRENASPAPGTTAEEAMSRGPPPAPEGGSRDEQDGASAETEPWAAAVPPEWVPIIQQDIQSQRKVKPQPPLSDAYLSGMPAKRRKTMQGEGPQLLLSEAVSRAAKAAGARPLTSPESLSRDLEAPEVQESYRQQLRSDIQKRLQEDPNYSPQRFPNAQRAFADDP

SEQ ID NO: 861205 - protein, 1003 aa, Homo sapiens
KSLPDLQRRVQGPRRVSSEPRVRLVMAQHMIRDIQTLLSRMETLPYLQCRGGPQPQHSQPPPQPPAVTPEPVALSSQTSEPVESEAPPREPMEAEEVEERAPAQNPELTPGPAPAGPTPAPETNAPNHPSPAEYVEVLQELQRLESRLQPFLQRYYEVLGAAATTDYNNNHEGREEDQRLINLVGESLRLLGNTFVALSDLRCNLACTPPRHLHVVRPMSHYTTPMVLQQAAIPIQINVGTTVTMTGNGTRPPPTPNAEAPPPGPGQASSVAPSSTNVESSAEGAPPPGPAPPPATSHPRVIRISHQSVEPVVMMHMNIQDSGTQPGGVPSAPTGPLGPPGHGQTLGSTLIQLPSLPPEFMHAVAHQITHQAMVAAVASAAAGQQVPGFPTAPTRVVIARPTPPQARPSHPGGPPVSGTLQGAGLGTNASLAQMVSGLVGQLLMQPVLVAQGTPGMAPPPAPATASASAGTTNTATTAGPAPGGPAQPPPTPQPSMADLQFSQLLGNLLGPAGPGAGGSGVASPTITVAMPGVPAFLQGMTDFLQATQTAPPPPPPPPPPPPAPEQQTMPPPGSPSGGAGSPGGLGLESLSPEFFTSVVQGVLSSLLGSLGARAGSSESIAAFIQRLSGSSNIFEPGADGALGFFGALLSLLCQNFSMVDVVMLLHGHFQPLQRLQPQLRSFFHQHYLGGQEPTPSNIRMATHTLITGLEEYVRESFSLVQVQPGVDIIRTNLEFLQEQFNSIAAHVLHCTDSGFGARLLELCNQGLFECLALNLHCLGGQQMELAAVINGRIRRMSRGVNPSLVSWLTTMMGLRLQVVLEHMPVGPDAILRYVRRVGDPPQPLPEEPMEVQGAERASPEPQRENASPAPGTTAEEAMSRGPPPAPEGGSRDEQDGASAETEPWAAAVPPVSVRKKSSGSWQLKVKDITIFSFPPQEWVPIIQQDIQSQRKVKPQPPLSDAYLSGMPAKRRKLRSDIQKRLQEDPNYSPQRFPNAQRAFADDP

SEQ ID NO: 861206 - protein, 929 aa, Homo sapiens
KSLPDLQRRVQGPRRVSSEPRVRLVMAQHMIRDIQTLLSRMETLPYLQCRGGPQPQHSQPPPQPPAVTPEPVALSSQTSEPVESEAPPREPMEAEEVEERAPAQNPELTPGPAPAGPTPAPETNAPNHPSPAEYVEVLQELQRLESRLQPFLQRYYEVLGAAATTDYNNNHEGREEDQRLINLVGESLRLLGNTFVALSDLRCNLACTPPRHLHVVRPMSHYTTPMVLQQAAIPIQINVGTTVTMTGNGTRPPPTPNAEAPPPGPGQASSVAPSSTNVESSAEGAPPPGPAPPPATSHPRVIRISHQSVEPVVMMHMNIQDSGTQPGGVPSAPTGPLGPPGHGQTLGSTLIQLPSLPPEFMHAVAHQITHQAMVAAVASAAAGQQVPGFPTAPTRVVIARPTPPQARPSHPGGPPVSGTLQGAGLGTNASLAQMVSGLVGQLLMQPVLVAQGTPGMAPPPAPATASASAGTTNTATTAGPAPGGPAQPPPTPQPSMADLQFSQLLGNLLGPAGPGAGGSGVASPTITVAMPGVPAFLQGMTDFLQATQTAPPPPPPPPPPPPAPEQQTMPPPGSPSGGAGSPGGLGLESLSPEFFTSVVQGVLSSLLGSLGARAGSSESIAAFIQRLSGSSNIFEPGADGALGFFGALLSLLCQNFSMVDVVMLLHGHFQPLQRLQPQLRSFFHQHYLGGQEPTPSNIRMATHTLITGLEEYVRESFSLVQVQPGVDIIRTNLEFLQEQFNSIAAHVLHCTDSGFGARLLELCNQGLFECLALNLHCLGGQQMELAAVINGRIRRMSRGVNPSLVSWLTTMMGLRLQVVLEHMPVGPDAILRYVRRVGDPPQPLPEEPMEVQGAERASPEPQEWVPIIQQDIQSQRKVKPQPPLSDAYLSGMPAKRRKLRSDIQKRLQEDPNYSPQRFPNAQRAFADDP

SEQ ID NO: 861207 - protein, 893 aa, Homo sapiens
KSLPDLQRRVQGPRRVSSEPRVRLVMAQHMIRDIQTLLSRMETLPYLQCRGGPQPQHSQPPPQPPAVTPEPVALSSQTSEPVESEAPPREPMEAEEVEERAPAQNPELTPGPAPAGPTPAPETNAPNHPSPAEYVEVLQELQRLESRLQPFLQRYYEVLGAAATTDYNNNHEGREEDQRLINLVGESLRLLGNTFVALSDLRCNLACTPPRHLHVVRPMSHYTTPMVLQQAAIPIQINVGTTVTMTGNGTRPPPTPNAEAPPPGPGQASSVAPSSTNVESSAEGAPPPGPAPPPATSHPRVIRISHQSVEPVVMMHMNIQDSGTQPGGVPSAPTGPLGPPGHGQTLGSTLIQLPSLPPEFMHAVAHQITHQAMVAAVASAAAGQQVPGFPTAPTRVVIARPTPPQARPSHPGGPPVSGTLQGAGLGTNASLAQMVSGLVGQLLMQPVLVAQGTPGMAPPPAPATASASAGTTNTATTAGPAPGGPAQPPPTPQPSMADLQFSQLLGNLLGPAGPGAGGSGVASPTITVAMPGVPAFLQGMTDFLQATQTAPPPPPPPPPPPPAPEQQTMPPPGSPSGGAGSPGGLGLESLSPEFFTSVVQGVLSSLLGSLGARAGSSESIAAFIQRLSGSSNIFEPGADGALGFFGALLSLLCQNFSMVDVVMLLHGHFQPLQRLQPQLRSFFHQHYLGGQEPTPSNIRMATHTLITGLEEYVRESFSLVQVQPGVDIIRTNLEFLQEQFNSIAAHVLHCTDSGFGARLLELCNQGLFECLALNLHCLGGQQMELAAVINGRIRRMSRGVNPSLVSWLTTMMGLRLQVVLEHMPVGPDAILRYVRRVGDPPQPLPEEPMEVQGAERASPEPQLRSDIQKRLQEDPNYSPQRFPNAQRAFADDP

SEQ ID NO: 861208 - protein, 555 aa, Homo sapiens
KSLPDLQRRVQGPRRVSSEPRVRLVMAQHMIRDIQTLLSRMETLPYLQCRGGPQPQHSQPPPQPPAVTPEPVALSSQTSEPVESEAPPREPMEAEEVEERAPAQNPELTPGPAPAGPTPAPETNAPNHPSPAEYVEVLQELQRLESRLQPFLQRYYEVLGAAATTDYNNNHEGREEDQRLINLVGESLRLLGNTFVALSDLRCNLACTPPRHLHVVRPMSHYTTPMVLQQAAIPIQINVGTTVTMTGNGTRPPPTPNAEAPPPGPGQASSVAPSSTNVESSAEGAPPPGPAPPPATSHPRVIRISHQSVEPVVMMHMNIQDSGTQPGGVPSAPTGPLGPPGHGQTLGSTLIQLPSLPPEFMHAVAHQITHQAMVAAVASAAAGQQVPGFPTAPTRVVIARPTPPQARPSHPGGPPVSGTLQGAGLGTNASLAQMVSGLVGQLLMQPVLVAQGTPGMAPPPAPATASASAGTTNTATTAGPAPGGPAQPPPTPQPSMADLQFSQLLGNLLGPAGPGAGGSGVASPTITVAMPGVPAFLQGMTDFLQATQTAPAAAK

SEQ ID NO: 861209 - protein, 831 aa, Homo sapiens
KSLPDLQRRVQGPRRVSSEPRVRLVMAQHMIRDIQTLLSRMETLPYLQCRGGPQPQHSQPPPQPPAVTPEPVALSSQTSEPVESEAPPREPMEAEEVEERAPAQNPELTPGPAPAGPTPAPETNAPNHPSPAEYVEVLQELQRLESRLQPFLQRYYEVLGAAATTDYNNNHEGREEDQRLINLVGESLRLLGNTFVALSDLRCNLACTPPRHLHVVRPMSHYTTPMVLQQAAIPIQINVGTTVTMTGNGTRPPPTPNAEAPPPGPGQASSVAPSSTNVESSAEGAPPPGPAPPPATSHPRVIRISHQSVEPVVMMHMNIQDSGTQPGGVPSAPTGPLGPPGHGQTLGSTLIQLPSLPPEFMHAVAHQITHQAMVAAVASAAAGQQVPGFPTAPTRVVIARPTPPQARPSHPGGPPVSGTLQGAGLGTNASLAQMVSGLVGQLLMQPVLVAQGTPGMAPPPAPATASASAGTTNTATTAGPAPGGPAQPPPTPQPSMADLQFSQLLGNLLGPAGPGAGGSGVASPTITVAMPGVPAFLQGMTDFLQATQTAPQHRAADKLGTQPEGTPHQRDAPMEDSHKTHDSQGTPRMHPGKQNTAAIAEPTQHQHTQATADSATTNKLHTNRKNKRRLLNLTTQRNPRPTAEQAVYINRHVTRGTTAADAGDTSTTSQLPAMRGAVHIDRGESASNVVLASHETHLTTEPRSASRPDHSRAGQAQLGGAPERTAGRHSKRPTELARQREKLQNDDDSTPTVRGHWQHKAPLRSTQPRRGANHTRRQNADNKRAPTRIQENRDEYTNQRDEHDNQPDIAAVRRTSKQITYRSKRHTQSYS

SEQ ID NO: 861210 - protein, 178 aa, Homo sapiens [sequence omitted]

SEQ ID NO: 861211 - protein, 131 aa, Homo sapiens
MADVVVGKDKGGEQRLISLPLSRIRVIMKSSPEVSSINQEALVLTAKATELFVQCLATYSYRHGSGKEKKVLTYSDLANTAQQSETFQFLADILPKKILASKYLKMLKEEKREEDEENDNDNESDHDEADS

SEQ ID NO: 861212 - protein, 131 aa, Homo sapiens; identical to SEQ ID NO: 861211

SEQ ID NO: 861213 - protein, 131 aa, Homo sapiens; identical to SEQ ID NO: 861211

SEQ ID NO: 861214 - protein, 131 aa, Homo sapiens; identical to SEQ ID NO: 861211

SEQ ID NO: 861215 - protein, 112 aa, Homo sapiens
MADVVVGKDKGGEQRLISLPLSRIRVIMKSSPEVSSINQEALVLTAKATELFVQCLATYSYRHGSGKEKKVLTYSDLANTAQQSETFQFLADILPKKRNPPGFGWFRKFSYM

SEQ ID NO: 861216 - protein, 119 aa, Homo sapiens
MADVVVGKDKGGEQRLISLPLSRIRVIMKSSPEVSSINQEALVLTAKATELFVQCLATYSYRHGSGKEKKVLTYSDLANTAQQSETFQFLADILPKKILASKYLKMLKEEKREEDEERR

SEQ ID NO: 861217 - protein, 72 aa, Homo sapiens
RSGARGLTELVVSRTGRSRPRGLASPHYNSHGAAGAAPRTHQLAGQGSHFAVGPAGCGHPRDGREDGGRGRG

SEQ ID NO: 861218 - protein, 77 aa, Homo sapiens
  misc_feature (6)..(6): Xaa can be any naturally occurring amino acid
QGWYAXDVMEGRSRPRGLASPHYNSHGAAGAAPRTHQLAGQGNSSPSSTGPPCSSGTKKTADTGSHCSSKLQRQGQF

SEQ ID NO: 861219 - protein, 39 aa, Homo sapiens
MANKRGRTTQTRGENNNREQEQGGAHTEQTTTRDTNYHP

SEQ ID NO: 861220 - protein, 1309 aa, Homo sapiens
MLLNGDCPESLKKEAAAAEPPRENGLDEAGPGDETTGQEVIVIQDTGFSVKILAPGIEPFSLQVSPQEMVQEIHQVLMDREDTCHRTCFSLHLDGNVLDHFSELRSVEGLQEGSVLRVVEEPYTVREARIHVRHVRDLLKSLDPSDAFNGVDCNSLSFLSVFTDGDLGDSGKRKKGLEMDPIDCTPPEYILPGSRERPLCPLQPQNRDWKPLQCLKVLTMSGWNPPPGNRKMHGDLMYLFVITAEDRQVSITASTRGFYLNQSTAYHFNPKPASPRFLSHSLVELLNQISPTFKKNFAVLQKKRVQRHPFERIATPFQVYSWTAPQAEHAMDCVRAEDAYTSRLGYEEHIPGQTRDWNEELQTTRELPRKNLPERLLRERAIFKVHSDFTAAATRGAMAVIDGNVMAINPSEETKMQMFIWNNIFFSLGFDVRDHYKDFGGDVAAYVAPTNDLNGVRTYNAVDVEGLYTLGTVVVDYRGYRVTAQSIIPGILERDQEQSVIYGSIDFGKTVVSHPRYLELLERTSRPLKILRHQVLNDRDEEVELCSSVECKGIIGNDGRHYILDLLRTFPPDLNFLPVPGEELPEECARAGFPRAHRHKLCCLRQELVDAFVEHRYLLFMKLAALQLMQQNASQLETPSSLENGGPSSLESKSEDPPGQEAGSEEEGSSASGLAKVKELAETIAADDGTDPRSREVIRNACKAVGSISSTAFDIRFNPDIFSPGVRFPESCQDEVRDQKQLLKDAAAFLLSCQIPGLVKDCMEHAVLPVDGATLAEVMRQRGINMRYLGKVLELVLRSPARHQLDHVFKIGIGELITRSAKHIFKTYLQGVELSGLSAAISHFLNCFLSSYPNPVAHLPADELVSKKRNKRRKNRPPGAADNTAWAVMTPQELWKNICQEAKNYFDFDLECETVDQAVETYGLQKITLLREISLKTGIQVLLKEYSFDSRHKPAFTEEDVLNIFPVVKHVNPKASDAFHFFQSGQAKVQQGFLKEGCELINEALNLFNNVYGAMHVETCACLRLLARLHYIMGDYAEALSNQQKAVLMSERVMGTEHPNTIQEYMHLALYCFASSQLSTALSLLYRARYLMLLVFGEDHPEMALLDNNIGLVLHGVMEYDLSLRFLENALAVSTKYHGPKALKVALSHHLVARVYESKAEFRSALQHEKEGYTIYKTQLGEDHEKTKESSEYLKCLTQQAVALQRTMNEIYRNGSSANIPPLKFTAPSMASVLEQLNVINGILFIPLSQKDLENLKAEVARRHQLQEASRNRDRAEEPMATEPAPAGAPGDLGSQPPAAKDPSPSVQG

SEQ ID NO: 861221 - protein, 1241 aa, Homo sapiens
AAAPADSAREHGSQAGGKGRPGAAELPSVMLLNGDCPESLKKEAAAAEPPRENGLDEAGPGDETTGQEVIVIQDTGFSVKILAPGIEPFSLQVSPQEMVQEIHQVLMDREDTCHRTCFSLHLDGNVLDHFSELRSPQNRDWKPLQCLKVLTMSGWNPPPGNRKMHGDLMYLFVITAEDRQVSITASTRGFYLNQSTAYHFNPKPASPRFLSHSLVELLNQISPTFKKNFAVLQKKRVQRHPFERIATPFQVYSWTAPQAEHAMDCVRAEDAYTSRLGYEEHIPGQTRDWNEELQTTRELPRKNLPERLLRERAIFKVHSDFTAAATRGAMAVIDGNVMAINPSEETKMQMFIWNNIFFSLGFDVRDHYKDFGGDVAAYVAPTNDLNGVRTYNAVDVEGLYTLGTVVVDYRGYRVTAQSIIPGILERDQEQSVIYGSIDFGKTVVSHPRYLELLERTSRPLKILRHQVLNDRDEEVELCSSVECKGIIGNDGRHYILDLLRTFPPDLNFLPVPGEELPEECARAGFPRAHRHKLCCLRQELVDAFVEHRYLLFMKLAALQLMQQNASQLETPSSLENGGPSSLESKSEDPPGQEAGSEEEGSSASGLAKVKELAETIAADDGTDPRSREVIRNACKAVGSISSTAFDIRFNPDIFSPGVRFPESCQDEVRDQKQLLKDAAAFLLSCQIPGLVKDCMEHAVLPVDGATLAEVMRQRGINMRYLGKVLELVLRSPARHQLDHVFKIGIGELITRSAKHIFKTYLQGVELSGLSAAISHFLNCFLSSYPNPVAHLPADELVSKKRNKRRKNRPPGAADNTAWAVMTPQELWKNICQEAKNYFDFDLECETVDQAVETYGLQKITLLREISLKTGIQVLLKEYSFDSRHKPAFTEEDVLNIFPVVKHVNPKASDAFHFFQSGQAKVQQGFLKEGCELINEALNLFNNVYGAMHVETCACLRLLARLHYIMGDYAEALSNQQKAVLMSERVMGTEHPNTIQEYMHLALYCFASSQLSTALSLLYRARYLMLLVFGEDHPEMALLDNNIGLVLHGVMEYDLSLRFLENALAVSTKYHGPKALKVALSHHLVARVYESKAEFRSALQHEKEGYTIYKTQLGEDHEKTKESSEYLKCLTQQAVALQRTMNEIYRNGSSANIPPLKFTAPSMASVLEQLNVINGILFIPLSQKDLENLKAEVARRHQLQEASRNRDRAEEPMATEPAPAGAPGDLGSQPPAAKDPSPSVQG

SEQ ID NO: 861222 - protein, 547 aa, Homo sapiens [sequence omitted]

SEQ ID NO: 861223 - protein, 1338 aa, Homo sapiens
AAAPADSAREHGSQAGGKGRPGAAELPSVMLLNGDCPESLKKEAAAAEPPRENGLDEAGPGDETTGQEVIVIQDTGFSVKILAPGIEPFSLQVSPQEMVQEIHQVLMDREDTCHRTCFSLHLDGNVLDHFSELRSVEGLQEGSVLRVVEEPYTVREARIHVRHVRDLLKSLDPSDAFNGVDCNSLSFLSVFTDGDLGDSGKRKKGLEMDPIDCTPPEYILPGSRERPLCPLQPQNRDWKPLQCLKVLTMSGWNPPPGNRKMHGDLMYLFVITAEDRQVSITASTRGFYLNQSTAYHFNPKPASPRFLSHSLVELLNQISPTFKKNFAVLQKKRVQRHPFERIATPFQVYSWTAPQAEHAMDCVRAEDAYTSRLGYEEHIPGQTRDWNEELQTTRELPRKNLPERLLRERAIFKVHSDFTAAATRGAMAVIDGNVMAINPSEETKMQMFIWNNIFFSLGFDVRDHYKDFGGDVAAYVAPTNDLNGVRTYNAVDVEGLYTLGTVVVDYRGYRVTAQSIIPGILERDQEQSVIYGSIDFGKTVVSHPRYLELLERTSRPLKILRHQVLNDRDEEVELCSSVECKGIIGNDGRHYILDLLRTFPPDLNFLPVPGEELPEECARAGFPRAHRHKLCCLRQELVDAFVEHRYLLFMKLAALQLMQQNASQLETPSSLENGGPSSLESKSEDPPGQEAGSEEEGSSASGLAKVKELAETIAADDGTDPRSREVIRNACKAVGSISSTAFDIRFNPDIFSPGVRFPESCQDEVRDQKQLLKDAAAFLLSCQIPGLVKDCMEHAVLPVDGATLAEVMRQRGINMRYLGKVLELVLRSPARHQLDHVFKIGIGELITRSAKHIFKTYLQGVELSGLSAAISHFLNCFLSSYPNPVAHLPADELVSKKRNKRRKNRPPGAADNTAWAVMTPQELWKNICQEAKNYFDFDLECETVDQAVETYGLQKITLLREISLKTGIQVLLKEYSFDSRHKPAFTEEDVLNIFPVVKHVNPKASDAFHFFQSGQAKVQQGFLKEGCELINEALNLFNNVYGAMHVETCACLRLLARLHYIMGDYAEALSNQQKAVLMSERVMGTEHPNTIQEYMHLALYCFASSQLSTALSLLYRARYLMLLVFGEDHPEMALLDNNIGLVLHGVMEYDLSLRFLENALAVSTKYHGPKALKVALSHHLVARVYESKAEFRSALQHEKEGYTIYKTQLGEDHEKTKESSEYLKCLTQQAVALQRTMNEIYRNGSSANIPPLKFTAPSMASVLEQLNVINGILFIPLSQKDLENLKAEVARRHQLQEASRNRDRAEEPMATEPAPAGAPGDLGSQPPAAKDPSPSVQG

SEQ ID NO: 861224 - protein, 1338 aa, Homo sapiens; identical to SEQ ID NO: 861223

SEQ ID NO: 861225 - protein, 1338 aa, Homo sapiens; identical to SEQ ID NO: 861223

SEQ ID NO: 861226 - protein, 817 aa, Homo sapiens
AAAPADSAREHGSQAGGKGRPGAAELPSVMLLNGDCPESLKKEAAAAEPPRENGLDEAGPGDETTGQEVIVIQDTGFSVKILAPGIEPFSLQVSPQEMVQEIHQVLMDREDTCHRTCFSLHLDGNVLDHFSELRSVEGLQEGSVLRVVEEPYTVREARIHVRHVRDLLKSLDPSDAFNGVDCNSLSFLSVFTDGDLGDSGKRKKGLEMDPIDCTPPEYILPGSRERPLCPLQPQNRDWKPLQCLKVLTMSGWNPPPGNRKMHGDLMYLFVITAEDRQVSITASTRGFYLNQSTAYHFNPKPASPRFLSHSLVELLNQISPTFKKNFAVLQKKRVQRHPFERIATPFQVYSWTAPQAEHAMDCVRAEDAYTSRLGYEEHIPGQTRDWNEELQTTRELPRKNLPERLLRERAIFKVHSDFTAAATRGAMAVIDGNVMAINPSEETKMQMFIWNNIFFSLGFDVRDHYKDFGGDVAAYVAPTNDLNGVRTYNAVDVEGLYTLGTVVVDYRGYRVTAQSIIPGILERDQEQSVIYGSIDFGKTVVSHPRYLELLERTSRPLKILRHQVLNDRDEEVELCSSVECKGIIGNDGRHYILDLLRTFPPDLNFLPVPGEELPEECARAGFPRAHRHKLCCLRQELVDAFVEHRYLLFMKLAALQLMQQNASQLETPSSLENGGPSSLESKSEDPPGQEAGSEEEGSSASGLAKVKELAETIAADDGTDPRSREVIRNACKAVGSISSTAFDIRFNPDIFSPGVRFPESCQDEVRDQKQLLKDAAAFLLSCQIPGLVKDCMEHAVPARAAALCLLSEPWWGRMWPP

SEQ ID NO: 861227 - protein, 919 aa, Homo sapiens
AAAPADSAREHGSQAGGKGRPGAAELPSVMLLNGDCPESLKKEAAAAEPPRENGLDEAGPGDETTGQEVIVIQDTGFSVKILAPGIEPFSLQVSPQEMVQEIHQVLMDREDTCHRTCFSLHLDGNVLDHFSELRSVEGLQEGSVLRVVEEPYTVREARIHVRHVRDLLKSLDPSDAFNGVDCNSLSFLSVFTDGDLGDSGKRKKGLEMDPIDCTPPEYILPGSRERPLCPLQPQNRDWKPLQCLKVLTMSGWNPPPGNRKMHGDLMYLFVITAEDRQVSITASTRGFYLNQSTAYHFNPKPASPRFLSHSLVELLNQISPTFKKNFAVLQKKRVQRHPFERIATPFQVYSWTAPQAEHAMDCVRAEDAYTSRLGYEEHIPGQTRDWNEELQTTRELPRKNLPERLLRERAIFKVHSDFTAAATRGAMAVIDGNVMAINPSEETKMQMFIWNNIFFSLGFDVRDHYKDFGGDVAAYVAPTNDLNGVRTYNAVDVEGLYTLGTVVVDYRGYRVTAQSIIPGILERDQEQSVIYGSIDFGKTVVSHPRYLELLERTSRPLKILRHQVLNDRDEEVELCSSVECKGIIGNDGRHYILDLLRTFPPDLNFLPVPGEELPEECARAGFPRAHRHKLCCLRQELVDAFVEHRYLLFMKLAALQLMQQNASQLETPSSLENGGPSSLESKSEDPPGQEAGSEEEGSSASGLAKVKELAETIAADDGTDPRSREVIRNACKAVGSISSTAFDIRFNPDIFSPGVRFPESCQDEVRDQKQLLKDAAAFLLSCQIPGLVKDCMEHAVLPVDGATLAEVMRQRGINMRYLGKVLELVLRSPARHQLDHVFKIGIGELITRSAKHIFKTYLQESSSPGSQPHQHSEMVPGSYQTVANGAKSVSRADEGGNGRGGIKAGVDPGWNLGADIGPV

SEQ ID NO: 861228 - protein, 1338 aa, Homo sapiens; identical to SEQ ID NO: 861223

SEQ ID NO: 861229 - protein, 1123 aa, Homo sapiens
ALLPLTPGSGHLVFPCSPNTVLDMPLQCLKVLTMSGWNPPPGNRKMHGDLMYLFVITAEDRQVSITASTRGFYLNQSTAYHFNPKPASPRFLSHSLVELLNQISPTFKKNFAVLQKKRVQRHPFERIATPFQVYSWTAPQAEHAMDCVRAEDAYTSRLGYEEHIPGQTRDWNEELQTTRELPRKNLPERLLRERAIFKVHSDFTAAATRGAMAVIDGNVMAINPSEETKMQMFIWNNIFFSLGFDVRDHYKDFGGDVAAYVAPTNDLNGVRTYNAVDVEGLYTLGTVVVDYRGYRVTAQSIIPGILERDQEQSVIYGSIDFGKTVVSHPRYLELLERTSRPLKILRHQVLNDRDEEVELCSSVECKGIIGNDGRHYILDLLRTFPPDLNFLPVPGEELPEECARAGFPRAHRHKLCCLRQELVDAFVEHRYLLFMKLAALQLMQQNASQLETPSSLENGGPSSLESKSEDPPGQEAGSEEEGSSASGLAKVKELAETIAADDGTDPRSREVIRNACKAVGSISSTAFDIRFNPDIFSPGVRFPESCQDEVRDQKQLLKDAAAFLLSCQIPGLVKDCMEHAVLPVDGATLAEVMRQRGINMRYLGKVLELVLRSPARHQLDHVFKIGIGELITRSAKHIFKTYLQGVELSGLSAAISHFLNCFLSSYPNPVAHLPADELVSKKRNKRRKNRPPGAADNTAWAVMTPQELWKNICQEAKNYFDFDLECETVDQAVETYGLQKITLLREISLKTGIQVLLKEYSFDSRHKPAFTEEDVLNIFPVVKHVNPKASDAFHFFQSGQAKVQQGFLKEGCELINEALNLFNNVYGAMHVETCACLRLLARLHYIMGDYAEALSNQQKAVLMSERVMGTEHPNTIQEYMHLALYCFASSQLSTALSLLYRARYLMLLVFGEDHPEMALLDNNIGLVLHGVMEYDLSLRFLENALAVSTKYHGPKALKVALSHHLVARVYESKAEFRSALQHEKEGYTIYKTQLGEDHEKTKESSEYLKCLTQQAVALQRTMNEIYRNGSSANIPPLKFTAPSMASVLEQLNVINGILFIPLSQKDLENLKAEVARRHQLQEASRNRDRAEEPMATEPAPAGAPGDLGSQPPAAKDPSPSVQG

SEQ ID NO: 861230 - protein, 665 aa, Homo sapiens
SPPAGSKKVVLRLRSVSEYSEEEGSSASGLAKVKELAETIAADDGTDPRSREVIRNACKAVGSISSTAFDIRFNPDIFSPGVRFPESCQDEVRDQKQLLKDAAAFLLSCQIPGLVKDCMEHAVLPVDGATLAEVMRQRGINMRYLGKVLELVLRSPARHQLDHVFKIGIGELITRSAKHIFKTYLQGVELSGLSAAISHFLNCFLSSYPNPVAHLPADELVSKKRNKRRKNRPPGAADNTAWAVMTPQELWKNICQEAKNYFDFDLECETVDQAVETYGLQKITLLREISLKTGIQVLLKEYSFDSRHKPAFTEEDVLNIFPVVKHVNPKASDAFHFFQSGQAKVQQGFLKEGCELINEALNLFNNVYGAMHVETCACLRLLARLHYIMGDYAEALSNQQKAVLMSERVMGTEHPNTIQEYMHLALYCFASSQLSTALSLLYRARYLMLLVFGEDHPEMALLDNNIGLVLHGVMEYDLSLRFLENALAVSTKYHGPKALKVALSHHLVARVYESKAEFRSALQHEKEGYTIYKTQLGEDHEKTKESSEYLKCLTQQAVALQRTMNEIYRNGSSANIPPLKFTAPSMASVLEQLNVINGILFIPLSQKDLENLKAEVARRHQLQEASRNRDRAEEPMATEPAPAGAPGDLGSQPPAAKDPSPSVQG

SEQ ID NO: 861231 - protein, 1268 aa, Homo sapiens
AAAPADSAREHGSQAGGKGRPGAAELPSVMLLNGDCPESLKKEAAAAEPPRENGLDEAGPGDETTGQEVIVIQDTGFSVKILAPGIEPFSLQVSPQEMVQEIHQVLMDREDTCHRTCFSLHLDGNVLDHFSELRSVEGLQEGSVLRVVEEPYTVREARIHVRHVRDLLKSLDPSDAFNGVDCNSLSFLSVFTDGDLGDSGKRKKGLEMDPIDCTPPEYILPGSRERPLCPLQPQNRDWKPLQCLKVLTMSGWNPPPGNRKMHGDLMYLFVITAEDRQVSITASTRGFYLNQSTAYHFNPKPASPRFLSHSLVELLNQISPTFKKNFAVLQKKRVQRHPFERIATPFQVYSWTAPQAEHAMDCVRAEDAYTSRLGYEEHIPGQTRDWNEELQTTRELPRKNLPERLLRERAIFKVHSDFTAAATRGAMAVIDGNVMAINPSEETKMQMFIWNNIFFSLGFDVRDHYKDFGGDVAAYVAPTNDLNGVRTYNAVDVEGLYTLGTVVVDYRGYRVTAQSIIPGILERDQEQSVIYGSIDFGKTVVSHPRYLELLERTSRPLKILRHQVLNDRDEEVELCSSVECKGIIGNDGRHYILDLLRTFPPDLNFLPVPGEELPEECARAGFPRAHRHKLCCLRQELVDAFVEHRYLLFMKLAALQLMQQNASQLETPSSLENGGPSSLESKSEDPPGQEAGSEEEGSSASGLAKVKELAETIAADDGTDPRSREVIRNACKAVGSISSTAFDIRFNPDIFSPGVRFPESCQDEVRDQKQLLKDAAAFLLSCQIPGLVKDCMEHAVLPVDGATLAEVMRQRGINMRYLGKVLELVLRSPARHQLDHVFKIGIGELITRSAKHIFKTYLQGVELSGLSAAISHFLNCFLSSYPNPVAHLPADELVSKKRNKRRKNRPPGAADNTAWAVMTPQELWKNICQEAKNYFDFDLECETVDQAVETYGLQKITLLREISLKTGIQVLLKEYSFDSRHKPAFTEEDVLNIFPVVKHVNPKASDAFHFFQSGQAKVQQGFLKEGCELINEALNLFNNVYGAMHVETCACLRLLARLHYIMGDYAEALSNQQKAVLMSERVMGTEHPNTIQEYMHLALYCFASSQLSTALSLLYRARYLMLLVFGEDHPEMALLDNNIGLVLHGVMEYDLSLRFLENALAVSTKYHGPKALKVALSHHLVARVYESKAEFRSALQHEKEGYTIYKTQLGEDHEKTKESSEYLKCLTQQAVALQRTMNEIYRNGSSANIPPLKSQPPAAKDPSPSVQG

SEQ ID NO: 861232 - protein, 1079 aa, Homo sapiens
AAAPADSAREHGSQAGGKGRPGAAELPSVMLLNGDCPESLKKEAAAAEPPRENGLDEAGPGDETTGQEVIVIQDTGFSVKILAPGIEPFSLQVSPQEMVQEIHQVLMDREDTCHRTCFSLHLDGNVLDHFSELRSVEGLQEGSVLRVVEEPYTVREARIHVRHVRDLLKSLDPSDAFNGVDCNSLSFLSVFTDGDLGDSGKRKKGLEMDPIDCTPPEYILPGSRERPLCPLQPQNRDWKPLQCLKVLTMSGWNPPPGNRKMHGDLMYLFVITAEDRQVSITASTRGFYLNQSTAYHFNPKPASPRFLSHSLVELLNQISPTFKKNFAVLQKKRVQRHPFERIATPFQVYSWTAPQAEHAMDCVRAEDAYTSRLGYEEHIPGQTRDWNEELQTTRELPRKNLPERLLRERAIFKVHSDFTAAATRGAMAVIDGNVMAINPSEETKMQMFIWNNIFFSLGFDVRDHYKDFGGDVAAYVAPTNDLNGVRTYNAVDVEGLYTLGTVVVDYRGYRVTAQSIIPGILERDQEQSVIYGSIDFGKTVVSHPRYLELLERTSRPLKILRHQVLNDRDEEVELCSSVECKGIIGNDGRHYILDLLRTFPPDLNFLPVPGEELPEECARAGFPRAHRHKLCCLRQELVDAFVEHRYLLFMKLAALQLMQQNASQLETPSSLENGGPSSLESKSEDPPGQEAGSEEEGSSASGLAKVKELAETIAADDGTDPRSREVIRNACKAVGSISSTAFDIRFNPDIFSPGVRFPESCQDEVRDQKQLLKDAAAFLLSCQIPGLVKDCMEHAVLPVDGATLAEVMRQRGINMRYLGKVLELVLRSPARHQLDHVFKIGIGELITRSAKHIFKTYLQGVELSGLSAAISHFLNCFLSSYPNPVAHLPADELVSKKRNKRRKNRPPGAADNTAWAVMTPQELWKNICQEAKNYFDFDLECETVDQAVETYGLQKITLLREISLKTGIQVLLKEYSFDSRHKPAFTEEDVLNIFPVVERWDHGNKISFLVISSLGQREFQTRLLARLGPTLSGFTQEPGSMDQGLPSRRKLLGSSECWMMSGYSPHMLSSSIICAGSSR

SEQ ID NO: 861233 - protein, 140 aa, Homo sapiens
MASVDFKTYVDQACRAAEEFVNVYYTTMDKRRRLLSRLYMGTATLVWNGNAVSGQESLSEFFEMLPSSEFQISVVDCQPVHDEATPSQTTVLVVICGSVKFEGNKQRDFNQNFILTAQASPSNTVWKIASDCFRFQDWAS

SEQ ID NO: 861234 - protein, 140 aa, Homo sapiens; identical to SEQ ID NO: 861233

SEQ ID NO: 861235 - protein, 123 aa, Homo sapiens
  misc_feature (13)..(14): Xaa can be any naturally occurring amino acid
AVRMKFWLKSRCXXPSNCTDPQMTTRTLVWNGNAVSGQESLSEFFEMLPSSEFQISVVDCQPVHDEATPSQTTVLVVICGSVKFEGNKQRDFNQNFILTAQASPSNTVWKIASDCFRFQDWAS

SEQ ID NO: 861236 - protein, 100 aa, Homo sapiens
  misc_feature (8)..(8): Xaa can be any naturally occurring amino acid
PKKFGHEXRVPNSGCQSTHADFGTRWKATFQISVVDCQPVHDEATPSQTTVLVVICGSVKFEGNKQRDFNQNFILTAQASPSNTVWKIASDCFRFQDWAS

SEQ ID NO: 861237 - protein, 140 aa, Homo sapiens; identical to SEQ ID NO: 861233

SEQ ID NO: 861238 - protein, 100 aa, Homo sapiens; identical to SEQ ID NO: 861236
  misc_feature (8)..(8): Xaa can be any naturally occurring amino acid

SEQ ID NO: 861239 - protein, 726 aa, Homo sapiens
MEDRLHMDNGLVPQKIVSVHLQDSTLKEVKDQVSNKQAQILEPKPEPSLEIKPEQDGMEHVGRDDPKALGEEPKQRRGSASGSEPAGDSDRGGGPVEHYHLHLSSCHECLELENSTIESVKFASAENIPDLPYDYSSSLESVADETSPEREGRRVNLTGKAPNILLYVGSDSQEALGRFHEVRSVLADCVDIDSYILYHLLEDSALRDPWTDNCLLLVIATRESIPEDLYQKFMAYLSQGGKVLGLSSSFTFGGFQVTSKGALHKTVQNLVFSKADQSEVKLSVLSSGCRYQEGPVRLSPGRLQGHLENEDKDRMIVHVPFGTRGGEAVLCQVHLELPPSSNIVQTPEDFNLLKSSNFRRYEVLREILTTLGLSCDMKQVPALTPLYLLSAAEEIRDPLMQWLGKHVDSEGEIKSGQLSLRFVSSYVSEVEITPSCIPVVTNMEAFSSEHFNLEIYRQNLQTKQLGKVILFAEVTPTTMRLLDGLMFQTPQEMGLIVIAARQTEGKGRGGNVWLSPVGCALSTLLISIPLRSQLGQRIPFVQHLMSVAVVEAVRSIPEYQDINLRVKWPNDIYYSDLMKIGGVLVNSTLMGETFYILIGCGFNVTNSNPTICINDLITEYNKQHKAELKPLRADYLIARVVTVLEKLIKEFQDKGPNSVLPLYYRYWVHSGQQVHLGSAEGPKVSIVGLDDSGFLQVHQEGGEVVTVHPDGNSFDMLRNLILPKRR

SEQ ID NO: 861240 - protein, 958 aa, Homo sapiens
  misc_feature (7)..(7): Xaa can be any naturally occurring amino acid
IRHEDDXEEEKQESEEISSIRDLTLGTSGLLRFLFPTHCRAAACQCPLLGRATCASLTWGLSLPDCFLDVSFKLRKRARPAGGAAMLITLCYLYLWARWGRRPAELVRATVRRLRASRCSFTFCGAAAEPPGARVCLSRGGRVFCVSDSQSIEDLNKWALFLVSPFILEAEHIAFVTESIWVQSENLQRSSSSETIVKWSDCCLPLACRPGDPYRLIAEASVDNFSKLGVAFMEDRLHMDNGLVPQKIVSVHLQDSTLKEVKDQVSNKQAQILEPKPEPSLEIKPEQDGMEHVGRDDPKALGEEPKQRRGSASGSEPAGDSDRGGGPVEHYHLHLSSCHECLELENSTIESVKFASAENIPDLPYDYSSSLESVADETSPEREGRRVNLTGKAPNILLYVGSDSQEALGRFHEVRSVLADCVDIDSYILYHLLEDSALRDPWTDNCLLLVIATRESIPEDLYQKFMAYLSQGGKVLGLSSSFTFGGFQVTSKGALHKTVQNLVFSKADQSEVKLSVLSSGCRYQEGPVRLSPGRLQGHLENEDKDRMIVHVPFGTRGGEAVLCQVHLELPPSSNIVQTPEDFNLLKSSNFRRYEVLREILTTLGLSCDMKQVPALTPLYLLSAAEEIRDPLMQWLGKHVDSEGEIKSGQLSLRFVSSYVSEVEITPSCIPVVTNMEAFSSEHFNLEIYRQNLQTKQLGKVILFAEVTPTTMRLLDGLMFQTPQEMGLIVIAARQTEGKGRGGNVWLSPVGCALSTLLISIPLRSQLGQRIPFVQHLMSVAVVEAVRSIPEYQDINLRVKWPNDIYYSDLMKIGGVLVNSTLMGETFYILIGCGFNVTNSNPTICINDLITEYNKQHKAELKPLRADYLIARVVTVLEKLIKEFQDKGPNSVLPLYYRYWVHSGQQVHLGSAEGPKVSIVGLDDSGFLQVHQEGGEVVTVHPDGNSFDMLRNLILPKRR

SEQ ID NO: 861241 - protein, 123 aa, Homo sapiens
CRWYGLLLVTLNPQPISNKQHKAELKPLRADYLIARVVTVLEKLIKEFQDKGPNSVLPLYYRYWVHSGQQVHLGSAEGPKVSIVGLDDSGFLQVHQEGGEVVTVHPDGNSFDMLRNLILPKRR

SEQ ID NO: 861242 - protein, 726 aa, Homo sapiens; identical to SEQ ID NO: 861239

SEQ ID NO: 861243 - protein, 726 aa, Homo sapiens; identical to SEQ ID NO: 861239

SEQ ID NO: 861244 - protein, 229 aa, Homo sapiens
  misc_feature (7)..(7): Xaa can be any naturally occurring amino acid
IRHEDDXEEEKQESEEISSIRDLTLGTSGLLRFLFPTHCRAAACQCPLLGRATCASLTWGLSLPDCFLDVSFKLRKRARPAGGAAMLITLCYLYLWARWGRRPAELVRATVRRLRASRCSFTFCGAAAEPPGARVCLSRGGRVFCVSDSQVGGSGGRATRAPRAGSAPVPAPRPRREPGSSGAPEWRPQCGLCGPGGAVAPGPRERPEVRDSDHGPGRLFPASRAVLDA

SEQ ID NO: 861245 - protein, 91 aa, Homo sapiens
DPLTTTSPQGDLEVPPTPPLLRKEIGRMRQNSPEEQARSSPRPRREKGGPPLPQTLAKPDTRDPGMGRSPRCQLRESMKSFNESNEPLPQP

SEQ ID NO: 861246 - protein, 249 aa, Homo sapiens
MSLEDPFFVVRGEVQKAVNTARGLYQRWCELLQESAAVGREELDWTTNELRNGLRSIEWDLEDLEETIGIVEANPGKFKLPAGDLQERKVFVERMREAVQEMKDHMVSPTAVAFLERNNREILAGKPAAQKSPSDLLDASAVSATSRYIEEQQATQQLIMDEQDQQLEMVSGSIQVLKHMSGRVGEELDEQGIMLDAFAQEMDHTQSRMDGVLRKLAKVSHMTSDRRQWCAIAVLVGVLLLVLILLFSL

SEQ ID NO: 861247 - protein, 249 aa, Homo sapiens; identical to SEQ ID NO: 861246

SEQ ID NO: 861248 - protein, 155 aa, Homo sapiens
MREAVQEMKDHMVSPTAVAFLERNNREILAGKPAAQKSPSDLLDASAVSATSRYIEEQQATQQLIMDEQDQQLEMVSGSIQVLKHMSGRVGEELDEQGIMLDAFAQEMDHTQSRMDGVLRKLAKVSHMTSDRRQWCAIAVLVGVLLLVLILLFSL

SEQ ID NO: 861249 - protein, 339 aa, Homo sapiens
MCTGSCLCPQPRWLRRGRKCPHVGPPRLLFLPWRSGSRWWRDGGGGGGAFSSVGREPAREPRPGGVYRGLRSPPCVWVCSRGQRQAGGPPAPSRARRAPARSEVQKAVNTARGLYQRWCELLQESAAVGREELDWTTNELRNGLRSIEWDLEDLEETIGIVEANPGKFKLPAGDLQERKVFVERMREAVQEMKDHMVSPTAVAFLERNNREILAGKPAAQKSPSDLLDASAVSATSRYIEEQQATQQLIMDEQDQQLEMVSGSIQVLKHMSGRVGEELDEQGIMLDAFAQEMDHTQSRMDGVLRKLAKVSHMTSDRRQWCAIAVLVGVLLLVLILLFSL

SEQ ID NO: 861250 - protein, 155 aa, Homo sapiens; identical to SEQ ID NO: 861248

SEQ ID NO: 861251 - protein, 289 aa, Homo sapiens
RNLEYRLGTRLGLNRPRVLLGWEGTSPRTQAGRGVRPGGEGTDMSLEDPFFVVRGEVQKAVNTARGLYQRWCELLQESAAVGREELDWTTNELRNGLRSIEWDLEDLEETIGIVEANPGKFKLPAGDLQERKVFVERMREAVQEMKDHMVSPTAVAFLERNNREILAGKPAAQKSPSDLLDASAVSATSRYIEEQQATQQLIMDEQDQQLEMVSGSIQVLKHMSGRVGEELDEQGIMLDAFAQEMDHTQSRMDGVLRKLAKVSHMTSGESPQGRGQSWWGQVVGGTLSP

SEQ ID NO: 861252 - protein, 149 aa, Homo sapiens
MSCGMACAASSGTSRTWKRPSILAGKPAAQKSPSDLLDASAVSATSRYIEEQQATQQLIMDEQDQQLEMVSGSIQVLKHMSGRVGEELDEQGIMLDAFAQEMDHTQSRMDGVLRKLAKVSHMTSDRRQWCAIAVLVGVLLLVLILLFSL

SEQ ID NO: 861253 - protein, 87 aa, Homo sapiens
ARYPVQLFSHAAGHVLQNLDAVGEELDEQGIMLDAFAQEMDHTQSRMDGVLRKLAKVSHMTSDRRQWCAIAVLVGVLLLVLILLFSL

SEQ ID NO: 861254 - protein, 249 aa, Homo sapiens; identical to SEQ ID NO: 861246

SEQ ID NO: 861255 - protein, 292 aa, Homo sapiens
RNLEYRLGTRLGLNRPRVLLGWEGTSPRTQAGRGVRPGGEGTDMSLEDPFFVVRGEVQKAVNTARGLYQRWCELLQESAAVGREELDWTTNELRNGLRSIEWDLEDLEETIGIVEANPGKFKLPAGDLQERKVFVERMREAVQEMKDHMVSPTAVAFLERNNREILAGKPAAQKSPSDLLDASAVSATSRYIEEQQATQQLIMDEQDQQLEMVSGSIQVLKHMSGRVGEELDEQGIMLDAFAQEMDHTQSRMDGVLRKLAKVSHMTSDRRQWCAIAVLVGVLLLVLILLFSL

SEQ ID NO: 861256 - protein, 246 aa, Homo sapiens
MSLEDPFFVVRGEVQKAVNTARGLYQRWCELLQESAAVGREELDWTTNELRNGLRSIEWDLEDLEETIGIVEANPGKFKLPAGDLQERKVFVERMREAVQEMKDHMVSPTAVAFLERNNREILAGKPAAQKSPSDLLDASAVSATSRYIEEQQATQQLIMDEQDQQLEMVSGSIQVLKHMSGRVGEELDEQGIMLDAFAQEMDHTQSRMDGVLRKLAKVSHMTSGESPQGRGQSWWGQVVGGTLSP

SEQ ID NO: 861257 - protein, 232 aa, Homo sapiens
MSLEDPFFVVRGEVQKAVNTARGLYQRWCELLQESAAVGREELDWTTNELRNGLRSIEWDLEDLEETIGIVEANPGKFKLPAGDLQERKVFVERMREAVQEMKDHMVSPTAVAFLERNNREILAGKPAAQKSPSDLLDASAVSATSRYIEEQQATQQLIMDEQDQQLEMVSGSIQVLKHMSGRVGEELDEQGIMLDAFAQEMDHTQSRMDGVLRKLAKVSHMTSALPGRLVP

SEQ ID NO: 861258 - protein, 91 aa, Homo sapiens; identical to SEQ ID NO: 861245

SEQ ID NO: 861259 - protein, 91 aa, Homo sapiens; identical to SEQ ID NO: 861245

SEQ ID NO: 861260 - protein, 91 aa, Homo sapiens; identical to SEQ ID NO: 861245

SEQ ID NO: 861261 - protein, 95 aa, Homo sapiens
ALQGHGPAQLVVVSAHPVRHCPLLLQDVLLAVPVLRIRPPQLRHRPELPHVAVEAHELLPVVDVSLQEALCPIKRVAFLPSLEKVLEWPCPGPQM

SEQ ID NO: 861262 - protein, 225 aa, Homo sapiens
MCQLMPRLYRRIDQQGSLCLNLMKMSMFYVDLDKKETVWHLEEFGQAFSFEAQGGLANIAILNNNLNTLIQRSNHTQATNDPPEVTVFPKEPVELGQPNTLICHIDKFFPPVLNVTWLCNGELVTEGVAESLFLPRTDYSFHKFHYLTFVPSAEDFYDCRVEHWGLDQPLLKHWEAQEPIQMPETTETVLCALGLVLGLVGIIVGTVLIIKSLRSGHDPRAQGTL

SEQ ID NO: 861263 - protein, 225 aa, Homo sapiens; identical to SEQ ID NO: 861262

SEQ ID NO: 861264 - protein, 225 aa, Homo sapiens; identical to SEQ ID NO: 861262

SEQ ID NO: 861265 - protein, 225 aa, Homo sapiens; identical to SEQ ID NO: 861262

SEQ ID NO: 861266 - protein, 225 aa, Homo sapiens; identical to SEQ ID NO: 861262

SEQ ID NO: 861267 - protein, 144 aa, Homo sapiens
ALQGHGPAQLVVVSAHPVRHCPLLLQDVLLAVPVLRIRPPQLRHRPELPHVAVEAHELLPVVDVSLQEALCPIKRVAFLPSLEKVVNPSHADSSPPISSARGPQFQSHLPPLGLSSSSLFLCSQSSIIDPTTCALKTECSISEL

SEQ ID NO: 861268 - protein, 225 aa, Homo sapiens; identical to SEQ ID NO: 861262

SEQ ID NO: 861269 - protein, 105 aa, Homo sapiens
ALQGHGPAQLVVVSAHPVRHCPLLLQDVLLAVPVLRIRPPQLRHRPELPHVAVEAHELLPVVDVSLQEALCPIKRVAFLPSLEKVSSIIDPTTCALKTECSISEL

SEQ ID NO: 861270 - protein, 167 aa, Homo sapiens
MCQLMPRLYRRIDQQGSLCLNLMKMSMFYVDLDKKETVWHLEEFGQAFSFEAQGGLANIAILNNNLNTLIQRSNHTQATNDPPEVTVFPKEPVELGQPNTLICHIDKFFPPVLNVTWLCNGELVTEGVAESLFLPRTDYSFHKFHYLTFVPSAEDFYDCRVEHWCWA

SEQ ID NO: 861271 - protein, 153 aa, Homo sapiens
MCQLMPRLYRRIDQQGSLCLNLMKMSMFYVDLDKKETVWHLEEFGQAFSFEAQGGLANIAILNNNLNTLIQRSNHTQATNDPPEVTVFPKEPVELGQPNTLICHIDKFFPPVLNVTWLCNGELVTEGVAESLFLPRTDYSFHKFHYCENYSSG

SEQ ID NO: 861272 - protein, 144 aa, Homo sapiens; identical to SEQ ID NO: 861267

SEQ ID NO: 861273 - protein, 85 aa, Homo sapiens
PVRHCPLLLQDVLLAVPVLRIRPPQLRHRPELPHVAVEAHELLPVVDVSLQEALCPIKRVAFLPSLEKVILCGEGADMSGGATLI

SEQ ID NO: 861274 - protein, 225 aa, Homo sapiens; identical to SEQ ID NO: 861262

SEQ ID NO: 861275 - protein, 225 aa, Homo sapiens; identical to SEQ ID NO: 861262

SEQ ID NO: 861276 - protein, 225 aa, Homo sapiens; identical to SEQ ID NO: 861262

SEQ ID NO: 861277 - protein, 225 aa, Homo sapiens; identical to SEQ ID NO: 861262

SEQ ID NO: 861278 - protein, 225 aa, Homo sapiens; identical to SEQ ID NO: 861262

SEQ ID NO: 861279 - protein, 127 aa, Homo sapiens
MCQLMPRLYRRIDQQGSLCLNLMKMSMFYVDLDKKETVWHLEEFGQAFSFEAQGGLANIAILNNNLNTLIQRSNHTQATNASSATLTSSSHQCSTSRGCATGSWSLRVSLRASSCPEQITASTSSIT

SEQ ID NO: 861280 - protein, 227 aa, Homo sapiens
MCQLMPRLYRRIDQQGSLCLNLMKMSMFYVDLDKKETVWHLEEFGQAFSFEAQGGLANIAILNNNLNTLIQRSNHTQATNDPPEVTVFPKEPVELGQPNTLICHIDKFFPPVLNVTWLCNGELVTEGVAESLFLPRTDYSFHKFHYLTFVPSAEDFYDCRVEHWGLDQPLLKHWEAQEPIQMPETTETVLCALGLVLGLVGIIVARLLSSGLAARAGPCDPVGAFAK

SEQ ID NO: 861281 - protein, 76 aa, Homo sapiens
MPDVTGLPDAYTNGKSIILEDHSFSYSRKINNFRLGSLVLKKPIVENPYRGVFVSPPQIEAVLLKEGARVAGPFKK

SEQ ID NO: 861282 - protein, 178 aa, Homo sapiens
MAALKALVSGCGRLLRGLLAGPAATSWSRLPARGFREVVETQEGKTTIIEGRITATPKESPNPPNPSGQCPICRWNLKHKYNYDDVLLLSQFIRPHGGMLPRKITGLCQEEHRKIEECVKMAHRAGLLPNHRPRLPEGVVPKSKPQLNRYLTRWAPGSVKPIYKDNVCYSRTPWKLYH

SEQ ID NO: 861283 - protein, 205 aa, Homo sapiens
MAALKALVSGCGRLLRGLLAGPAATSWSRLPKRGSFPGPRGGGSKGSGGDPRREDNYIEGRITATPKESPNPPNPSGQCPICRWNLKHKYNYDDVLLLSQFIRPHGGMLPRKITGLCQEEHRKIEECVKMAHRAGLLPNHRPRLPEGVVPKSKPQLNRYLTRWAPGSVKPIYKKGPRWNRVRMPVGSPLLRDNVCYSRTPWKLYH

SEQ ID NO: 861284 - protein, 270 aa, Homo sapiens
MAALKALVSGCGRLLRGLLAGPAATSWSRLPARGFREVVETQEGKTTIIEGRITATPKESPNPPNPSGQCPICRWNLKHKYNYDDVLLLSQFIRPHGGMLPRKITGLCQEEHRKIEECVKMAHRAGRRPWGPRGAEGCRHSLPTQLPHVSAPPGRKVDIRSVNYTHHPMPTFPLPWAFPLAPSELQRELQRLSPLPRHSGLLPNHRPRLPEGVVPKSKPQLNRYLTRWAPGSVKPIYKKGPRWNRVRMPVGSPLLRDNVCYSRTPWKLYH

SEQ ID NO: 861285 - protein, 270 aa, Homo sapiens; identical to SEQ ID NO: 861284

SEQ ID NO: 861286 - protein, 127 aa, Homo sapiens
MAALKALVSGCGRLLRGLLAGPAATSWSRLPARGFREVVETQEGKTTIIEGRITATPKESPNPPNPSGQCPICRWNLKHKYNYDDVLLLSQFIRPHGGMLPRKITGLCQEEHRKIEECVKMAHRAGT

SEQ ID NO: 861287 - protein, 168 aa, Homo sapiens
MCLAPRARESHTGPYRAPGSGETHRKQRNSAGHGVGCLEGNRGPTPGRTGGLIIHPRILQRGPHAGLPRAQASKLVIPAGRRRPKKPPRKVFKPGGSPRRTRSLGAPLGRHRGTKTPSSLIPPISRWAPTRGANLWGSGSMLPAGGGLTPPFLVEGAPRGLATSAGEK

SEQ ID NO: 861288 - protein, 196 aa, Homo sapiens
MAALKALVSGCGRLLRGLLAGPAATSWSRLPARGFREVVETQEGKTTIIEGRITATPKESPNPPNPSGQCPICRWNLKHKYNYDDVLLLSQFIRPHGGMLPRKITGLCQEEHRKIEECVKMAHRAGLLPNHRPRLPEGVVPKSKPQLNRYLTRWAPGSVKPIYKKGPRWNRVRMPVGSPLLRDNVCYSRTPWKLYH

SEQ ID NO: 861289 - protein, 196 aa, Homo sapiens; identical to SEQ ID NO: 861288

SEQ ID NO: 861290 - protein, 127 aa, Homo sapiens; identical to SEQ ID NO: 861286

SEQ ID NO: 861291 - protein, 144 aa, Homo sapiens
MAALKALVSGCGRLLRGLLAGPAATSWSRLPARGFREVVETQEGKTTIIEGRITATPKESPNPPNPSGQCPICRWNLKHKYNYDDVLLLSQFIRPHGGMLPRKITGLCQEEHRKIEECVKMAHRAGLGFLKELFRRANPNSTGT

SEQ ID NO: 861292 - protein, 214 aa, Homo sapiens
MAALKALVSGCGRLLRGLLAGPAATSWSRLPARGFREVVETQEGKTTIIEGRITATPKESPNPPNPSGQCPICRWNLKHKYNYDDVLLLSQFIRPHGGMLPRKITGLCQEEHRKIEECVKMAHRAGRRPWGPRGAEGCRHSLPTQLPHVSAPPGRKVDIRSVSYHTMQLSVLVSLALELQELKDIPISASVYTNQGGPEECERTNQGQRRAGEA

SEQ ID NO: 861293 - protein, 537 aa, Homo sapiens
MTFIPYHKQCRKEILVAALVFRKPWEQVPKKPKRKKRRRRNVNCLKNVVIWYEDHKHRCPYEPHLAELDPTFGLYTTAVWQCEAGHRYFQDLHSPLKPLSDSDPDSDKVGNGLVAGSSDSSSSGSASDSEESPEGQPVKAAAAAAAATPTSPVGSSGLITQEGVHIPFDVHHVESLAEQGTPLCSNPAGNGPEALETVVCVPVPVQVGAGPSALFENVPQEALGEVVASCPMPGMVPGSQVIIIAGPGYDALTAEGIHLNMAAGSGVPGSGLGEEVPCAMMEGVAAYTQTEPEGSQPSTMDATAVAGIETKKEKEDLCLLKKEEKEEPVAPELATTVPESAEPEAEADGEELDGSDMSAIIYEIPKEPEKRRRSKRSRVMDADGLLEMFHCPYEGCSQVYVALSSFQNHVNLVHRKGKTKVCPHPGCGKKFYLSNHLRRHMIIHSGVREFTCETCGKSFKRKNHLEVHRRTHTGETPLQCEICGYQCRQRASLNWHMKKHTAEVQYNFTCDRCGKRFEKLDSVKFHTLKSHPDHKPT

SEQ ID NO: 861294 - protein, 680 aa, Homo sapiens
MAERALEPEAEAEAEAGAGGEAAAEEGAAGRKARGRPRLTESDRARRRLESRKKYDVRRVYLGEAHGPWVDLRRRSGWSDAKLAAYLISLERGQRSGRHGKPWEQVPKKPKRKKRRRRNVNCLKNVVIWYEDHKHRCPYEPHLAELDPTFGLYTTAVWQCEAGHRYFQDLHSPLKPLSDSDPDSDKVGNGLVAGSSDSSSSGSASDSEESPEGQPVKAAAAAAAATPTSPVGSSGLITQEGVHIPFDVHHVESLAEQGTPLCSNPAGNGPEALETVVCVPVPVQVGAGPSALFENVPQEALGEVVASCPMPGMVPGSQVIIIAGPGYDALTAEGIHLNMAAGSGVPGSGLGEEVPCAMMEGVAAYTQTEPEGSQPSTMDATAVAGIETKKEKEDLCLLKKEEKEEPVAPELATTVPESAEPEAEADGEELDGSDMSAIIYEIPKEPEKRRRSKRSRVMDADGLLEMFHCPYEGCSQVYVALSSFQNHVNLVHRKGKTKVCPHPGCGKKFYLSNHLRRHMIIHSGVREFTCETCGKSFKRKNHLEVRDLWLPVPAARVAQLAHEEAHCGGAVQLHVRSLREALREAGQRQVPHAQKPPGSQAHLTHLTTDRPYLFVRSDTTPGLAGAWTAARAARTAGRKEAPPPRPRAGPPGQVPHPAPPHPSRSWCLGLHCWNCVKRAE

SEQ ID NO: 861295 - protein, 615 aa, Homo sapiens
MAERALEPEAEAEAEAGAGGEAAAEEGAAGRKARGRPRLTESDRARRRLESRKKYDVRRVYLGEAHGPWVDLRRRSGWSDAKLAAYLISLERGQRSGRHGKPWEQVPKKPKRKKRRRRNVNCLKNVVIWYEDHKHRCPYEPHLAELDPTFGLYTTAVWQCEAGHRYFQDLHSPLKPLSDSDPDSDKVGNGLVAGSSDSSSSGSASDSEESPEGQPVKAAAAAAAATPTSPVGSSGLITQEGVHIPFDVHHVESLAEQGTPLCSNPAGNGPEALETVVCVPVPVQVGAGPSALFENVPQEALGEVVASCPMPGMVPGSQVIIIAGPGYDALTAEGIHLNMAAGSGVPGSGLGEEVPCAMMEGVAAYTQTEPEGSQPSTMDATAVAGIETKKEKEDLCLLKKEEKEEPVAPELATTVPESAEPEAEADGEELDGSDMSAIIYEIPKEPEKRRRSKRSRVMDADGLLEMFHCPYEGCSQVYVALSSFQNHVNLVHRKGKTKVCPHPGCGKKFYLSNHLRRHMIIHSGVREFTCETCGKSFKRKNHLEVHRRTHTGETPLQCEICGYQCRQRASLNWHMKKHTAEVQYNFTCDRCGKRFEKLDSVKFHTLKSHPDHKPT

SEQ ID NO: 861296 - protein, 676 aa, Homo sapiens
MAERALEPEAEAEAEAGAGGEAAAEEGAAGRKARGRPRLTESDRARRRLESRKKYDVRRVYLGEAHGPWVDLRRRSGWSDAKLAAYLISLERGQRSGRHGKPWEQVPKKPKRKKRRRRNVNCLKNVVIWYEDHKHRCPYEPHLAELDPTFGLYTTAVWQCEAGHRYFQDLHSPLKPLSDSDPDSDKVGNGLVAGSSDSSSSGSASDSEESPEGQPVKAAAAAAAATPTSPVGSSGLITQEGVHIPFDVHHVESLAEQGTPLCSNPAGNGPEALETVVCVPVPVQVGAGPSALFENVPQEALGEVVASCPMPGMVPGSQVIIIAGPGYDALTAEGIHLNMAAGSGVPGSGLGEEVPCAMMEGVAAYTQTEPEGSQPSTMDATAVAGIETKKEKEDLCLLKKEEKEEPVAPELATTVPESAEPEAEADGEELDGSDMSAIIYEIPKEPEKRRRSKRSRVMDADGLLEMFHCPYEGCSQVYVALSSFQNHVNLVHRKGKTKVCPHPGCGKKFYLSNHLRRHMIIHSGVREFTCETCGKSFKRKNHLEVHRRTHTGETPLQWVTGRPVPLEDWVGGDPSRSQGRLRPNAVSGPGSTCARPCRAPPRPAHSDPAPSRHGLPARCEICGYQCRQRASLNWHMKKHTAEVQYNFTCDRCGKRFEKLDSVKFHTLKSHPDHKPT

SEQ ID NO: 861297 - protein, 424 aa, Homo sapiens
MQRLQVVLGHLRGPADSGWMPQAAPCLSGAPQASAADVVVVHGRRTAICRAGRGGFKDTTPDELLSAVMTAVLKDVNLRPEQLGDICVGNVLQPGAGAIMARIAQFLSDIPETVPLSTVNRQCSSGLQAVASIAGGIRNGSYDIGMACGVESMSLADRGNPGNITSRLMEKEKARDCLIPMGITSENVAERFGISREKQDTFALASQQKAARAQSKGCFQAEIVPVTTTVHDDKGTKRSITVTQDEGIRPSTTMEGLAKLKPAFKKDGSTTAGNSSQVSDGAAAILLARRSKAEELGLPILGVLRSYAVVGVPPDIMGIGPAYAIPVALQKAGLTVSDVDIFEINEAFASQAAYCVEKLRLPPEKVNPLGGAVALGHPLGCTGARQVITLLNELKRRGKRAYGVVSMCIGTGMGAAAVFEYPGN

SEQ ID NO: 861298 - protein, 132 aa, Homo sapiens
EGEPPGVTVALGPTGLHWGTTGHHAAILLARRSKAEELGLPILGVLRSYAVVGVPPDIMGIGPAYAIPVALQKAGLTVSDVDIFEINEAFASQLEIVPVTTTVHDDKGTKRSITVTQDEGIRPSTTMEGLAN

SEQ ID NO: 861299 - protein, 449 aa, Homo sapiens
PPPRGLRLGRGPSRTGGWSAGLTCAMQRLQVVLGHLRGPADSGWMPQAAPCLSGAPQASAADVVVVHGRRTAICRAGRGGFKDTTPDELLSAVMTAVLKDVNLRPEQLGDICVGNVLQPGAGAIMARIAQFLSDIPETVPLSTVNRQCSSGLQAVASIAGGIRNGSYDIGMACGVESMSLADRGNPGNITSRLMEKEKARDCLIPMGITSENVAERFGISREKQDTFALASQQKAARAQSKGCFQAEIVPVTTTVHDDKGTKRSITVTQDEGIRPSTTMEGLAKLKPAFKKDGSTTAGNSSQVSDGAAAILLARRSKAEELGLPILGVLRSYAVVGVPPDIMGIGPAYAIPVALQKAGLTVSDVDIFEINEAFASQAAYCVEKLRLPPEKVNPLGGAVALGHPLGCTGARQVITLLNELKRRGKRAYGVVSMCIGTGMGAAAVFEYPGN

SEQ ID NO: 861300 - protein, 480 aa, Homo sapiens
MQRLQVVLGHLRGPADSGWMPQAAPCLSGAPQASAADVVVVHGRRTAICRAGRGGFKDTTPDELLSAVMTAVLKDVNLRPEQLGDICVGNVLQPGAGAIMARIAQFLSDIPETVPLSTVNRQCSSGLQAVASIAGGIRNGSYDIGMACGVESMSLADRGNPGNITSRLMEKEKARDCLIPMGITSENVAERFGISREKQDTFALASQQKAARAQSKGCFQAEIVPVTTTVHDDKGTKRSITVTQDEGIRPSTTMEGLAKLKPAFKKDGSTTAGETGRGRGMRKQAMAMLGAVLWEPGIDQAPLQSKKWEGWDLLIPTPMPSYPNSLPLGNSSQVSDGAAAILLARRSKAEELGLPILGVLRSYAVVGVPPDIMGIGPAYAIPVALQKAGLTVSDVDIFEINEAFASQAAYCVEKLRLPPEKVNPLGGAVALGHPLGCTGARQVITLLNELKRRGKRAYGVVSMCIGTGMGAAAVFEYPGN

SEQ ID NO: 861301 - protein, 424 aa, Homo sapiens; identical to SEQ ID NO: 861297

SEQ ID NO: 861302 - protein, 364 aa, Homo sapiens
MQRLQVVLGHLRGPADSGWMPQAAPCLSGAPQASAADVVVVHGRRTAICRAGRGGFKDTTPDELLSAVMTAVLKDVNLRPEQLGDICVGNVLQPGAGAIMARIAQFLSDIPETVPLSTVNRQCSSGLQAVASIAGGIRNGSYDIGMACGVESMSLADRGNPGNITSRLMEKEKARDCLIPMGITSENVAERFGISREKQDTFALASQQKAARAQSKGCFQAEIVPVTTTVHDDKGTKRSITVTQDEGIRPSTTMEGLAKLKPAFKKDGSTTAGLTVSDVDIFEINEAFASQAAYCVEKLRLPPEKVNPLGGAVALGHPLGCTGARQVITLLNELKRRGKRAYGVVSMCIGTGMGAAAVFEYPGN

SEQ ID NO: 861303 - protein, 445 aa, Homo sapiens
  misc_feature (386)..(390): Xaa can be any naturally occurring amino acid
  misc_feature (398)..(398): Xaa can be any naturally occurring amino acid
  misc_feature (400)..(401): Xaa can be any naturally occurring amino acid
  misc_feature (404)..(404): Xaa can be any naturally occurring amino acid
  misc_feature (410)..(410): Xaa can be any naturally occurring amino acid
  misc_feature (412)..(412): Xaa can be any naturally occurring amino acid
  misc_feature (414)..(414): Xaa can be any naturally occurring amino acid
  misc_feature (416)..(416): Xaa can be any naturally occurring amino acid
  misc_feature (420)..(421): Xaa can be any naturally occurring amino acid
  misc_feature (423)..(423): Xaa can be any naturally occurring amino acid
  misc_feature (426)..(428): Xaa can be any naturally occurring amino acid
MQRLQVVLGHLRGPADSGWMPQAAPCLSGAPQASAADVVVVHGRRTAICRAGRGGFKDTTPDELLSAVMTAVLKDVNLRPEQLGDICVGNVLQPGAGAIMARIAQFLSDIPETVPLSTVNRQCSSGLQAVASIAGGIRNGSYDIGMACGVESMSLADRGNPGNITSRLMEKEKARDCLIPMGITSENVAERFGISREKQDTFALASQQKAARAQSKGCFQAEIVPVTTTVHDDKGTKRSITVTQDEGIRPSTTMEGLAKLKPAFKKDGSTTAGNSSQVSDGAAAILLARRSKAEELGLPILGVLRSYAVVGVPPDIMGIGPAYAIPVALQKAGLTVSDVDIFEINEAFASQAAYCVEKLRLPPEKVNPLGGAVALGHPLGCTGARXXXXXFFFFYLLXKXXYVXFSFFFXTXIXSXSFFXXPXYLXXXSFLYSYSYSPAALAARQ

SEQ ID NO: 861304 - protein, 336 aa, Homo sapiens
MQRLQVVLGHLRGPADSGWMPQAAPCLSGAPQASAADVVVVHGRRTAICRAGRGGFKDTTPDELLSAVMTAVLKDVNLRPEQLGDICVGNVLQPGAGAIMARIAQFLSDIPETVPLSTVNRQCSSGLQAVASIAGGIRNGSYDIGMACGVESMSLADRGNPGNITSRLMEKEKARDCLIPMGITSENVAERFGISREKQDTFALASQQKAARAQSKGCFQAEIVPVTTTVHDDKGTKRSITVTQDEGIRPSTTMEGLAKLKPAFKKDGSTTAGNSSQVSDGAAAILLARRSKAEELGLPILGVLRSYAVVGVPPDIMGIGPAYAIPVALQKAECEH

SEQ ID NO: 861305 - protein, 279 aa, Homo sapiens
MACGVESMSLADRGNPGNITSRLMEKEKARDCLIPMGITSENVAERFGISREKQDTFALASQQKAARAQSKGCFQAEIVPVTTTVHDDKGTKRSITVTQDEGIRPSTTMEGLAKLKPAFKKDGSTTAGNSSQVSDGAAAILLARRSKAEELGLPILGVLRSYAVVGVPPDIMGIGPAYAIPVALQKAGLTVSDVDIFEINEAFASQAAYCVEKLRLPPEKVNPLGGAVALGHPLGCTGARQVITLLNELKRRGKRAYGVVSMCIGTGMGAAAVFEYPGN

SEQ ID NO: 861306 - protein, 220 aa, Homo sapiens
MWLSGLAFHGRSRIPLPWLPSRTTTVHDDKGTKRSITVTQDEGIRPSTTMEGLAKLKPAFKKDGSTTAGNSSQVSDGAAAILLARRSKAEELGLPILGVLRSYAVVGVPPDIMGIGPAYAIPVALQKAGLTVSDVDIFEINEAFASQAAYCVEKLRLPPEKVNPLGGAVALGHPLGCTGARQVITLLNELKRRGKRAYGVVSMCIGTGMGAAAVFEYPGN

SEQ ID NO: 861307 - protein, 343 aa, Homo sapiens
MQRLQVVLGHLRGPADSGWMPQAAPCLSGAPQASAADVVVVHGRRTAICRAGRGGFKDTTPDELLSAVMTAVLKDVNLRPEQLGDICVGNVLQPGAGAIMARIAQFLSDIPETVPLSTVNRQCSSGLQAVASIAGGIRNGSYDIGMACGVESMSLADRGNPGNITSRLMEKEKARDCLIPMGITSENVAERFGISREKQDTFALASQQKAARAQSKGCFQAEIVPVSAGADTLILGHSDAPLGALVIMDLVVTGQYGCAGDGNVVGEAEDAGALEEKQTQAGAAGAGGGHNHCSGSPKTSVLLRFMFSKVKAGQPWVGDVLMSCRWLTVCVPRRPDSNLVHNI

SEQ ID NO: 861308 - protein, 113 aa, Homo sapiens
MQRLQVVLGHLRGPADSGWMPQAAPCLSGAPQASAADVVVVHGRRTAICRAGRGGFKDTTPDELLSAVMTAVLKDVNLRPEQLGDICVVTSRRLCLCPLSIDSVRRGYRQWPA

SEQ ID NO: 861309 - protein, 58 aa, Homo sapiens
VEKLRLPPEKVNPLGGAVALGHPLGCTGARQVITLLNELKRRGKREGFAPGGGVIGGY

SEQ ID NO: 861310 - protein, 123 aa, Homo sapiens
MQRLQVVLGHLRGPADSGWMPQAAPCLSGAPQASAADVVVVHGRRTAICRAGRGGFKDTTPDELLSAVMTAVLKDVNLRPEQLGDICVEMSCLRAACSGRPCPRPSRPPGVDPSLIKIHQVSR

SEQ ID NO: 861311 - protein, 471 aa, Homo sapiens
  misc_feature (10)..(10): Xaa can be any naturally occurring amino acid
  misc_feature (13)..(13): Xaa can be any naturally occurring amino acid
DTRELRDYKXCPXKSTALLYTELCILNGLRDELGSRTGGWSAGLTCAMQRLQVVLGHLRGPADSGWMPQAAPCLSGAPQASAADVVVVHGRRTAICRAGRGGFKDTTPDELLSAVMTAVLKDVNLRPEQLGDICVGNVLQPGAGAIMARIAQFLSDIPETVPLSTVNRQCSSGLQAVASIAGGIRNGSYDIGMACGVESMSLADRGNPGNITSRLMEKEKARDCLIPMGITSENVAERFGISREKQDTFALASQQKAARAQSKGCFQAEIVPVTTTVHDDKGTKRSITVTQDEGIRPSTTMEGLAKLKPAFKKDGSTTAGNSSQVSDGAAAILLARRSKAEELGLPILGVLRSYAVVGVPPDIMGIGPAYAIPVALQKAGLTVSDVDIFEINEAFASQAAYCVEKLRLPPEKVNPLGGAVALGHPLGCTGARQVITLLNELKRRGKRAYGVVSMCIGTGMGAAAVFEYPGN

SEQ ID NO: 861312 - protein, 424 aa, Homo sapiens; identical to SEQ ID NO: 861297

SEQ ID NO: 861313 - protein, 373 aa, Homo sapiens
MQRLQVVLGHLRGPADSGWMPQAAPCLSGAPQASAADVVVVHGRRTAICRAGRGGFKDTTPDELLSAVMTAVLKDVNLRPEQLGDICVGNVLQPGAGAIMARIAQFLSDIPETVPLSTVNRQCSSGLQAVASIAGGIRNGSYDIGMACGVESMSLADRGNPGNITSRLMEKEKARDCLIPMGITSENVAERFGISREKQDTFALASQQKAARAQSKGCFQAEIVPVTTTVHDDKGTKRSITVTQDEGIRPSTTMEGLAKLKPAFKKDGSTTAGNSSQVSDGAAAILLARRSKAEELGLPILGVLRSYAVVGVPPDIMGIGPAYAIPVALQKAEVRWLLHIVSGSHLDPAAALHAVARGMRVVLWVLQSGGGAG

SEQ ID NO: 861314 - protein, 424 aa, Homo sapiens; identical to SEQ ID NO: 861297

SEQ ID NO: 861315 - protein, 320 aa, Homo sapiens
MQRLQVVLGHLRGPADSGWMPQAAPCLSGAPQASAADVVVVHGRRTAICRAGRGGFKDTTPDELLSAVMTAVLKDVNLRPEQLGDICVGNVLQPGAGAIMARIAQFLSDIPETVPLSTVNRQCSSGLQAVASIAGGIRNGSYDIGMACGVESMSLADRGNPGNITSRLMEKEKARDCLIPMGITSENVAERFGISREKQDTFALASQQKAARAQSKGCFQAEIVPVTTTVHDDKGTKRSITVTQDEGIRPSTTMEGLAKLKPAFKKDGSTTAGNSSQVSDGAAAILLARRSKAEELGLPILGVLRSYAVVGVPPGHHAAQ

SEQ ID NO: 861316 - protein, 272 aa, Homo sapiens
MSLADRGNPGNITSRLMEKEKARDCLIPMGITSENVAERFGISREKQDTFALASQQKAARAQSKGCFQAEIVPVTTTVHDDKGTKRSITVTQDEGIRPSTTMEGLAKLKPAFKKDGSTTAGNSSQVSDGAAAILLARRSKAEELGLPILGVLRSYAVVGVPPDIMGIGPAYAIPVALQKAGLTVSDVDIFEINEAFASQAAYCVEKLRLPPEKVNPLGGAVALGHPLGCTGARQVITLLNELKRRGKRAYGVVSMCIGTGMGAAAVFEYPGN

SEQ ID NO: 861317 - protein, 391 aa, Homo sapiens
MQRLQVVLGHLRGPADSGWMPQAAPCLSGAPQASAADVVVVHGRRTAICRAGRGGFKDTTPDELLSAVMTAVLKDVNLRPEQLGDICVGNVLQPGAGAIMARIAQFLSDIPETVPLSTVNRQCSSGLQAVASIAGGIRNGSYDIGMACGITSENVAERFGISREKQDTFALASQQKAARAQSKGCFQAEIVPVTTTVHDDKGTKRSITVTQDEGIRPSTTMEGLAKLKPAFKKDGSTTAGNSSQVSDGAAAILLARRSKAEELGLPILGVLRSYAVVGVPPDIMGIGPAYAIPVALQKAGLTVSDVDIFEINEAFASQAAYCVEKLRLPPEKVNPLGGAVALGHPLGCTGARQVITLLNELKRRGKRAYGVVSMCIGTGMGAAAVFEYPGN

SEQ ID NO: 861318 - protein, 162 aa, Homo sapiens
MPSYPNSLPLGNSSQVSDGAAAILLARRSKAEELGLPILGVLRSYAVVGVPPDIMGIGPAYAIPVALQKAGLTVSDVDIFEINEAFASQAAYCVEKLRLPPEKVNPLGGAVALGHPLGCTGARQVITLLNELKRRGKRAYGVVSMCIGTGMGAAAVFEYPGN

SEQ ID NO: 861319 - protein, 331 aa, Homo sapiens
MQRLQVVLGHLRGPADSGWMPQAAPCLSGAPQASAADVVVVHGRRTAICRAGRGGFKDTTPDELLSAVMTAVLKDVNLRPEQLGDICVGNVLQPGAGAIMARIAQFLSDIPETVPLSTVNRQCSSGLQAVASIAGGIRNGSYDIGMACGITSENVAERFGISREKQDTFALASQQKAARAQSKGCFQAEIVPVTTTVHDDKGTKRSITVTQDEGIRPSTTMEGLAKLKPAFKKDGSTTAGLTVSDVDIFEINEAFASQAAYCVEKLRLPPEKVNPLGGAVALGHPLGCTGARQVITLLNELKRRGKRAYGVVSMCIGTGMGAAAVFEYPGN

SEQ ID NO: 861320 - protein, 149 aa, Homo sapiens
MQRLQVVLGHLRGPADSGWMPQAAPCLSGAPQASAADVVVVHGRRTAICRAGRGGFKDTTPDELLSAVMTAVLKDVNLRPEQLGDICVGNVLQPGAGAIMARIAQFLSDIPETVPLSTVNRQCSSGLQAVASIAGGIRNGSYDIGMACG

SEQ ID NO: 861321 - protein, 69 aa, Homo sapiens
SDAWVDPRVRTDAVWLWIAPYGQLCPQGRMRIATEVLKSKPNSSHWHTGQALDRKLEVEMVESNLPGPA

SEQ ID NO: 861322 - protein, 344 aa, Homo sapiens
MDSYSAPESTPSASSRPEDYFIGATPLQKRLESVRKQSSFILTPPRRKIPQCSQLQEDVDPQKVAFLLHKQWTLYSLTPLYKFSYSNLKEYSRLLNAFIVAEKQKGLAVEVGEDFNIKVIFSTLLGMKGTQRDPEAFLVQIVSKSQLPSENREGKVLWTGWFCCVFGDSLLETVSEDFTCLPLFLANGAESNTAIIGTWFQKTFDCYFSPLAINAFNLSWMAAMWTACKMDHYVATTEFLWSVPCSPQSLDISFAIHPEDAKALWDSVHKTPGEVTQEEVDLFMDCLYSHFHRHFKIHLSATRLVRVSTSVASAHTDGKIKILCHKYLIGVLAYLTELAIFQIE

SEQ ID NO: 861323 - protein, 218 aa, Homo sapiens [sequence omitted]

SEQ ID NO: 861324 - protein, 344 aa, Homo sapiens; identical to SEQ ID NO: 861322

SEQ ID NO: 861325 - protein, 151 aa, Homo sapiens
MDSYSAPESTPSASSRPEDYFIGATPLQKRLESVRKQSSFILTPPRRKIPQCSQLQEDVDPQKVAFLLHKQWTLYSLTPLYKFSYSNLKEYSRLLNAFIVAEKQKGLAVEVGEDFNIKVIFSTLLGMKGTQRDPEAFLVPGSHFVTQAGVQ

SEQ ID NO: 861326 - protein, 194 aa, Homo sapiens
AQGAAAGAVGAKAMSDSWVPNSASGQDPGGRRRAWAELLAGRVKREKYNPERAQKLKESAVRLLRSHQDLNALLLEVEGPLCKKLSLSKVIDCDSSEAYANHSSSFIGSALQDQASRLGVPVGILSAGMVASSVGQICTAPAETSHPVLLTVEQRKKLSSLLEFAQYLLAHSMFSRLSFCQELWKIQVNLRLQI

SEQ ID NO: 861327 - protein, 1468 aa, Homo sapiens
AQGAAAGAVGAKAMSDSWVPNSASGQDPGGRRRAWAELLAGRVKREKYNPERAQKLKESAVRLLRSHQDLNALLLEVEGPLCKKLSLSKVIDCDSSEAYANHSSSFIGSALQDQASRLGVPVGILSAGMVASSVGQICTAPAETSHPVLLTVEQRKKLSSLLEFAQYLLAHSMFSRLSFCQELWKIQSSLLLEAVWHLHVQGIVSLQELLESHPDMHAVGSWLFRNLCCLCEQMEASCQHADVARAMLSDFVQMFVLRGFQKNSDLRRTVEPEKMPQVAVDVLQRMLIFALDALAAGVQEESSTHKIVRCWFGVFSGHTLGSVISTDPLKRFFSHTLTQILTHSPVLKASDAVQMQREWSFARTHPLLTSLYRRLFVMLSAEELVGHLQEVLETQEVHWQRVLSFVSALVVCFPEAQQLLEDWVARLMAQAFESCQLDSMVTAFLVVRQAALEGPSAFLSYADWFKASFGSTRGYHGCSKKALVFLFTFLSELVPFESPRYLQVHILHPPLVPSKYRSLLTDYISLAKTRLADLKVSIENMGLYEDLSSAGDITEPHSQALQDVEKAIMVFEHTGNIPVTVMEASIFRRPYYVSHFLPALLTPRVLPKVPDSRVAFIESLKRADKIPPSLYSTYCQACSAAEEKPEDAALGVRAEPNSAEEPLGQLTAALGELRASMTDPSQRDVISAQVAVISERLRAVLGHNEDDSSVEISKIQLSINTPRLEPREHMAVDLLLTSFCQNLMAASSVAPPERQGPWAALFVRTMCGRVLPAVLTRLCQLLRHQGPSLSAPHVLGLAALAVHLGESRSALPEVDVGPPAPGAGLPVPALFDSLLTCRTRDSLFFCLKFCTAAISYSLCKFSSQSRDTLCSCLSPGLIKKFQFLMFRLFSEARQPLSEEDVASLSWRPLHLPSADWQRAALSLWTHRTFREVLKEEDVHLTYQDWLHLELEIQPEADALSDTERQDFHQWAIHEHFLPESSASGGCDGDLQAACTILVNALMDFHQSSRSYDHSENSDLVFGGRTGNEDIISRLQEMVADLELQQDLIVPLGHTPSQEHFLFEIFRRRLQALTSGWSVAASLQRQRELLMYKRILLRLPSSVLCGSSFQAEQPITARCEQFFHLVNSEMRNFCSHGGALTQDITAHFFRGLLNACLRSRDPSLMVDFILAKCQTKCPLILTSALVWWPSLEPVLLCRWRRHCQSPLPRELQKLQEGRQFASDFLSPEAASPAPNPDWLSAAALHFAIQQVREENIRKQLKKLDCEREELLVFLFFFSLMGLLSSHLTSNSTTDLPKAFHVCAAILECLEKRKISWLALFQLTESDLRLGRLLLRVAPDQHTRLLPFAFYSLLSYFHEDAAIREEAFLHVAVDMYLKLVQLFVAGDTSTVSPPAGRSLELKGQGNPVELITKARLFLLQLIPRCPKKSFSHVAELLADRGDCDPEVSAALQSRQQAAPDADLSQEPHLF

SEQ ID NO: 861328 - protein, 1440 aa, Homo sapiens
AQGAAAGAVGAKAMSDSWVPNSASGQDPGGRRRAWAELLAGRVKREKYNPERAQKLKESAVRLLRSHQDLNALLLEVEGPLCKKLSLSKVIDCDSSEAYANHSSSFIGSALQDQASRLGVPVGILSAGMVASSVGQICTAPAETSHPVLLTVEQRKKLSSLLEFAQYLLAHSMFSRLSFCQELWKIQSSLLLEAVWHLHVQGIVSLQELLESHPDMHAVGSWLFRNLCCLCEQMEASCQHADVARAMLSDFVQMFVLRGFQKNSDLRRTVEPEKMPQVAVDVLQRMLIFALDALAAGVQEESSTHKIVRCWFGVFSGHTLGSVISTDPLKRFFSHTLTQILTHSPVLKASDAVQMQREWSFARTHPLLTSLYRRLFVMLSAEELVGHLQEVLETQEVHWQRVLSFVSALVVCFPEAQQLLEDWVARLMAQAFESCQLDSMVTAFLVVRQAALEGPSAFLSYADWFKASFGSTRGYHGCSKKALVFLFTFLSELVPFESPRYLQVHILHPPLVPSKYRSLLTDYISLAKTRLADLKVSIENMGLYEDLSSAGDITEPHSQALQDVEKAIMVFEHTGNIPVTVMEASIFRRPYYVSHFLPALLTPRVLPKVPDSRVAFIESLKRADKIPPSLYSTYCQACSAAEEKPEDAALGVRAEPNSAEEPLGQLTAALGELRASMTDPSQRDVISAQVAVISERLRAVLGHNEDDSSVEISKIQLSINTPRLEPREHMAVDLLLTSFCQNLMAASSVAPPERQGPWAALFVRTMCGRVLPAVLTRLCQLLRHQGPSLSAPHVLGLAALAVHLGESRSALPEVDVGPPAPGAGLPVPALFDSLLTCRTRDSLFFCLKFCTAAISYSLCKFSSQSRDTLCSCLSPGLIKKFQFLMFRLFSEARQPLSEEDVASLSWRPLHLPSADWQRAALSLWTHRTFREVLKEEDVHLTYQDWLHLELEIQPEADALSDTERQDFHQWAIHEHFLPESSASGGCDGDLQAACTILVNALMDFHQEEMVADLELQQDLIVPLGHTPSQEHFLFEIFRRRLQALTSGWSVAASLQRQRELLMYKRILLRLPSSVLCGSSFQAEQPITARCEQFFHLVNSEMRNFCSHGGALTQDITAHFFRGLLNACLRSRDPSLMVDFILAKCQTKCPLILTSALVWWPSLEPVLLCRWRRHCQSPLPRELQKLQEGRQFASDFLSPEAASPAPNPDWLSAAALHFAIQQVREENIRKQLKKLDCEREELLVFLFFFSLMGLLSSHLTSNSTTDLPKAFHVCAAILECLEKRKISWLALFQLTESDLRLGRLLLRVAPDQHTRLLPFAFYSLLSYFHEDAAIREEAFLHVAVDMYLKLVQLFVAGDTSTVSPPAGRSLELKGQGNPVELITKARLFLLQLIPRCPKKSFSHVAELLADRGDCDPEVSAALQSRQQAAPDADLSQEPHLF

SEQ ID NO: 861329 - protein, 1410 aa, Homo sapiens
AQGAAAGAVGAKAMSDSWVPNSASGQDPGGRRRAWAELLAGRVKREKYNPERAQKLKESAVRLLRSHQDLNALLLEVEGPLCKKLSLSKVIDCDSSEAYANHSSSFIGSALQDQASRLGVPVGILSAGMVASSVGQICTAPAETSHPVLLTVEQRKKLSSLLEFAQYLLAHSMFSRLSFCQELWKIQSSLLLEAVWHLHVQGIVSLQELLESHPDMHAVGSWLFRNLCCLCEQMEASCQHADVARAMLSDFVQMFVLRGFQKNSDLRRTVEPEKMPQVAVDVLQRMLIFALDALAAGVQEESSTHKIVRCWFGVFSGHTLGSVISTDPLKRFFSHTLTQILTHSPVLKASDAVQMQREWSFARTHPLLTSLYRRLFVMLSAEELVGHLQEVLETQEVHWQRVLSFVSALVVCFPEAQQLLEDWVARLMAQAFESCQLDSMVTAFLVVRQAALEGPSAFLSYADWFKASFGSTRGYHGCSKKALVFLFTFLSELVPFESPRYLQVHILHPPLVPSKYRSLLTDYISLAKTRLADLKVSIENMGLYEDLSSAGDITEPHSQALQDVEKAIMVFEHTGNIPVTVMEASIFRRPYYVSHFLPALLTPRVLPKVPDSRVAFIESLKRADKIPPSLYSTYCQACSAAEEKPEDAALGVRAEPNSAEEPLGQLTAALGELRASMTDPSQRDVISAQVAVISERLRAVLGHNEDDSSVEISKIQLSINTPRLEPREHMAVDLLLTSFCQNLMAASSVAPPERQGPWAALFVRTMCGRVLPAVLTRLCQLLRHQGPSLSAPHVLGLAALAVHLGESRSALPEVDVGPPAPGAGLPVPALFDSLLTCRTRDSLFFCLKFCTAAISYSLCKFSSQSRDTLCSCLSPGLIKKFQFLMFRLFSEARQPLSEEDVASLSWRPLHLPSADWQRAALSLWTHRTFREVLKEEDVHLTYQDWLHLELEIQPEADALSDTERQDFHQWAIHEHFLPESSASGGCDGDLQAACTILVNALMDFHQSSRSYDHSENSDLVLVAAQEMRILFPDCRILLRLPSSVLCGSSFQAEQPITARCEQFFHLVNSEMRNFCSHGGALTQDITAHFFRGLLNACLRSRDPSLMVDFILAKCQTKCPLILTSALVWWPSLEPVLLCRWRRHCQSPLPRELQKLQEGRQFASDFLSPEAASPAPNPDWLSAAALHFAIQQVREENIRKQLKKLDCEREELLVFLFFFSLMGLLSSHLTSNSTTDLPKAFHVCAAILECLEKRKISWLALFQLTESDLRLGRLLLRVAPDQHTRLLPFAFYSLLSYFHEDAAIREEAFLHVAVDMYLKLVQLFVAGDTSTVSPPAGRSLELKGQGNPVELITKARLFLLQLIPRCPKKSFSHVAELLADRGDCDPEVSAALQSRQQAAPDADLSQEPHLF

SEQ ID NO: 861330 - protein, 1504 aa, Homo sapiens
AQGAAAGAVGAKAMSDSWVPNSASGQDPGGRRRAWAELLAGRVKREKYNPERAQKLKESAVRLLRSHQDLNALLLEVEGPLCKKLSLSKVIDCDSSEAYANHSSSFIGSALQDQASRLGVPVGILSAGMVASSVGQICTAPAETSHPVLLTVEQRKKLSSLLEFAQYLLAHSMFSRLSFCQELWKIQSSLLLEAVWHLHVQGIVSLQELLESHPDMHAVGSWLFRNLCCLCEQMEASCQHADVARAMLSDFVQMFVLRGFQKNSDLRRTVEPEKMPQVAVDVLQRMLIFALDALAAGVQEESSTHKIVRCWFGVFSGHTLGSVISTDPLKRFFSHTLTQILTHSPVLKASDAVQMQREWSFARTHPLLTSLYRRLFVMLSAEELVGHLQEVLETQEVHWQRVLSFVSALVVCFPEAQQLLEDWVARLMAQAFESCQLDSMVTAFLVVRQAALEGPSAFLSYADWFKASFGSTRGYHGCSKKALVFLFTFLSELVPFESPRYLQVHILHPPLVPSKYRSLLTDYISLAKTRLADLKVSIENMGLYEDLSSAGDITEPHSQALQDVEKAIMVFEHTGNIPVTVMEASIFRRPYYVSHFLPALLTPRVLPKVPDSRVAFIESLKRADKIPPSLYSTYCQACSAAEEKPEDAALGVRAEPNSAEEPLGQLTAALGELRASMTDPSQRDVISAQVAVISERLRAVLGHNEDDSSVEISKIQLSINTPRLEPREHMAVDLLLTSFCQNLMAASSVAPPERQGPWAALFVRTMCGRVLPAVLTRLCQLLRHQGPSLSAPHVLGLAALAVHLGESRSALPEVDVGPPAPGAGLPVPALFDSLLTCRTRDSLFFCLKFCTAAISYSLCKFSSQSRDTLCSCLSPGLIKKFQFLMFRLFSEARQPLSEEDVASLSWRPLHLPSADWQRAALSLWTHRTFREVLKEEDVHVGDRSFSCIMPRPESRVCVCSSGKNSSTGHGDVHLQSQPSERLRGRILEFRRQSLQRATIAPLHTLQPGQQNLFPKIMKLTYQDWLHLELEIQPEADALSDTERSRSYDHSENSDLVFGGRTGNEDIISRLQEMVADLELQQDLIVPLGHTPSQEHFLFEIFRRRLQALTSGWSVAASLQRQRELLMYKRILLRLPSSVLCGSSFQAEQPITARCEQFFHLVNSEMRNFCSHGGALTQDITAHFFRGLLNACLRSRDPSLMVDFILAKCQTKCPLILTSALVWWPSLEPVLLCRWRRHCQSPLPRELQKLQEGRQFASDFLSPEAASPAPNPDWLSAAALHFAIQQVREENIRKQLKKLDCEREELLVFLFFFSLMGLLSSHLTSNSTTDLPKAFHVCAAILECLEKRKISWLALFQLTESDLRLGRLLLRVAPDQHTRLLPFAFYSLLSYFHEDAAIREEAFLHVAVDMYLKLVQLFVAGDTSTVSPPAGRSLELKGQGNPVELITKARLFLLQLIPRCPKKSFSHVAELLADRGDCDPEVSAALQSRQQAAPDADLSQEPHLF

SEQ ID NO: 861331 - protein, 1159 aa, Homo sapiens
AQGAAAGAVGAKAMSDSWVPNSASGQDPGGRRRAWAELLAGRVKREKYNPERAQKLKESAVRLLRSHQDLNALLLEVEGPLCKKLSLSKVIDCDSSEAYANHSSSFIGSALQDQASRLGVPVGILSAGMVASSVGQICTAPAETSHPVLLTVEQRKKLSSLLEFAQYLLAHSMFSRLSFCQELWKIQSSLLLEAVWHLHVQGIVSLQELLESHPDMHAVGSWLFRNLCCLCEQMEASCQHADVARAMLSDFVQMFVLRGFQKNSDLRRTVEPEKMPQVAVDVLQRMLIFALDALAAGVQEESSTHKIVRCWFGVFSGHTLGSVISTDPLKRFFSHTLTQILTHSPVLKASDAVQMQREWSFARTHPLLTSLYRRLFVMLSAEELVGHLQEVLETQEVHWQRVLSFVSALVVCFPEAQQLLEAVDLLLTSFCQNLMAASSVAPPERQGPWAALFVRTMCGRVLPAVLTRLCQLLRHQGPSLSAPHVLGLAALAVHLGESRSALPEVDVGPPAPGAGLPVPALFDSLLTCRTRDSLFFCLKFCTAAISYSLCKFSSQSRDTLCSCLSPGLIKKFQFLMFRLFSEARQPLSEEDVASLSWRPLHLPSADWQRAALSLWTHRTFREVLKEEDVHLTYQDWLHLELEIQPEADALSDTERQDFHQWAIHEHFLPESSASGGCDGDLQAACTILVNALMDFHQSSRSYDHSENSDLVFGGRTGNEDIISRLQEMVADLELQQDLIVPLGHTPSQEHFLFEIFRRRLQALTSGWSVAASLQRQRELLMYKRILLRLPSSVLCGSSFQAEQPITARCEQFFHLVNSEMRNFCSHGGALTQDITAHFFRGLLNACLRSRDPSLMVDFILAKCQTKCPLILTSALVWWPSLEPVLLCRWRRHCQSPLPRELQKLQEGRQFASDFLSPEAASPAPNPDWLSAAALHFAIQQVREENIRKQLKKLDCEREELLVFLFFFSLMGLLSSHLTSNSTTDLPKAFHVCAAILECLEKRKISWLALFQLTESDLRLGRLLLRVAPDQHTRLLPFAFYSLLSYFHEDAAIREEAFLHVAVDMYLKLVQLFVAGDTSTVSPPAGRSLELKGQGNPVELITKARLFLLQLIPRCPKKSFSHVAELLADRGDCDPEVSAALQSRQQAAPDADLSQEPHLF

SEQ ID NO: 861332 - protein, 1161 aa, Homo sapiens
FYTLSSPHTGRDPPTLWGWSLTKTHNFLISDLKFLSVSPPAASDAVQMQREWSFARTHPLLTSLYRRLFVMLSAEELVGHLQEVLETQEVHWQRVLSFVSALVVCFPEAQQLLEDWVARLMAQAFESCQLDSMVTAFLVVRQAALEGPSAFLSYADWFKASFGSTRGYHGCSKKALVFLFTFLSELVPFESPRYLQVHILHPPLVPSKYRSLLTDYISLAKTRLADLKVSIENMGLYEDLSSAGDITEPHSQALQDVEKAIMVFEHTGNIPVTVMEASIFRRPYYVSHFLPALLTPRVLPKVPDSRVAFIESLKRADKIPPSLYSTYCQACSAAEEKPEDAALGVRAEPNSAEEPLGQLTAALGELRASMTDPSQRDVISAQVAVISERLRAVLGHNEDDSSVEISKIQLSINTPRLEPREHMAVDLLLTSFCQNLMAASSVAPPERQGPWAALFVRTMCGRVLPAVLTRLCQLLRHQGPSLSAPHVLGLAALAVHLGESRSALPEVDVGPPAPGAGLPVPALFDSLLTCRTRDSLFFCLKFCTAAISYSLCKFSSQSRDTLCSCLSPGLIKKFQFLMFRLFSEARQPLSEEDVASLSWRPLHLPSADWQRAALSLWTHRTFREVLKEEDVHLTYQDWLHLELEIQPEADALSDTERQDFHQWAIHEHFLPESSASGGCDGDLQAACTILVNALMDFHQSSRSYDHSENSDLVFGGRTGNEDIISRLQEMVADLELQQDLIVPLGHTPSQEHFLFEIFRRRLQALTSGWSVAASLQRQRELLMYKRILLRLPSSVLCGSSFQAEQPITARCEQFFHLVNSEMRNFCSHGGALTQDITAHFFRGLLNACLRSRDPSLMVDFILAKCQTKCPLILTSALVWWPSLEPVLLCRWRRHCQSPLPRELQKLQEGRQFASDFLSPEAASPAPNPDWLSAAALHFAIQQVREENIRKQLKKLDCEREELLVFLFFFSLMGLLSSHLTSNSTTDLPKAFHVCAAILECLEKRKISWLALFQLTESDLRLGRLLLRVAPDQHTRLLPFAFYSLLSYFHEDAAIREEAFLHVAVDMYLKLVQLFVAGDTSTVSPPAGRSLELKGQGNPVELITKARLFLLQLIPRCPKKSFSHVAELLADRGDCDPEVSAALQSRQQAAPDADLSQEPHLF

SEQ ID NO: 861333 - protein, 1345 aa, Homo sapiens
MSDSWVPNSASGQDPGGRRRAWAELLAGRVKREKYNPERAQKLKESAVRLLRSHQDLNALLLEVEGPLCKKLSLSKVIDCDSSEAYANHSSSFIGSALQDQASRLGVPVGILSAGMVASSVGQICTAPAETSHPVLLTVEQRKKLSSLLEFAQYLLAHSMFSRLSFCQELWKIQSSLLLEAVWHLHVQGIVSLQELLESHPDMHAVGSWLFRNLCCLCEQMEASCQHADVARAMLSDFVQMFVLRGFQKNSDLRRTVEPEKMPQVAVDVLQRMLIFALDALAAGVQEESSTHKIVRCWFGVFSGHTLGSVISTDPLKRFFSHTLTQILTHSPVLKASDAVQMQREWSFARTHPLLTSLYRRLFVMLSAEELVGHLQEVLETQEVHWQRVLSFVSALVVCFPEAQQLLEDWVARLMAQAFESCQLDSMVTAFLVVRQAALEGPSAFLSYADWFKASFGSTRGYHGCSKKALVFLFTFLSELVPFESPRYLQVHILHPPLVPSKYRSLLTDYISLAKTRLADLKVSIENMGLYEDLSSAGDITEPHSQALQDVEKAIMVFEHTGNIPVTVMEASIFRRPYYVSHFLPALLTPRVLPKVPDSRVAFIESLKRADKIPPSLYSTYCQACSAAEEKPEDAALGVRAEPNSAEEPLGQLTAALGELRASMTDPSQRDVISAQVAVISERLRAVLGHNEDDSSVEISKIQLSINTPRLEPREHMAVDLLLTSFCQNLMAASSVAPPERQGPWAALFVRTMCGRVLPAVLTRLCQLLRHQGPSLSAPHVLGLAALAVHLGESRSALPEVDVGPPAPGAGLPVPALFDSLLTCRTRDSLFFCLKFCTAAISYSLCKFSSQSRDTLCSCLSPGLIKKFQFLMFRLFSEARQPLSEEDVASLSWRPLHLPSADWQRAALSLWTHRTFREVLKEEDVHLTYQDWLHLELEIQPEADALSDTERQDFHQWAIHEHFLPESSASGGCDGDLQAACTILVNALMDFHQSSRSYDHSENSDLVFGGRTGNEDIISRLQEMVADLELQQDLIVPLGHTPSQEHFLFEIFRRRLQALTSGWSVAASLQRQRELLMYKRILLRLPSSVLCGSSFQAEQPITARCEQFFHLVNSEMRNFCSHGGALTQDITAHFFRGLLNACLRSRDPSLMVDFILAKCQTKCPLILTSALVWWPSLEPVLLCRWRRHCQSPLPRELQKLQEGRQFASDFLSPEAASPAPNPDWLSAAALHFAIQQVREENIRKQLKKLDCEREELLVFLFFFSLMGLLSSHLTSNSTTDLPKAFHVCAAILECLEKRKISWLALFQLTESGKKHAAEAQMRRAALFRGILQMVKNEPSLRFLAK

SEQ ID NO: 861334 - protein, 1345 aa, Homo sapiens; identical to SEQ ID NO: 861333

SEQ ID NO: 861335 - protein, 1428 aa, Homo sapiens
AQGAAAGAVGAKAMSDSWVPNSASGQDPGGRRRAWAELLAGRVKREKYNPERAQKLKESAVRLLRSHQDLNALLLEVEGPLCKKLSLSKVIDCDSSEAYANHSSSFIGSALQDQASRLGVPVGILSAGMVASSVGQICTAPAETSHPVLLTVEQRKKLSSLLEFAQYLLAHSMFSRLSFCQELWKIQSSLLLEAVWHLHVQGIVSLQELLESHPDMHAVGSWLFRNLCCLCEQMEASCQHADVARAMLSDFVQMFVLRGFQKNSDLRRTVEPEKMPQVAVDVLQRMLIFALDALAAGVQEESSTHKIVRCWFGVFSGHTLGSVISTDPLKRFFSHTLTQILTHSPVLKASDAVQMQREWSFARTHPLLTSLYRRLFVMLSAEELVGHLQEVLETQEVHWQRVLSFVSALVVCFPEAQQLLEDWVARLMAQAFESCQLDSMVTAFLVVRQAALEGPSAFLSYADWFKASFGSTRGYHGCSKKALVFLFTFLSELVPFESPRYLQVHILHPPLVPSKYRSLLTDYISLAKTRLADLKVSIENMGLYEDLSSAGDITEPHSQALQDVEKAIMVFEHTGNIPVTVMEASIFRRPYYVSHFLPALLTPRVLPKVPDSRVAFIESLKRADKIPPSLYSTYCQACSAAEEKPEDAALGVRAEPNSAEEPLGQLTAALGELRASMTDPSQRDVISAQVAVISERLRAVLGHNEDDSSVEISKIQLSINTPRLEPREHMAVDLLLTSFCQNLMAASSVAPPERQGPWAALFVRTMCGRVLPAVLTRLCQLLRHQGPSLSAPHVLGLAALAVHLGESRSALPEVDVGPPAPGAGLPVPALFDSLLTCRTRDSLFFCLKFCTAAISYSLCKFSSQSRDTLCSCLSPGLIKKFQFLMFRLFSEARQPLSEEDVASLSWRPLHLPSADWQRAALSLWTHRTFREVLKEEDVHLTYQDWLHLELEIQPEADALSDTERQDFHQWAIHEHFLPESSASGGCDGDLQAACTILVNALMDFHQSSRSYDHSENSDLVFGGRTGNEDIISRLQEMVADLELQQDLIVPLGHTPSQEHFLFEIFRRRLQALTSGWSVAASLQRQRELLMYKRILLRLPSSVLCGSSFQAEQPITARCEQFFHLVNSEMRNFCSHGGALTQDITAHFFRGLLNACLRSRDPSLMVDFILAKCQTKCPLILTSALVWWPSLEPVLLCRWRRHCQSPLPRELQKLQEGRQFASDFLSPEAASPAPNPDWLSAAALHFAIQQVREENIRKQLKKLDCEREELLVFLFFFSLMGLLSSHLTSNSTTDLPKAFHVCAAILECLEKRKISWLALFQLTESDLRLGRLLLRVAPDQHTRLLPFAFYRRGHQGRGLPACCCGHVLEAGPALRGWGYKHSFTSSWQEPGAQGSGQPRGTDNKSSSFSAAVNTSVPEKELLTRGRAAG

SEQ ID NO: 861336 - protein, 316 aa, Homo sapiens
WPVGALGACHGWGSGGVSISATLICVLVLSPEVWWPSLEPVLLCRWRRHCQSPLPRELQKLQEGRQFASDFLSPEAASPAPNPDWLSAAALHFAIQQVREENIRKQLKKLDCEREELLVFLFFFSLMGLLSSHLTSNSTTDLPKAFHVCAAILECLEKRKISWLALFQLTESDLRLGRLLLRVAPDQHTRLLPFAFYSLLSYFHEDAAIREEAFLHVAVDMYLKLVQLFVAGDTSTVSPPAGRSLELKGQGNPVELITKARLFLLQLIPRCPKKSFSHVAELLADRGDCDPEVSAALQSRQQAAPDADLSQEPHLF

SEQ ID NO: 861337 - protein, 1345 aa, Homo sapiens; identical to SEQ ID NO: 861333

SEQ ID NO: 861338 - protein, 1345 aa, Homo sapiens; identical to SEQ ID NO: 861333

SEQ ID NO: 861339 - protein, 1205 aa, Homo sapiens
  misc_feature (1198)..(1198): Xaa can be any naturally occurring amino acid
AQGAAAGAVGAKAMSDSWVPNSASGQDPGGRRRAWAELLAGRVKREKYNPERAQKLKESAVRLLRSHQDLNALLLEVEGPLCKKLSLSKVIDCDSSEAYANHSSSFIGSALQDQASRLGVPVGILSAGMVASSVGQICTAPAETSHPVLLTVEQRKKLSSLLEFAQYLLAHSMFSRLSFCQELWKIQSSLLLEAVWHLHVQGIVSLQELLESHPDMHAVGSWLFRNLCCLCEQMEASCQHADVARAMLSDFVQMFVLRGFQKNSDLRRTVEPEKMPQVAVDVLQRMLIFALDALAAGVQEESSTHKIVRCWFGVFSGHTLGSVISTDPLKRFFSHTLTQILTHSPVLKASDAVQMQREWSFARTHPLLTSLYRRLFVMLSAEELVGHLQEVLETQEVHWQRVLSFVSALVVCFPEAQQLLEDWVARLMAQAFESCQLDSMVTAFLVVRQAALEGPSAFLSYADWFKASFGSTRGYHGCSKKALVFLFTFLSELVPFESPRYLQVHILHPPLVPSKYRSLLTDYISLAKTRLADLKVSIENMGLYEDLSSAGDITEPHSQALQDVEKAIMVFEHTGNIPVTVMEASIFRRPYYVSHFLPALLTPRVLPKVPDSRVAFIESLKRADKIPPSLYSTYCQACSAAEEKPEDAALGVRAEPNSAEEPLGQLTAALGELRASMTDPSQRDVISAQVAVISERLRAVLGHNEDDSSVEISKIQLSINTPRLEPREHMAVDLLLTSFCQNLMAASSVAPPERQGPWAALFVRTMCGRVLPAVLTRLCQLLRHQGPSLSAPHVLGLAALAVHLGESRSALPEVDVGPPAPGAGLPVPALFDSLLTCRTRDSLFFCLKFCTAAISYSLCKFSSQSRDTLCSCLSPGLIKKFQFLMFRLFSEARQPLSEEDVASLSWRPLHLPSADWQRAALSLWTHRTFREVLKEEDVHLTYQDWLHLELEIQPEADALSDTERQDFHQWAIHEHFLPESSASGGCDGDLQAACTILVNALMDFHQSSRSYDHSENSDLVFGGRTGNEDIISRLQEMVADLELQQDLIVPLGHTPSQEHFLFEIFRRRLQALTSGWSVAASLQRQRELLMYKRILLRLPSSVLCGSSFQAEQPITARCEQFFHLVNSEMRNFCSHGGALTQDITAHFFRGLLNACLRSRDPSLMVDFILAKCQTKCPLILTSALVFGWAPNPGNPVAXLLPGWKE

SEQ ID NO: 861340 - protein, 310 aa, Homo sapiens
AQGAAAGAVGAKAMSDSWVPNSASGQDPGGRRRAWAELLAGRVKREKYNPERAQKLKESAVRLLRSHQDLNALLLEVEGPLCKKLSLSKVIDCDSSEAYANHSSSFIGSALQDQASRLGVPVGILSAGMVASSVGQICTAPAETSHPVLLTVEQRKKLSSLLEFAQYLLAHSMFSRLSFCQELWKIQSSLLLEAVWHLHVQGIVSLQELLESHPDMHAVGSWLFRNLCCLCEQMEASCQHADVARAMLSDFVQMFVLRGFQKNSDLRRTVEPEKMPQVAVDVLQRMLIFALDALAAGVQEESSTHKIVRC

SEQ ID NO: 861341 - protein, 310 aa, Homo sapiens; identical to SEQ ID NO: 861340

SEQ ID NO: 861342 - protein, 66 aa, Homo sapiens
KRLGIVSGGLPPCADICFLFLALSSVALDALAAGVQEESSTHKIVRCWYVPEGGLPECAAGRCLPN

SEQ ID NO: 861343 - protein, 247 aa, Homo sapiens
MSDSWVPNSASGQDPGGRRRAWAELLGRWARQAAGVGGVRPGTVSPVPRSLPARASAGRIPGRRARGAVRGGRPAGAARLPRTRPLLRLGGRPPDRRPRGAPFFPERRPRRPPCQAGLGCAAWGSPQRRGRPSPAVPGLPCLGPSWAVFPGVRGGAVSVSFPRPAPWGGAPAPLREGVAGGFLRGVHLRVGPGTPCVNCAVMVSNRLLSVAGRVKREKYNPERAQKLKESAVRLLRSHQDLNALLLE

SEQ ID NO: 861344 - protein, 310 aa, Homo sapiens; identical to SEQ ID NO: 861340

SEQ ID NO: 861345 - protein, 1520 aa, Homo sapiens
AQGAAAGAVGAKAMSDSWVPNSASGQDPGGRRRAWAELLAGRVKREKYNPERAQKLKESAVRLLRSHQDLNALLLEVEGPLCKKLSLSKVIDCDSSEAYANHSSSFIGSALQDQASRLGVPVGILSAGMVASSVGQICTAPAETSHPVLLTVEQRKKLSSLLEFAQYLLAHSMFSRLSFCQELWKIQSSLLLEAVWHLHVQGIVSLQELLESHPDMHAVGSWLFRNLCCLCEQMEASCQHADVARAMLSDFVQMFVLRGFQKNSDLRRTVEPEKMPQVAVDVLQRMLIFALDALAAGVQEESSTHKIVRCWFGVFSGHTLGSVISTDPLKRFFSHTLTQILTHSPVLKASDAVQMQREWSFARTHPLLTSLYRRLFVMLSAEELVGHLQEVLETQEVHWQRVLSFVSALVVCFPEAQQLLEDWVARLMAQAFESCQLDSMVTAFLVVRQAALEGPSAFLSYADWFKASFGSTRGYHGCSKKALVFLFTFLSELVPFESPRYLQVHILHPPLVPSKYRSLLTDYISLAKTRLADLKVSIENMGLYEDLSSAGDITEPHSQALQDVEKAIMVFEHTGNIPVTVMEASIFRRPYYVSHFLPALLTPRVLPKVPDSRVAFIESLKRADKIPPSLYSTYCQACSAAEEKPEDAALGVRAEPNSAEEPLGQLTAALGELRASMTDPSQRDVISAQVAVISERLRAVLGHNEDDSSVEISKIQLSINTPRLEPREHMAVDLLLTSFCQNLMAASSVAPPERQGPWAALFVRTMCGRVLPAVLTRLCQLLRHQGPSLSAPHVLGLAALAVHLGESRSALPEVDVGPPAPGAGLPVPALFDSLLTCRTRDSLFFCLKFCTAAISYSLCKFSSQSRDTLCSCLSPGLIKKFQFLMFRLFSEARQPLSEEDVASLSWRPLHLPSADWQRAALSLWTHRTFREVLKEEDVHVVMVMLHLQSQPSERLRGRILEFRRQSLQRATIAPLHTLQPGQQNLFPKIMKLTYQDWLHLELEIQPEADALSDTERQDFHQWAIHEHFLPESSASGGCDGDLQAACTILVNALMDFHQSSRSYDHSENSDLVFGGRTGNEDIISRLQEMVADLELQQDLIVPLGHTPSQEHFLFEIFRRRLQALTSGWSVAASLQRQRELLMYKRILLRLPSSVLCGSSFQAEQPITARCEQFFHLVNSEMRNFCSHGGALTQDITAHFFRGLLNACLRSRDPSLMVDFILAKCQTKCPLILTSALVWWPSLEPVLLCRWRRHCQSPLPRELQKLQEGRQFASDFLSPEAASPAPNPDWLSAAALHFAIQQVREENIRKQLKKLDCEREELLVFLFFFSLMGLLSSHLTSNSTTDLPKAFHVCAAILECLEKRKISWLALFQLTESDLRLGRLLLRVAPDQHTRLLPFAFYSLLSYFHEDAAIREEAFLHVAVDMYLKLVQLFVAGDTSTVSPPAGRSLELKGQGNPVELITKARLFLLQLIPRCPKKSFSHVAELLADRGDCDPEVSAALQSRQQAAPDADLSQEPHLF

SEQ ID NO: 861346 - protein, 1425 aa, Homo sapiens
AQGAAAGAVGAKAMSDSWVPNSASGQDPGGRRRAWAELLAGRVKREKYNPERAQKLKESAVRLLRSHQDLNALLLEVEGPLCKKLSLSKVIDCDSSEAYANHSSSFIGSALQDQASRLGVPVGILSAGMVASSVGQICTAPAETSHPVLLTVEQRKKLSSLLEFAQYLLAHSMFSRLSFCQELWKIQSSLLLEAVWHLHVQGIVSLQELLESHPDMHAVGSWLFRNLCCLCEQMEASCQHADVARAMLSDFVQMFVLRGFQKNSDLRRTVEPEKMPQVAVDVLQRMLIFALDALAAGVQEESSTHKIVRCWFGVFSGHTLGSVISTDPLKRFFSHTLTQILTHSPVLKASDAVQMQREWSFARTHPLLTSLYRRLFVMLSAEELVGHLQEVLETQEVHWQRVLSFVSALVVCFPEAQQLLEDWVARLMAQAFESCQLDSMVTAFLVVRQAALEGPSAFLSYADWFKASFGSTRGYHGCSKKALVFLFTFLSELVPFESPRYLQVHILHPPLVPSKYRSLLTDYISLAKTRLADLKVSIENMGLYEDLSSAGDITEPHSQALQDVEKAIMVFEHTGNIPVTVMEASIFRRPYYVSHFLPALLTPRVLPKVPDSRVAFIESLKRADKIPPSLYSTYCQACSAAEEKPEDAALGVRAEPNSAEEPLGQLTAALGELRASMTDPSQRDVISAQVAVISERLRAVLGHNEDDSSVEISKIQLSINTPRLEPREHMAVDLLLTSFCQNLMAASSVAPPERQGPWAALFVRTMCGRVLPAVLTRLCQLLRHQGPSLSAPHVLGLAALAVHLGESRSALPEVDVGPPAPGAGLPVPALFDSLLTCRTRDSLFFCLKFCTAAISYSLCKFSSQSRDTLCSCLSPGLIKKFQFLMFRLFSEARQPLSEEDVASLSWRPLHLPSADWQRAALSLWTHRTFREVLKEEDVHLTYQDWLHLELEIQPEADALSDTERSRSYDHSENSDLVFGGRTGNEDIISRLQEMVADLELQQDLIVPLGHTPSQEHFLFEIFRRRLQALTSGWSVAASLQRQRELLMYKRILLRLPSSVLCGSSFQAEQPITARCEQFFHLVNSEMRNFCSHGGALTQDITAHFFRGLLNACLRSRDPSLMVDFILAKCQTKCPLILTSALVWWPSLEPVLLCRWRRHCQSPLPRELQKLQEGRQFASDFLSPEAASPAPNPDWLSAAALHFAIQQVREENIRKQLKKLDCEREELLVFLFFFSLMGLLSSHLTSNSTTDLPKAFHVCAAILECLEKRKISWLALFQLTESDLRLGRLLLRVAPDQHTRLLPFAFYSLLSYFHEDAAIREEAFLHVAVDMYLKLVQLFVAGDTSTVSPPAGRSLELKGQGNPVELITKARLFLLQLIPRCPKKSFSHVAELLADRGDCDPEVSAALQSRQQAAPDADLSQEPHLF

SEQ ID NO: 861347 - protein, 1446 aa, Homo sapiens
NLRLGTRLGVEGWAELLAGRVKREKYNPERAQKLKESAVRLLRSHQDLNALLLEVEGPLCKKLSLSKVIDCDSSEAYANHSSSFIGSALQDQASRLGVPVGILSAGMVASSVGQICTAPAETSHPVLLTVEQRKKLSSLLEFAQYLLAHSMFSRLSFCQELWKIQSSLLLEAVWHLHVQGIVSLQELLESHPDMHAVGSWLFRNLCCLCEQMEASCQHADVARAMLSDFVQMFVLRGFQKNSDLRRTVEPEKMPQVAVDVLQRMLIFALDALAAGVQEESSTHKIVRCWFGVFSGHTLGSVISTDPLKRFFSHTLTQILTHSPVLKASDAVQMQREWSFARTHPLLTSLYRRLFVMLSAEELVGHLQEVLETQEVHWQRVLSFVSALVVCFPEAQQLLEDWVARLMAQAFESCQLDSMVTAFLVVRQAALEGPSAFLSYADWFKASFGSTRGYHGCSKKALVFLFTFLSELVPFESPRYLQVHILHPPLVPSKYRSLLTDYISLAKTRLADLKVSIENMGLYEDLSSAGDITEPHSQALQDVEKAIMVFEHTGNIPVTVMEASIFRRPYYVSHFLPALLTPRVLPKVPDSRVAFIESLKRADKIPPSLYSTYCQACSAAEEKPEDAALGVRAEPNSAEEPLGQLTAALGELRASMTDPSQRDVISAQVAVISERLRAVLGHNEDDSSVEISKIQLSINTPRLEPREHMAVDLLLTSFCQNLMAASSVAPPERQGPWAALFVRTMCGRVLPAVLTRLCQLLRHQGPSLSAPHVLGLAALAVHLGESRSALPEVDVGPPAPGAGLPVPALFDSLLTCRTRDSLFFCLKFCTAAISYSLCKFSSQSRDTLCSCLSPGLIKKFQFLMFRLFSEARQPLSEEDVASLSWRPLHLPSADWQRAALSLWTHRTFREVLKEEDVHLTYQDWLHLELEIQPEADALSDTERQDFHQWAIHEHFLPESSASGGCDGDLQAACTILVNALMDFHQSSRSYDHSENSDLVFGGRTGNEDIISRLQEMVADLELQQDLIVPLGHTPSQEHFLFEIFRRRLQALTSGWSVAASLQRQRELLMYKRILLRLPSSVLCGSSFQAEQPITARCEQFFHLVNSEMRNFCSHGGALTQDITAHFFRGLLNACLRSRDPSLMVDFILAKCQTKCPLILTSALVWWPSLEPVLLCRWRRHCQSPLPRELQKLQEGRQFASDFLSPEAASPAPNPDWLSAAALHFAIQQVREENIRKQLKKLDCEREELLVFLFFFSLMGLLSSHLTSNSTTDLPKAFHVCAAILECLEKRKISWLALFQLTESDLRLGRLLLRVAPDQHTRLLPFAFYSLLSYFHEDAAIREEAFLHVAVDMYLKLVQLFVAGDTSTVSPPAGRSLELKGQGNPVELITKARLFLLQLIPRCPKKSFSHVAELLADRGDCDPEVSAALQSRQQAAPDADLSQEPHLF

SEQ ID NO: 861348 - protein, 1447 aa, Homo sapiens
AQGAAAGAVGAKAMSDSWVPNSASGQDPGGRRRAWAELLAGRVKREKYNPERAQKLKESAVRLLRSHQDLNALLLEVEGPLCKKLSLSKVIDCDSSEAYANHSSSFIGSALQDQASRLGVPVGILSAGMVASSVGQICTAPAETSHPVLLTVEQRKKLSSLLEFAQYLLAHSMFSRLSFCQELWKIQSSLLLEAVWHLHVQGIVSLQELLESHPDMHAVGSWLFRNLCCLCEQMEASCQHADVARAMLSDFVQMFVLRGFQKNSDLRRTVEPEKMPQVAVDVLQRMLIFALDALAAGVQEESSTHKIVRCWFGVFSGHTLGSVISTDPLKRFFSHTLTQILTHSPVLKASDAVQMQREWSFARTHPLLTSLYRRLFVMLSAEELVGHLQEVLETQEVHWQRVLSFVSALVVCFPEAQQLLEDWVARLMAQAFESCQLDSMVTAFLVVRQAALEGPSAFLSYADWFKASFGSTRGYHGCSKKALVFLFTFLSELVPFESPRYLQVHILHPPLVPSKYRSLLTDYISLAKTRLADLKVSIENMGLYEDLSSAGDITEPHSQALQDVEKAIMVFEHTGNIPVTVMEASIFRRPYYVSHFLPALLTPRVLPKVPDSRVAFIESLKRADKIPPSLYSTYCQACSAAEEKPEDAALGVRAEPNSAEEPLGQLTAALGELRASMTDPSQRDVISAQVAVISERLRAVLGHNEDDSSVEISKIQLSINTPRLEPREHMAVDLLLTSFCQNLMAASSVAPPERQGPWAALFVRTMCGRVLPAVLTRLCQLLRHQGPSLSAPHVLGLAALAVHLGESRSALPEVDVGPPAPGAGLPVPALFDSLLTCRTRDSLFFCLKFCTAAISYSLCKFSSQSRDTLCSCLSPGLIKKFQFLMFRLFSEARQPLSEEDVASLSWRPLHLPSADWQRAALSLWTHRTFREVLKEEDVHLTYQDWLHLELEIQPEADALSDTERQDFHQWAIHEHFLPESSASGGCDGDLQAACTILVNALMDFHQSSRSYDHSENSDLVFGGRTGNEDIISRLQEMVADLELQQDLIVPLGHTPSQEHFLFEIFRRRLQALTSGWSVAASLQRQRELLMYKRILLRLPSSVLCGSSFQAEQPITARCEQFFHLVNSEMRNFCSHGGALTQDITAHFFRGLLNACLRSRDPSLMVDFILAKCQTKCPLILTSALVWWPSLEPVLLCRWRRHCQSPLPRELQKLQEGRQFASDFLSPEAASPAPNPDWLSAAALHFAIQQVREENIRKQLKKLDCEREESTTDLPKAFHVCAAILECLEKRKISWLALFQLTESDLRLGRLLLRVAPDQHTRLLPFAFYSLLSYFHEDAAIREEAFLHVAVDMYLKLVQLFVAGDTSTVSPPAGRSLELKGQGNPVELITKARLFLLQLIPRCPKKSFSHVAELLADRGDCDPEVSAALQSRQQAAPDADLSQEPHLF

SEQ ID NO: 861349 - protein, 1345 aa, Homo sapiens; identical to SEQ ID NO: 861333

SEQ ID NO: 861350 - protein, 1345 aa, Homo sapiens; identical to SEQ ID NO: 861333

SEQ ID NO: 861351 - protein, 1446 aa, Homo sapiens
AQGAAAGAVGAKAMSDSWVPNSASGQDPGGRRRAWAELLAGRVKREKYNPERAQKLKESAVRLLRSHQDLNALLLEVEGPLCKKLSLSKVIDCDSSEAYANHSSSFIGSALQDQASRLGVPVGILSAGMVASSVGQICTAPAETSHPVLLTVEQRKKLSSLLEFAQYLLAHSMFSRLSFCQELWKIQSSLLLEAVWHLHVQGIVSLQELLESHPDMHAVGSWLFRNLCCLCEQMEASCQHADVARAMLSDFVQMFVLRGFQKNSDLRRTVEPEKMPQVAVDVLQRMLIFALDALAAGVQEESSTHKIVRCWFGVFSGHTLGSVISTDPLKRFFSHTLTQILTHSPVLKASDAVQMQREWSFARTHPLLTSLYRRLFVMLSAEELVGHLQEVLETQEVHWQRVLSFVSALVVCFPEAQQLLEDWVARLMAQAFESCQLDSMVTAFLVVRQAALEGPSAFLSYADWFKASFGSTRGYHGCSKKALVFLFTFLSELVPFESPRYLQVHILHPPLVPSKYRSLLTDYISLAKTRLADLKVSIENMGLYEDLSSAGDITEPHSQALQDVEKAIMVFEHTGNIPVTVMEASIFRRPYYVSHFLPALLTPRVLPKVPDSRVAFIESLKRADKIPPSLYSTYCQACSAAEEKPEDAALGVRAEPNSAEEPLGQLTAALGELRASMTDPSQRDVISAQVAVISERLRAVLGHNEDDSSVEISKIQLSINTPRLEPREHMAVDLLLTSFCQNLMAASSVAPPERQGPWAALFVRTMCGRVLPAVLTRLCQLLRHQGPSLSAPHVLGLAALAVHLGESRSALPEVDVGPPAPGAGLPVPALFDSLLTCRTRDSLFFCLKFCTAAISYSLCKFSSQSRDTLCSCLSPGLIKKFQFLMFRLFSEARQPLSEEDVASLSWRPLHLPSADWQRAALSLWTHRTFREVLKEEDVHLTYQDWLHLELEIQPEADALSDTERQDFHQWAIHEHFLPESSASGGCDGDLQAACTILVNALMDFHQSSRSYDHSENSDLVFGGRTGNEDIISRLQEMVADLELQQDLIVPLGHTPSQEHFLFEIFRRRLQALTSGWSVAASLQRQRELLMYKRILLRLPSSVLCGSSFQAEQPITARCEQFFHLVNSEMRNFCSHGGALTQDITAHFFRGLLNACLRSRDPSLMVDFILAKCQTKCPLILTSALVWWPSLEPVLLCRWRRHCQSPLPRELQKLQEGRQFASDFLSPEAASPAPNPDWLSAAALHFAIQQVREENIRKQLKKLDCEREELLVFLFFFSLMGLLSSHLTSNSTTDLPKAFHVCAAILECLEKRKISWLALFQLTESDLRLGRLLLRVAPDQHTRLLPFAFYSLLSYFHEDAAIREEAFLHVAVDMYLKLVQLFVAGDTSTVSPPAGRSLELKGQGNPVELITKARLFLLQLIPRCPKKSFSHVAEVTSRCPPWATWGT

SEQ ID NO: 861352 - protein, 1440 aa, Homo sapiens
AQGAAAGAVGAKAMSDSWVPNSASGQDPGGRRRAWAELLAGRVKREKYNPERAQKLKESAVRLLRSHQDLNALLLEVEGPLCKKLSLSKVIDCDSSEAYANHSSSFIGSALQDQASRLGVPVGILSAGMVASSVGQICTAPAETSHPVLLTVEQRKKLSSLLEFAQYLLAHSMFSRLSFCQELWKIQSSLLLEAVWHLHVQGIVSLQELLESHPDMHAVGSWLFRNLCCLCEQMEASCQHADVARAMLSDFVQMFVLRGFQKNSDLRRTVEPEKMPQVAVDVLQRMLIFALDALAAGVQEESSTHKIVRCWFGVFSGHTLGSVISTDPLKRFFSHTLTQILTHSPVLKASDAVQMQREWSFARTHPLLTSLYRRLFVMLSAEELVGHLQEVLETQEVHWQRVLSFVSALVVCFPEAQQLLEDWVARLMAQAFESCQLDSMVTAFLVVRQAALEGPSAFLSYADWFKASFGSTRGYHGCSKKALVFLFTFLSELVPFESPRYLQVHILHPPLVPSKYRSLLTDYISLAKTRLADLKVSIENMGLYEDLSSAGDITEPHSQALQDVEKAIMVFEHTGNIPVTVMEASIFRRPYYVSHFLPALLTPRVLPKVPDSRVAFIESLKRADKIPPSLYSTYCQACSAAEEKPEDAALGVRAEPNSAEEPLGQLTAALGELRASMTDPSQRDVISAQVAVISERLRAVLGHNEDDSSVEISKIQLSINTPRLEPREHMAVDLLLTSFCQNLMAASSVAPPERQGPWAALFVRTMCGRVLPAVLTRLCQLLRHQGPSLSAPHVLGLAALAVHLGESRSALPEVDVGPPAPGAGLPVPALFDSLLTCRTRDSLFFCLKFCTAAISYSLCKFSSQSRDTLCSCLSPGLIKKFQFLMFRLFSEARQPLSEEDVASLSWRPLHLPSADWQRAALSLWTHRTFREVLKEEDVHLTYQDWLHLELEIQPEADALSDTERQDFHQWAIHEHFLPESSASGGCDGDLQAACTILVNALMDFHQSSRSYDHSENSDLVFGGRTGNEDIISRLQEMVADLELQQDLIVPLGHTPSQEHFLFEIFRRRLQALTSGWSVAASLQRQRELLMYKRILLRLPSSVLCGSSFQAEQPITARCEQFFHLVNSEMRNFCSHGGALTQDITAHFFRGLLNACLRSRDPSLMVDFILAKCQTKCPLILTSALVWWPSLEPVLLCRWRRHCQSPLPRELQKLQEGRQFASDFLSPEAASPAPNPDWLSAAALHFAIQQVREENIRKQLKKLDCEREELLVFLFFFSLMGLLSSHLTSNSTTDLPKAFHVCAAILECLEKRKISWLALFQLTESDLRLGRLLLRVAPDQHTRLLPFAFYSLLSYFHEDAAIREEAFLHVAVDMYLKLVQLFVAGDTSTVSPPAGRSLELKGQVQGPVPPPGELPPAGGSFCQRMFRHSMQTMGDTPALFL

SEQ ID NO: 861353 - protein, 266 aa, Homo sapiens
MALGTRLGVGSYKKAAVCSDFLSPEAASPAPNPDWLSAAALHFAIQQVREENIRKQLKKLDCEREELLVFLFFFSLMGLLSSHLTSNSTTDLPKAFHVCAAILECLEKRKISWLALFQLTESDLRLGRLLLRVAPDQHTRLLPFAFYSLLSYFHEDAAIREEAFLHVAVDMYLKLVQLFVAGDTSTVSPPAGRSLELKGQGNPVELITKARLFLLQLIPRCPKKSFSHVAELLADRGDCDPEVSAALQSRQQAAPDADLSQEPHLF

SEQ ID NO: 861354 - protein, 252 aa, Homo sapiens
RGSIRPVEISIVHKVITTTDYTWRSRRARGTQGDCLSLHHTHPPARGRPPHPLPAADRYLGILSSGCSPHTIPTGRPPRVHVPTPRGVPSTDNRQRCPELPEPLLGVADLRLGRLLLRVAPDQHTRLLPFAFYSLLSYFHEDAAIREEAFLHVAVDMYLKLVQLFVAGDTSTVSPPAGRSLELKGQGNPVELITKARLFLLQLIPRCPKKSFSHVAELLADRGDCDPEVSAALQSRQQAAPDADLSQEPHLF

SEQ ID NO: 861355 - protein, 1289 aa, Homo sapiens
AQGAAAGAVGAKAMSDSWVPNSASGQDPGGRRRAWAELLAGRVKREKYNPERAQKLKESAVRLLRSHQDLNALLLEVEGPLCKKLSLSKVIDCDSSEAYANHSSSFIGSALQDQASRLGVPVGILSAGMVASSVGQICTAPAETSHPVLLTVEQRKKLSSLLEFAQYLLAHSMFSRLSFCQELWKIQSSLLLEAVWHLHVQGIVSLQELLESHPDMHAVGSWLFRNLCCLCEQMEASCQHADVARAMLSDFVQMFVLRGFQKNSDLRRTVEPEKMPQVAVDVLQRMLIFALDALAAGVQEESSTHKIVRCWFGVFSGHTLGSVISTDPLKRFFSHTLTQILTHSPVLKASDAVQMQREWSFARTHPLLTSLYRRLFVMLSAEELVGHLQEVLETQEVHWQRVLSFVSALVVCFPEAQQLLEDWVARLMAQAFESCQLDSMVTAFLVVRQAALEGPSAFLSYADWFKASFGSTRGYHGCSKKALVFLFTFLSELVPFESPRYLQVHILHPPLVPSKYRSLLTDYISLAKTRLADLKVSIENMGLYEDLSSAGDITEPHSQALQDVEKAIMVFEHTGNIPVTVMEASIFRRPYYVSHFLPALLTPRVLPKVPDSRVAFIESLKRADKIPPSLYSTYCQACSAAEEKPEDAALGVRAEPNSAEEPLGQLTAALGELRASMTDPSQRDVISAQVAVISERLRAVLGHNEDDSSVEISKIQLSINTPRLEPREHMAVDLLLTSFCQNLMAASSVAPPERQGPWAALFVRTMCGRVLPAVLTRLCQLLRHQGPSLSAPHVLGLAALAVHLGESRSALPEVDVGPPAPGAGLPVPALFDSLLTCRTRDSLFFCLKFCTAAISYSLCKFSSQSRDTLCSCLSPGLIKKFQFLMFRLFSEARQPLSEEDVASLSWRPLHLPSADWQRAALSLWTHRTFREVLKEEDVHLTYQDWLHLELEIQPEADALSDTERQDFHQWAIHEHFLPESSASGGCDGDLQAACTILVNALMDFHQSSRSYDHSENSDLVFGGRTGNEDIISRLQEMVADLELQQDLIVPLGHTPSQEHFLFEIFRRRLQALTSGWSVAASLQRQRELLMYKRILLRLPSSVLCGSSFQAEQPITARCEQFFHLVNSEMRNFCSHGGALTQDITAHFFRGLLNACLRSRDPSLMVDFILAKCQTKCPLILTSALVWWPSLEPVLLCRWRRHCQSPLPRELQKLQEGRQFASEYVWVVRWGVPAQMHFGTCSRSSPKHPGLLERSGVGSLSCEQGEKNRVLVVVGACNPNYWGGRGRRIS

SEQ ID NO: 861356 - protein, 492 aa, Homo sapiens
AQGAAAGAVGAKAMSDSWVPNSASGQDPGGRRRAWAELLAGRVKREKYNPERAQKLKESAVRLLRSHQDLNALLLEVEGPLCKKLSLSKVIDCDSSEAYANHSSSFIGSALQDQASRLGVPVGILSAGMVASSVGQICTAPAETSHPVLLTVEQRKKLSSLLEFAQYLLAHSMFSRLSFCQELWKIQSSLLLEAVWHLHVQGIVSLQELLESHPDMHAVGSWLFRNLCCLCEQMEASCQHADVARAMLSDFVQMFVLRGFQKNSDLRRTVEPEKMPQVAVDVLQRMLIFALDALAAGVQEESSTHKIVRCWFGVFSGHTLGSVISTDPLKRFFSHTLTQILTHSPVLKASDAVQMQREWSFARTHPLLTSLYRRLFVMLSAEELVGHLQEVLETQEVHWQRVLSFVSALVVCFPEAQQLLEDWVARLMAQAFESCQLDSMVTAFLVVRQAALEGPSAFLSYADWFKVSDLPIGYLIPDLPRRPGSGDHAVPT

SEQ ID NO: 861357 - protein, 310 aa, Homo sapiens; identical to SEQ ID NO: 861340

SEQ ID NO: 861358 - protein, 84 aa, Homo sapiens
LPRELQKLQEGRQFASEYVWVVRWGVPAQMHFGTCSRSSPKHPGLLERSGVGSLSCEQGEKNRVLVVVGACNPNYWGGRGRRIS

SEQ ID NO: 861359 - protein, 249 aa, Homo sapiens
MAMLRVQPEAQAKVDVFREDLCTKTENLLGSYFPKKISELDAFLKEPALNEANLSNLKAPLDIPVPDPVKEKEKEERKKQQEKEDKDEKKKGEDEDKGPPCGPVNCNEKIVVLLQRLKPEIKDVIEQLNLVTTWLQLQIPRIEDGNNFGVAVQEKVFELMTSLHTKLEGFHTQISKYFSERGDAVTKAAKQPHVGDYRQLVHELDEAEYRDIRLMVMEIRNAYAVLYDIILKNFEKLKKPRGETKGMIY

SEQ ID NO: 861360 - protein, 251 aa, Homo sapiens
GAGCERPTAFAFPSRCPLHSLCGARPPVPVMAMLRVQPEAQAKVDVFREDLCTKTENLLGSYFPKKISELDAFLKEPALNEANLSNLKAPLDIPVPDPVKEKEKEERKKQQEKEDKDEKKKGEDEDKGPPCGPVNCNEKIVVLLQRLKPEIKDVIEQLNLVTTWLQLQIPRIEDGNNFGVAVQQKLFRVVTRLHTKLDGLHIFSNPLSMRCDGTDSWNHACPLIDAIWQASSQALLRITTSLPPFLPLWSF

SEQ ID NO: 861361 - protein, 138 aa, Homo sapiens
QKINSLSFAGPPYKDMAMLRVQARGPSQGEMCFEKTYVTKTENLLGSYFPKKISELDAFLKEPALNEANLSNLKAPLDIPVPDPVKEKEKEERKKQQEKEDKDEKKKGEDEDKGPPCGPVNCNEKIGHHLVAAADTSD

SEQ ID NO: 861362 - protein, 278 aa, Homo sapiens
MAMLRVQPEAQAKVRPYITLRELSSNELALKPSFWRDACAPQVDVFREDLCTKTENLLGSYFPKKISELDAFLKEPALNEANLSNLKAPLDIPVPDPVKEKEKEERKKQQEKEDKDEKKKGEDEDKGPPCGPVNCNEKIVVLLQRLKPEIKDVIEQLNLVTTWLQLQIPRIEDGNNFGVAVQEKVFELMTSLHTKLEGFHTQISKYFSERGDAVTKAAKQPHVGDYRQLVHELDEAEYRDIRLMVMEIRNAYAVLYDIILKNFEKLKKPRGETKGMIY

SEQ ID NO: 861363 - protein, 250 aa, Homo sapiens
MAMLRVQPEAQAKVDVFREDLCTKTENLLGSYFPKKISELDAFLKEPALNEANLSNLKAPLDIPVPDPVKEKEKEERKKQQEKEDKDEKKKGEDEDKGPPCGPVNCNEKIVVLLQRLKPEIKDVIEQLNLVTTWLQLQIPRIEDGNNFGVAVQEKVFELMTSLHTKLEGFHTQISKYFSERGDAVTKAAKQPHVGDYRQLVHELDEAEYRDIRLMVMEIRNAYVRRQGQGRGGQRQLSQATHSLTLQARG

SEQ ID NO: 861364 - protein, 207 aa, Homo sapiens
MVVLFSKMPDVYGFLRSQCLLSSLSALLLSAAAAADKQQEKEDKDEKKKGEDEDKGPPCGPVNCNEKIVVLLQRLKPEIKDVIEQLNLVTTWLQLQIPRIEDGNNFGVAVQEKVFELMTSLHTKLEGFHTQISKYFSERGDAVTKAAKQPHVGDYRQLVHELDEAEYRDIRLMVMEIRNAYAVLYDIILKNFEKLKKPRGETKGMIY

SEQ ID NO: 861365 - protein, 194 aa, Homo sapiens
GAGCERPTAFAFPSRCPLHSLCGARPPVPVMAMLRVQPEAQAKVDVFREDLCTKTENLLGSYFPKKISELDAFLKEPALNEANLSNLKAPLDIPVPDPVKEKEKEERKKQQEKEDKDEKKKGEDEDKGPPCGPVNCNEKIVVLLQRLKPEIKDVIEQLNLVTTWLQLQIPRIEDGNNFGVAVQVRALPHFPALF

SEQ ID NO: 861366 - protein, 224 aa, Homo sapiens
MAMLRVQPEAQAKVDVFREDLCTKTENLLGSYFPKKISELDAFLKEPALNEANLSNLKAPLDIPVPDPVKEKEKEERKKQQEKEDKDEKKKGEDEDKGPPCGPVNCNEKIVVLLQRLKPEIKDVIEQLNLVTTWLQLQIPRIEDGNNFGVAVQEKVFELMTSLHTKLEGFHTQISKYFSERGDAVTKAAKQPHVAEQRQLVHELDDAAYRDIRLNSYKESTQAD

SEQ ID NO: 861367 - protein, 190 aa, Homo sapiens
MAMLRVQPEAQAKVDVFREDLCTKTENLLGSYFPKKISELDAFLKEPALNEANLSNLKAPLDIPVPDPVKEKEKEERKKQQEKEDKDEKKKGEDEDKGPPCGPVNCNEKIVVLLQRLKPEIKDVIEQLNLVTTWLQLQIPRIEDGNNFGVAVQEKVFELMTSLHTKLEGFHTQISKRISLADHLSGSAGP

SEQ ID NO: 861368 - protein, 214 aa, Homo sapiens
GAGCERPTAFAFPSRCPLHSLCGARPPVPVMAMLRVQPEAQAKVDVFREDLCTKTENLLGSYFPKKISELDAFLKEPALNEANLSNLKAPLDIPVPDPVKEKEKEERKKQQEKEDKDEKKKGEDEDKGPPCGPVNCNEKIVVLLQRLKPEIKDVIEQLNLVTTWLQLQIPRIEDGNNFGVAVQEKVFELMTSLHTKLEGFHTQISNISLSVVMQ

SEQ ID NO: 861369 - protein, 249 aa, Homo sapiens; identical to SEQ ID NO: 861359

SEQ ID NO: 861370 - protein, 116 aa, Homo sapiens
LKAYRRPTRSDGNNFGVAVQEKVFELMTSLHTKLEGFHTQISKYFSERGDAVTKAAKQPHVGDYRQLVHELDEAEYRDIRLMVMEIRNAYAVLYDIILKNFEKLKKPRGETKGMIY

SEQ ID NO: 861371 - protein, 115 aa, Homo sapiens
MEQLNLVTTWLQLQIPRIEDGNNFGVAVQEKVFELMTSLHTKLEGFHTQISKYFSERGDAVTKAAKQPHVGDYRQLVHELDEAEYRDIRLMVMEIRNAYAVLYDILIWAQPAGPA

SEQ ID NO: 861372 - protein, 116 aa, Homo sapiens; identical to SEQ ID NO: 861370

SEQ ID NO: 861373 - protein, 249 aa, Homo sapiens; identical to SEQ ID NO: 861359

SEQ ID NO: 861374 - protein, 239 aa, Homo sapiens
MLTPILLHPHLTTQTENLLGSYFPKKISELDAFLKEPALNEANLSNLKAPLDIPVPDPVKEKEKEERKKQQEKEDKDEKKKGEDEDKGPPCGPVNCNEKIVVLLQRLKPEIKDVIEQLNLVTTWLQLQIPRIEDGNNFGVAVQEKVFELMTSLHTKLEGFHTQISKYFSERGDAVTKAAKQPHVGDYRQLVHELDEAEYRDIRLMVMEIRNAYAVLYDIILKNFEKLKKPRGETKGMIY

SEQ ID NO: 861375 - protein, 123 aa, Homo sapiens
MKRSVTTWLQLQIPRIEDGNNFGVAVQEKVFELMTSLHTKLEGFHTQISKYFSERGDAVTKAAKQPHVGDYRQLVHELDEAEYRDIRLMVMEIRNAYAVLYDIILKNFEKLKKPRGETKGMIY

SEQ ID NO: 861376 - protein, 178 aa, Homo sapiens
TKTHILLPGIPRPLPFLLNTSRDLTSPQHENKVNCNEKIVVLLQRLKPEIKDVIEQLNLVTTWLQLQIPRIEDGNNFGVAVQEKVFELMTSLHTKLEGFHTQISKYFSERGDAVTKAAKQPHVGDYRQLVHELDEAEYRDIRLMVMEIRNAYAVLYDIILKNFEKLKKPRGETKGMIY

SEQ ID NO: 861377 - protein, 192 aa, Homo sapiens
MLTPILLHPHLTTQTENLLGSYFPKKISELDAFLKVPRLGRELGSKGQEKSLEAVRGGERNSLTSSPPPTLHQEPALNEANLSNLKAPLDIPVPDPVKEKEKEERKKQQEKEDKDEKKKGEDEDKGPPCGPVNCNEKIVVLLQRLKPEIKDVIEQLNLVTTWLQLQIPRIEDGNNFGVAVQVRALPHFPALF

SEQ ID NO: 861378 - protein, 105 aa, Homo sapiens
MAAAEHRHSSGLPCWPYLTAETLKNRMGHQPPPPTQQHSITDNSLSLKTPAECLLYPLPPSADDNLKTPPSVCSLPFHPQLHPQRMIISRHLPSVSAHSPSTLSG

SEQ ID NO: 861379 - protein, 389 aa, Homo sapiens
GSSCHPAIIVFYVLSPKVTLRNPGSSGRKERPEAGTGSWLGWTRNQVINTLADHRHRGTDFGGSPWLLIITVFLRSYKFAISLCTTYLWVINTLADHRHRGTDFGGSPWLLIITVFLRSYKFAISLCTSYLCVSFLKTIFPSQNGHDGSTDVQQRARRSNRRRQEGIKIVLEDIFTLWRQVETKVRAKIRKMKVTTKVNRHDKINGKKKTAKEHLRKLSMKEREHGEKERQVSEAEENGKLDMKEIHTYMEMFQRAQALRRRAEDYYRCKITPSARKPLCNRVRMAAAEHRHSSGLPCWPYLTAETLKNRMGHQPPPPTQQHSITDNSLSLKTPAECLLYPLPPSADDNLKTPPSVCSLPFHPQLHPQRMIISRHLPSVSAHSPSTLSG

SEQ ID NO: 861380 - protein, 402 aa, Homo sapiens
LIPVLSRSELPPLTTALVLQVAGSPSPTPAGQQVLDIDSCLDSSVLDSSFLTFSGLHAEVINTLADHRHRGTDFGGSPWLLIITVFLRSYKFAISLCTTYLWVINTLADHRHRGTDFGGSPWLLIITVFLRSYKFAISLCTSYLCVSFLKTIFPSQNGHDGSTDVQQRARRSNRRRQEGIKIVLEDIFTLWRQVETKVRAKIRKMKVTTKVNRHDKINGKKKTAKEHLRKLSMKEREHGEKERQVSEAEENGKLDMKEIHTYMEMFQRAQALRRRAEDYYRCKITPSARKPLCNRVRMAAAEHRHSSGLPCWPYLTAETLKNRMGHQPPPPTQQHSITDNSLSLKTPAECLLYPLPPSADDNLKTPPSVCSLPFHPQLHPQRMIISRHLPSVSAHSPSTLSG

SEQ ID NO: 861381 - protein, 333 aa, Homo sapiens
MILRVTLRNPGSSGRKERPEAGTGSWLGRTRNQVINTLADHRHRGTDFGGSPWLLIITVFLRSYKFAISLCTSYLCVSFLKTIFPSQNGHDGSTDVQQRARRSNRRRQEGIKIVLEDIFTLWRQVETKVRAKIRKMKVTTKVNRHDKINGKKKTAKEHLRKLSMKEREHGEKERQVSEAEENGKLDMKEIHTYMEMFQRAQALRRRAEDYYRCKITPSARKPLCNRVRMAAAEHRHSSGLPCWPYLTAETLKNRMGHQPPPPTQQHSITDNSLSLKTPAECLLYPLPPSADDNLKTPPSVCSLPFHPQLHPQRMIISRHLPSVSAHSPSTLSG

SEQ ID NO: 861382 - protein, 356 aa, Homo sapiens
AWPKYITLSVINTLADHRHRGTDFGGSPWLLIITVFLRSYKFAISLCTTYLWVINTLADHRHRGTDFGGSPWLLIITVFLRSYKFAISLCTSYLCVSFLKTIFPSQNGHDGSTDVQQRARRSNRRRQEGIKIVLEDIFTLWRQVETKVRAKIRKMKVTTKVNRHDKINGKKKTAKEHLRKLSMKEREHGEKERQVSEAEENGKLDMKEIHTYMEMFQRAQALRRRAEDYYRCKITPSARKPLCNRVRMAAAEHRHSSGLPCWPYLTAETLKNRMGHQPPPPTQQHSITDNSLSLKTPAECLLYPLPPSADDNLKTPPSVCSLPFHPQLHPQRMIISRHLPSVSAHSPSTLSSTLSG

SEQ ID NO: 861383 - protein, 99 aa, Homo sapiens
VDTVAVGLVSSVVVYPVYLAILFLFRMSRSKVAGSPSPTPAGQQVLDIDSCLDSSVLDSSFLTFSGLHAEVRALLGVLPPWRSLDSRPCAPLSRPLLDR

SEQ ID NO: 861384 - protein, 99 aa, Homo sapiens; identical to SEQ ID NO: 861383

SEQ ID NO: 861385 - protein, 337 aa, Homo sapiens
GSSCHPAIIVFYVLSPKVTLRNPGSSGRKERPEAGTGSWLGWTRNQVINTLADHRHRGTDFGGSPWLLIITVFLRSYKFAISLCTTYLWVINTLADHRHRGTDFGGSPWLLIITVFLRSYKFAISLCTSYLCVSFLKTIFPSQNGHDGSTDVQQRARRSNRRRQEGIKIVLEDIFTLWRQVETKVRAKIRKMKVTTKVNRHDKINGKKKTAKEHLRKLSMKEREHGEKERQVSEAEENGKLDMKEIHTYMEMFQRAQALRRRAEDYYRCKITPSARKPLCNRVRMAAAEHRHSSGLPCWPYLTAETLKNRMGHQPPPPTQQHSPTPDFHLARVPELE

SEQ ID NO: 861386 - protein, 99 aa, Homo sapiens; identical to SEQ ID NO: 861383

SEQ ID NO: 861387 - protein, 198 aa, Homo sapiens
MKVTTKVNRHDKINGKRKTAKEHLRKLSMKEREHGEKERQVSEAEENGKLDMKEIHTYMEMFQRAQALRRRAEDYYRCKITPSARKPLCNRVRMAAAEHRHSSGLPCWPYLTAETLKNRMGHQPPPPTQQHSITDNSLSLKTPAECLLYPLPPSADDNLKTPPSVCSLPFHPQLHPQRMIISRHLPSVSAHSPSTLSG

SEQ ID NO: 861388 - protein, 366 aa, Homo sapiens
GSSCHPAIIVFYVLSPKVTLRNPGSSGRKERPEAGTGSWLGWTRNQVINTLADHRHRGTDFGGSPWLLIITVFLRSYKFAISLCTTYLWVINTLADHRHRGTDFGGSPWLLIITVFLRSYKFAISLCTSYLCVSFLKTIFPSQNGHDGSTDVQQRARRSNRRRQEGIKIVLEDIFTLWRQVETKVRAKIRKMKVTTKVNRHDKINGKKKTAKEHLRKLSMKEREHGEKERQVSEAEENGKLDMKEIHTYMEMFQRAQALRRRAEDYYRCKITPSARKPLCNRVSLLVFLAFGHSLPGQDMDTFFSLRLCAQALQREMAERKAAYKHHSPIPVGNRVAQKHLHPHPVGPPSNILSVRGSVFVIANGP

SEQ ID NO: 861389 - protein, 148 aa, Homo sapiens
VTSYIPTSYLPRFITCILNQASGHQPPPPTQQHSIIDNSLSLKTPSERLLYPLPPSADDNLKTPSECLLTPLPPSALPSADDNLKTPAECLLYPLPPSADDNLKTPPECLLTPLPPSAPPSVDDNLKTPPECVCSLPFHPQRMIISRN

SEQ ID NO: 861390 - protein, 66 aa, Homo sapiens
LHDIEYRKKWDSNVIETFDIARLTVNADVGYYSCEQAVSTLIPVPLASIQASHQASPSTLSSTLSG

SEQ ID NO: 861391 - protein, 350 aa, Homo sapiens
MFCCLGYEWLSGGCKTWHSAWVINTLADHRHRGTDFGGSPWLLIITVFLRSYKFAISLCTSYLCVSFLKTIFPSQNGHDGSTDVQQRARRSNRRRQEGIKIVLEDIFTLWRQVETKVRAKIRKMKVTTKVNRHDKINGKRKTAKEHLRKLSMKEREHGEKERQVSEAEENGKLDMKEIHTYMEMFQRAQALRRRAEDYYRCKITPSARKPLCNRVRMAAVEHRHSSGLPYWPYLTAETLKNRMGHQPPPPTQQHSIIDNSLSLKTPSECLLTPLPPSALPSADDNLKTPAECLLYPLPPSADDNLKTPPECLLTPLPPSAPPSVDDNLKTPPECVCSLPFHPQRMIISRN

SEQ ID NO: 861392 - protein, 352 aa, Homo sapiens
AWPKYITLSVINTLADHRHRGTDFGGSPWLLIITVFLRSYKFAISLCTTYLWVINTLADHRHRGTDFGGSPWLLIITVFLRSYKFAISLCTSYLCVSFLKTIFPSQNGHDGSTDVQQRARRSNRRRQEGIKIVLEDIFTLWRQVETKVRAKIRKMKVTTKVNRHDKINGKKKTAKEHLRKLSMKEREHGEKERQVSEAEENGKLDMKEIHTYMEMFQRAQALRRRAEDYYRCKITPSARKPLCNRVRMAAAEHRHSSGLPCWPYLTAETLKNRMGHQPPPPTQQHSITDNSLSLKTPAECLLYPLPPSADDNLKTPPSVCSLPFHPQLHPQRMIISRHLPSVSAHSPSTLSG

SEQ ID NO: 861393 - protein, 198 aa, Homo sapiens
MKVTTKVNRHDKINGKKKTAKEHLRKLSMKEREHGEKERQVSEAEENGKLDMKEIHTYMEMFQRAQALRRRAEDYYRCKITPSARKPLCNRVRMAAAEHRHSSGLPCWPYLTAETLKNRMGHQPPPPTQQHSITDNSLSLKTPAECLLYPLPPSADDNLKTPPSVCSLPFHPQLHPQRMIISRHLPSVSAHSPSTLSG

SEQ ID NO: 861394 - protein, 339 aa, Homo sapiens
AWPKYITLSVINTLADHRHRGTDFGGSPWLLIITVFLRSYKFAISLCTTYLWVINTLADHRHRGTDFGGSPWLLIITVFLRSYKFAISLCTSYLCVSFLKTIFPSQNGHDGSTDVQQRARRSNRRRQEGIKIVLEDIFTLWRQVETKVRAKIRKMKVTTKVNRHDKINGKKKTAKEHLRKLSMKEREHGEKERQVSEAEENGKLDMKEIHTYMEMFQRAQALRRRAEDYYRCKITPSARKPLCNRVRMAAAEHRHSSGLPCWPYLTAETLKNRMGHQPPPPTQQHSITDNSLSLKTPAECLLYPLPPSADDNLKTSVLLLLCHYSVDDNLKQCLLVTSC

SEQ ID NO: 861395 - protein, 244 aa, Homo sapiens
MILRVTLRNPGSSGRKERPEAGTGSWLGRTRNQVINTLADHRHRGTDFGGSPWLLIITVFLRSYKFAISLCTSYLCVSFLKTIFPSQNGHDGSTDVQQRARRSNRRRQEGIKIVLEDIFTLWRQVETKVRAKIRKMKVTTKVNRHDKINGKRKTAKEHLRKLSMKEREHGEKERQVSEAEENGKLDMKEIHTYMEMFQRAQALRRRAEDYYRCKITPSARKPLCNRCTYNLVLPGSEKKYYSHA

SEQ ID NO: 861396 - protein, 212 aa, Homo sapiens
MVINTLADHRHRGTDFGGSPWLLIITVFLRSYKFAISLCTSYLCVSFLKTIFPSQNGHDGSTDVQQRARRSNRRRQEGIKIVLEDIFTLWRQVETKVRAKIRKMKVTTKVNRHDKINGKRKTAKEHLRKLSMKEREHGEKERQVSEAEENGKLDMKEIHTYMEMFQRAQALRRRAEDYYRCKITPSARKPLCNRCTYNLVLPGSEKKYYSHA

SEQ ID NO: 861397 - protein, 138 aa, Homo sapiens
MFQRAQALRRRAEDYYRCKITPSARKPLCNRVRMAAAEHRHSSGLPCWPYLTAETLKNRMGHQPPPPTQQHSITDNSLSLKTPAECLLYPLPPSADDNLKTPPSVCSLPFHPQLHPQRMIISRHLPSVSAHSPSTLSG

SEQ ID NO: 861398 - protein, 99 aa, Homo sapiens; identical to SEQ ID NO: 861383

SEQ ID NO: 861399 - protein, 99 aa, Homo sapiens; identical to SEQ ID NO: 861383

SEQ ID NO: 861400 - protein, 379 aa, Homo sapiens
ASPQLGSRALSTASGGQMQAERGARGGRGRRPGRGRPGGDRHSERPGAAAAVARGGGGGGGGDGGGRRGRGRGRGFRGARGGRGGGGAPRGSRREPGGWGAGASAPVEDDSDAETYGEENDEQGNYSKRKIVSNWDRYQDIEKEVNNESGESQRGTDFSVLLSSAGDSFSQFRFAEEKEWDSEASCPKQNSAFYVDSELLVRALQELPLCLRLNVAAELVQGTVPLEVPQVKPKRTDDGKGLGMQLKGPLGPGGRGPIFELKSVAAGCPVLLGKDNPSPGPSRDSQKPTSPLQSAGDHLEEELDLLLNLDAPIKEGDNILPDQTSQDLKSKEDGEVVQEEEVCAKPSVTEEKNMEPEQPSTSKNVTEEELEDWLDSMIS

SEQ ID NO: 861401 - protein, 224 aa, Homo sapiens
ASPQLGSRALSTASGGQMQAERGARGGRGRRPGRGRPGGDRHSERPGAAAAVARGGGGGGGGDGGGRRGRGRGRGFRGARGGRGGGGAPRGSRREPGGWGAGASAPVEDDSDAETYGEENDEQGNYSKRKIVSNWDRYQDIEKEVNNESGESQRGTDFSVLLSSAGDSFSQFRFAEEKEWDSEASCPKQNSAFYVDSELLVRALQELPLCLRLNVAAELVQMHL

SEQ ID NO: 861402 - protein, 363 aa, Homo sapiens
ASPQLGSRALSTASGGQMQAERGARGGRGRRPGRGRPGGDRHSERPGAAAAVARGGGGGGGGDGGGRRGRGRGRGFRGARGGRGGGGAPRGSRREPGGWGAGASAPVEDDSDAETYGEENDEQGNYSKRKIVSNWDRYQDIEKEVNNESGESQRGTDFSVLLSSAGDSFSQFRFAEEKEWDSEASCPKQNSAFYVDSELLVRALQELPLCLRLNVAAELVQGTVPLEVPQVKPKRTDDGKGLGMQLKGPLGPGGRGPIFELKSVAAGCPVLLGKDNPSPGPSRDSQKPTSPLQSAGDHLEEELDLLLNLDAPIKEGDNILPDQTSQDLKSKEDGEVVQEEEGMCKEIKHQRQPCFITIPSQCN

SEQ ID NO: 861403 - protein, 379 aa, Homo sapiens; identical to SEQ ID NO: 861400

SEQ ID NO: 861404 - protein, 181 aa, Homo sapiens
GLPLGCGLSLGGLPLGCCRTGSSGTVPLEVPQVKPKRTDDGKGLGMQLKGPLGPGGRGPIFELKSVAAGCPVLLGKDNPSPGPSRDSQKPTSPLQSAGDHLEEELDLLLNLDAPIKEGDNILPDQTSQDLKSKEDGEVVQEEEVCAKPSVTEEKNMEPEQPSTSKNVTEEELEDWLDSMIS

SEQ ID NO: 861405 - protein, 445 aa, Homo sapiens
MSVTYDDSVGVEVSSDSFWEVGNYKRTVKRIDDGHRLCSDLMNCLHERARIEKAYAQQLTEWARRWRQLVEKGPQYGTVEKAWMAFMSEAERVSELHLEVKASLMNDDFEKIKNWQKEAFHKQMMGGFKETKEAEDGFRKAQKPWAKKLKEVEAAKKAHHAACKEEKLAISREANSKADPSLNPEQLKKLQDKIEKCKQDVLKTKEKYEKSLKELDQGTPQYMENMEQVFEQCQQFEEKRLRFFREVLLEVQKHLDLSNVAGYKAIYHDLEQSIRAADAVEDLRWFRANHGPGMAMNWPQFEEWSADLNRTLSRREKKKATDGVTLTGINQTGDQSLPSKPSSVSSYEKTQSYPTDWSDDESNNPFSSTDANGDSNPFDDDATSGTEVRVRALYDYEGQEHDELSFKAGDELTKMEDEDEQGWCKGRLDNGQVGLYPANYVEAIQ

SEQ ID NO: 861406 - protein, 486 aa, Homo sapiens
MSVTYDDSVGVEVSSDSFWEVGNYKRTVKRIDDGHRLCSDLMNCLHERARIEKAYAQQLTEWARRWRQLVEKGPQYGTVEKAWMAFMSEAERVSELHLEVKASLMNDDFEKIKNWQKEAFHKQMMGGFKETKEAEDGFRKAQKPWAKKLKEVEAAKKAHHAACKEEKLAISREANSKADPSLNPEQLKKLQDKIEKCKQDVLKTKEKYEKSLKELDQGTPQYMENMEQVFEQCQQFEEKRLRFFREVLLEVQKHLDLSNVAGYKAIYHDLEQSIRAADAVEDLRWFRANHGPGMAMNWPQFEEWSADLNRTLSRREKKKATDGVTLTGINQTGDQSLPSKPSSTLNVPSNPAQSAQSQSSYNPFEDEDDTGSTVSEKDDTKAKNVSSYEKTQSYPTDWSDDESNNPFSSTDANGDSNPFDDDATSGTEVRVRALYDYEGQEHDELSFKAGDELTKMEDEDEQGWCKGRLDNGQVGLYPANYVEAIQ

SEQ ID NO: 861407 - protein, 445 aa, Homo sapiens; identical to SEQ ID NO: 861405

SEQ ID NO: 861408 - protein, 486 aa, Homo sapiens; identical to SEQ ID NO: 861406

SEQ ID NO: 861409 - protein, 445 aa, Homo sapiens [sequence omitted]

SEQ ID NO: 861410 - protein, 582 aa, Homo sapiens
SPSPSVCVRCPFRHPQPHPFLSQSASLPDPQPSFYLVPNLKNIEKPPFTDVYDLINNKNREAHYLTTRSAFQTLGEGCGKHDPRGASGPGWHGGHLCHSQGQAAPSPLPPSWFSLLVGNYKRTVKRIDDGHRLCSDLMNCLHERARIEKAYAQQLTEWARRWRQLVEKGPQYGTVEKAWMAFMSEAERVSELHLEVKASLMNDDFEKIKNWQKEAFHKQMMGGFKETKEAEDGFRKAQKPWAKKLKEVEAAKKAHHAACKEEKLAISREANSKADPSLNPEQLKKLQDKIEKCKQDVLKTKEKYEKSLKELDQGTPQYMENMEQVFEQCQQFEEKRLRFFREVLLEVQKHLDLSNVAGYKAIYHDLEQSIRAADAVEDLRWFRANHGPGMAMNWPQFEEWSADLNRTLSRREKKKATDGVTLTGINQTGDQSLPSKPSSTLNVPSNPAQSAQSQSSYNPFEDEDDTGSTVSEKDDTKAKNVSSYEKTQSYPTDWSDDESNNPFSSTDANGDSNPFDDDATSGTEVRVRALYDYEGQEHDELSFKAGDELTKMEDEDEQGWCKGRLDNGQVGLYPANYVEAIQ

SEQ ID NO: 861411 - protein, 486 aa, Homo sapiens; identical to SEQ ID NO: 861406

SEQ ID NO: 861412 - protein, 486 aa, Homo sapiens; identical to SEQ ID NO: 861406

SEQ ID NO: 861413 - protein, 487 aa, Homo sapiens
MSVTYDDSVGVEVSSDSFWEVGNYKRTVKRIDDGHRLCSDLMNCLHERARIEKAYAQQLTEWARRWRQLVEKGPQYGTVEKAWMAFMSEAERVSELHLEVKASLMNDDFEKIKNWQKEAFHKQMMGGFKETKEAEDGFRKAQKPWAKKLKEVEAAKKAHHAACKEEKLAISREANSKADPSLNPEQLKKLQDKIEKCKQDVLKTKEKYEKSLKELDQGTPQYMENMEQVFEQCQQFEEKRLRFFREVLLEVQKHLDLSNVAGYKAIYHDLEQSIRAADAVEDLRWFRANHGPGMAMNWPQFEEWSADLNRTLSRREKKKATDGVTLTGINQTGDQSLPSKPSSTLNVPSNPAQSAQSQSSYNPFEDEDDTGSTVSEKDDTKAKNVSSYEKTQSYPTDWSDDESNNPFSSTDANGDSNPFDDDATSGTEVRVRALYDYEGQEHDELSFKAGDELTKMEDEDEQGWCKGRLDNGALAQRWANAPCWASG

SEQ ID NO: 861414 - protein, 406 aa, Homo sapiens
MSVTYDDSVGVEVSSDSFWEVGNYKRTVKRIDDGHRLCSDLMNCLHERARIEKAYAQQLTEWARRWRQLVEKGPQYGTVEKAWMAFMSEAERVSELHLEVKASLMNDDFEKIKNWQKEAFHKQMMGGFKETKEAEDGFRKAQKPWAKKLKEVEAAKKAHHAACKEEKLAISREANSKADPSLNPEQLKKLQDKIEKCKQDVLKTKEKYEKSLKELDQGTPQYMENMEQVFEQCQQFEEKRLRFFREVLLEVQKHLDLSNVAGYKAIYHDLEQSIRAADAVEDLRWFRANHGPGMAMNWPQFEEWSADLNRTLSRREKKKATDGVTLTGINQTGDQSLPSKPSSTLNVPSNPAQSAQSQSSYNPFEDEDDTGSTVSEKDDTKAKNVSSYEKTQSYPTRTSMQPGPQF

SEQ ID NO: 861415 - protein, 63 aa, Homo sapiens
TDWSDDESNNPFSSTDANGDSNPFDDDATSGTEVRVRALYDYEGQEHDELSFKAGRWAPPASR

SEQ ID NO: 861416 - protein, 486 aa, Homo sapiens; identical to SEQ ID NO: 861406

SEQ ID NO: 861417 - protein, 75 aa, Homo sapiens
MVGALGNLHGPGQPRPGHLGGSWAPELCGPWPSLDTWEVPGLLSSVGRGPGASPGKVVFLPGARAADRSREGGLA

SEQ ID NO: 861418 - protein, 486 aa, Homo sapiens; identical to SEQ ID NO: 861406

SEQ ID NO: 861419 - protein, 486 aa, Homo sapiens; identical to SEQ ID NO: 861406

SEQ ID NO: 861420 - protein, 486 aa, Homo sapiens; identical to SEQ ID NO: 861406

SEQ ID NO: 861421 - protein, 462 aa, Homo sapiens
MVTAEYLTDGHRLCSDLMNCLHERARIEKAYAQQLTEWARRWRQLVEKGPQYGTVEKAWMAFMSEAERVSELHLEVKASLMNDDFEKIKNWQKEAFHKQMMGGFKETKEAEDGFRKAQKPWAKKLKEVEAAKKAHHAACKEEKLAISREANSKADPSLNPEQLKKLQDKIEKCKQDVLKTKEKYEKSLKELDQGTPQYMENMEQVFEQCQQFEEKRLRFFREVLLEVQKHLDLSNVAGYKAIYHDLEQSIRAADAVEDLRWFRANHGPGMAMNWPQFEEWSADLNRTLSRREKKKATDGVTLTGINQTGDQSLPSKPSSTLNVPSNPAQSAQSQSSYNPFEDEDDTGSTVSEKDDTKAKNVSSYEKTQSYPTDWSDDESNNPFSSTDANGDSNPFDDDATSGTEVRVRALYDYEGQEHDELSFKAGDELTKMEDEDEQGWCKGRLDNGQVGLYPANYVEAIQ

SEQ ID NO: 861422 - protein, 121 aa, Homo sapiens [sequence omitted]

SEQ ID NO: 861423 - protein, 490 aa, Homo sapiens
MSVTYDDSVGVEVSSDSFWEVGNYKRTVKRIDDGHRLCSDLMNCLHERARIEKAYAQQLTEWARRWRQLVEKGPQYGTVEKAWMAFMSEAERVSELHLEVKASLMNDDFEKIKNWQKEAFHKQMMGGFKETKEAEDGFRKAQKPWAKKLKEVEAAKKAHHAACKEEKLAISREANSKADPSLNPEQLKKLQDKIEKCKQDVLKTKEKYEKSLKELDQGTPQYMENMEQVFEQCQQFEEKRLRFFREVLLEVQKHLDLSNVAGYKAIYHDLEQSIRAADAVEDLRWFRANHGPGMAMNWPQFEEWSADLNRTLSRREKKKATDGVTLTGINQTGDQSLPSKPSSTLNVPSNPAQSAQSQSSYNPFEDEDDTGSTVSEKDDTKAKNVSSYEKTQSYPTDWSDDESNNPFSSTDANGDSNPFDDDATSGTEVRVRALYDYEGQEHDELSFKAGDELTKMEEEADTGLPAQDAGTPRPGPSVERTQAGLEQEAH

SEQ ID NO: 861424 - protein, 105 aa, Homo sapiens
INKITNSVLITKNSEELEVDDPRKPNCFELYIPNNKGQLIKACKTEADGRVVEGNHMVYRISAPTQEEKDEWIKSIQAAVSVDPFYEMLAARKKRISVKKKQEQP

SEQ ID NO: 861425 - protein, 97 aa, Homo sapiens
DHSTFSSCVEGRDPVHHVVSLHHSDVRLSYAGFDELPLVVWGCKVQSSSVSGGRPNREPGPLGLGAVDPGSLFGKFTTSSSSLFFVINTLLVILLII

SEQ ID NO: 861426 - protein, 133 aa, Homo sapiens
LPLRTPPCAHPVSVACGSWGCSILPPSLLLHLVLPAFSLSAPGGGRVKTWKRRWFILTDNCLYYFEYTTDKEPRGIIPLENLSIREVDDPRKPNSIIYYGAAPPGWPDPWALGLWILVPCLENSPPLAPHCSL

SEQ ID NO: 861427 - protein, 400 aa, Homo sapiens
MEDGVYEPPDLTPEERMELENIRRRKQELLVEIQRLREELSEAMSEVEGLEANEGSKTLQRNRKMAMGRKKFNMDPKKGIQFLVENELLQNTPEEIARFLYKGEGLNKTAIGDYLGEREELNLAVLHAFVDLHEFTDLNLVQALRQFLWSFRLPGEAQKIDRMMEAFAQRYCLCNPGVFQSTDTCYVLSFAVIMLNTSLHNPNVRDKPGLERFVAMNRGINEGGDLPEELLRNLYDSIRNEPFKIPEDDGNDLTHTFFNPDREGWLLKLGGGRVKTWKRRWFILTDNCLYYFEYTTDKEPRGIIPLENLSIREVDDPRKPNCFELYIPNNKGQLIKACKTEADGRVVEGNHMVYRISAPTQEEKDEWIKSIQAAVSVDPFYEMLAARKKRISVKKKQEQP

SEQ ID NO: 861428 - protein, 368 aa, Homo sapiens
MEDGVYEPPDLTPEERMELENIRRRKQELLVEIQRLREELSEAMSEVEGLEANEGSKTLQRNRKMAMGRKKFNMDPKKGIQFLVENELLQNTPEEIARFLYKGEGLNKTAIGDYLGEREELNLAVLHAFVDLHEFTDLNLVQALRQFLWSFRLPGEAQKIDRMMEAFAQRYCLCNPGVFQSTDTCYVLSFAVIMLNTSLHNPNVRDKPGLERFVAMNRGINEGGDLPEELLRNLYDSIRNEPFKIPEDDGNDLTHTFFNPDREGWLLKLGGGRVKTWKRRWFILTDNCLYYFEYTTDKEPRGIIPLENLSIREVDDPRKPNCFELYIPNNKGQLIKACKTEADGRVVEGNHMVYRISAPGGCECGPLL

SEQ ID NO: 861429 - protein, 374 aa, Homo sapiens
MEDGVYEPPDLTPEERMELENIRRRKQELLVEIQRLREELSEAMSEVEGLEANEGSKTLQRNRKMAMGRKKFNMDPKKGIQFLVENELLQNTPEEIARFLYKGEGLNKTAIGDYLGEREELNLAVLHAFVDLHEFTDLNLVQALRQFLWSFRLPGEAQKIDRMMEAFAQRYCLCNPGVFQSTDTCYVLSFAVIMLNTSLHNPNVRDKPGLERFVAMNRGINEGGDLPEELLRNLYDSIRNEPFKIPEDDGNDLTHTFFNPDREGWLLKLGGGRVKTWKRRWFILTDNCLYYFEYTTDKEPRGIIPLENLSIREVDDPRKPNCFELYIPNNKGQTQEEKDEWIKSIQAAVSVDPFYEMLAARKKRISVKKKQEQP

SEQ ID NO: 861430 - protein, 364 aa, Homo sapiens
SPNCTKVWPKQGSQARYSSQECVLSIPHPGGRPVWESSRKLHPRQWAAVVQQRGHDFPRALPFAHSCPILSKLYVSLSHPSREELNLAVLHAFVDLHEFTDLNLVQALRQFLWSFRLPGEAQKIDRMMEAFAQRYCLCNPGVFQSTDTCYVLSFAVIMLNTSLHNPNVRDKPGLERFVAMNRGINEGGDLPEELLRNLYDSIRNEPFKIPEDDGNDLTHTFFNPDREGWLLKLGGGRVKTWKRRWFILTDNCLYYFEYTTDKEPRGIIPLENLSIREVDDPRKPNCFELYIPNNKGQLIKACKTEADGRVVEGNHMVYRISAPTQEEKDEWIKSIQAAVSVDPFYEMLAARKKRISVKKKQEQP

SEQ ID NO: 861431 - protein, 171 aa, Homo sapiens
FWASCCGDNGDLLAHALVRVEVVAQARVVLFYDDPPRMHAGGGRVKTWKRRWFILTDNCLYYFEYTTDKEPRGIIPLENLSIREVDDPRKPNCFELYIPNNKGQLIKACKTEADGRVVEGNHMVYRISAPTQEEKDEWIKSIQAAVSVDPFYEMLAARKKRISVKKKQEQP

SEQ ID NO: 861432 - protein, 182 aa, Homo sapiens
RGISPEVTIEHGIVTNWDDMEKIWHHTFYNELRVAPGQHPVLLTEAPSSSVLWGRVKTWKRRWFILTDNCLYYFEYTTDKEPRGIIPLENLSIREVDDPRKPNCFELYIPNNKGQLIKACKTEADGRVVEGNHMVYRISAPTQEEKDEWIKSIQAAVSVDPFYEMLAARKKRISVKKKQEQP

SEQ ID NO: 861433 - protein, 109 aa, Homo sapiens
RGGCTAWLRLRATLFRGFSLESKPVKCFLLFRRRGLLPCLHSDWPRGPSTSGRTYLHRLFVRLLALENDPLVARAGRTKAPTVDWTVSKRGAVPTEGAVGRRREESFQR

SEQ ID NO: 861434 - protein, 121 aa, Homo sapiens
  misc_feature (20)..(20): Xaa can be any naturally occurring amino acid
  misc_feature (31)..(31): Xaa can be any naturally occurring amino acid
AFLINFGSNNQGQREPREGXNSPLGGIWSIXEEVEEPPGNRNCFELYIPNNKGQLIKACKTEADGRVVEGNHMVYRISAPTQEEKDEWIKSIQAAVSVDPFYEMLAARKKRISVKKKQEQP

SEQ ID NO: 861435 - protein, 105 aa, Homo sapiens; identical to SEQ ID NO: 861424

SEQ ID NO: 861436 - protein, 400 aa, Homo sapiens; identical to SEQ ID NO: 861427

SEQ ID NO: 861437 - protein, 422 aa, Homo sapiens
MDPVVRITRSPATSPVMESENQGLSPLPKPPDLTPEERMELENIRRRKQELLVEIQRLREELSEAMSEVEGLEANEGSKTLQRNRKMAMGRKKFNMDPKKGIQFLVENELLQNTPEEIARFLYKGEGLNKTAIGDYLGEREELNLAVLHAFVDLHEFTDLNLVQALRQFLWSFRLPGEAQKIDRMMEAFAQRYCLCNPGVFQSTDTCYVLSFAVIMLNTSLHNPNVRDKPGLERFVAMNRGINEGGDLPEELLRNLYDSIRNEPFKIPEDDGNDLTHTFFNPDREGWLLKLGGGRVKTWKRRWFILTDNCLYYFEYTTDKEPRGIIPLENLSIREVDDPRKPNCFELYIPNNKGQLIKACKTEADGRVVEGNHMVYRISAPTQEEKDEWIKSIQAAVSVDPFYEMLAARKKRISVKKKQEQP

SEQ ID NO: 861438 - protein, 384 aa, Homo sapiens
MELENIRRRKQELLVEIQRLREELSEAMSEVEGLEANEGSKTLQRNRKMAMGRKKFNMDPKKGIQFLVENELLQNTPEEIARFLYKGEGLNKTAIGDYLGEREELNLAVLHAFVDLHEFTDLNLVQALRQFLWSFRLPGEAQKIDRMMEAFAQRYCLCNPGVFQSTDTCYVLSFAVIMLNTSLHNPNVRDKPGLERFVAMNRGINEGGDLPEELLRNLYDSIRNEPFKIPEDDGNDLTHTFFNPDREGWLLKLGGGRVKTWKRRWFILTDNCLYYFEYTTDKEPRGIIPLENLSIREVDDPRKPNCFELYIPNNKGQLIKACKTEADGRVVEGNHMVYRISAPTQEEKDEWIKSIQAAVSVDPFYEMLAARKKRISVKKKQEQP

SEQ ID NO: 861439 - protein, 262 aa, Homo sapiens
MEDGVYEPPDLTPEERMELENIRRRKQELLVEIQRLREELSEAMSEVEGLEANEGSKTLQRNRKMAMGRKKFNMDPKKGIQFLVENELLQNTPEEIARFLYKGEGLNKTAIGDYLGEREELNLAVLHAFVDLHEFTDLNLVQALRQFLWSFRLPGEAQKIDRMMEAFAQRYCLCNPGVFQSTDTCYVLSFAVIMLNTSLHNPNVRDKPGLERFVAMNRGINEGGDLPEELLRNLYDSIRNEPFKIPEDDGNDLTHTFLQEQP

SEQ ID NO: 861440 - protein, 187 aa, Homo sapiens
CPCAPLPVPTLFLSPAALGGAPFSRLPFSCTWSCLLSRCLPQEEVHDLSLSPTPSLSGGRVKTWKRRWFILTDNCLYYFEYTTDKEPRGIIPLENLSIREVDDPRKPNCFELYIPNNKGQLIKACKTEADGRVVEGNHMVYRISAPTQEEKDEWIKSIQAAVSVDPFYEMLAARKKRISVKKKQEQP

SEQ ID NO: 861441 - protein, 189 aa, Homo sapiens
MEDGVYEPPDLTPEERMELENIRRRKQELLVEIQRLREELSEAMSEVEGLEANEGSKTLQRNRKMAMGRKKFNMDPKKGIQFLVENELLQNTPEEIARFLYKGEGLNKTAIGDYLGEREELNLAVLHAFVDLHEFTDLNLVQALRDSQHSRGQCPLVRLDHVTIPETTAEAGRSGFLVDQFLTQGLRVG

SEQ ID NO: 861442 - protein, 138 aa, Homo sapiens
MSWSGLLHGLNTSLTCGPALVPRLWATCSMATLNQMHRLGPPKRPPRKLGPTEGRPQLKGVVLCTFTRKPKKPNSANRKCCRVRLSTGREAVCFIPGEGHTLQEHQIVLVEGGRTQDLPGVKLTVVRGKYDCGHVQKK

SEQ ID NO: 861443 - protein, 138 aa, Homo sapiens; identical to SEQ ID NO: 861442

SEQ ID NO: 861444 - protein, 138 aa, Homo sapiens; identical to SEQ ID NO: 861442

SEQ ID NO: 861445 - protein, 138 aa, Homo sapiens; identical to SEQ ID NO: 861442

SEQ ID NO: 861446 - protein, 138 aa, Homo sapiens; identical to SEQ ID NO: 861442

SEQ ID NO: 861447 - protein, 138 aa, Homo sapiens; identical to SEQ ID NO: 861442

SEQ ID NO: 861448 - protein, 138 aa, Homo sapiens; identical to SEQ ID NO: 861442

SEQ ID NO: 861449 - protein, 138 aa, Homo sapiens; identical to SEQ ID NO: 861442

SEQ ID NO: 861450 - protein, 138 aa, Homo sapiens; identical to SEQ ID NO: 861442

SEQ ID NO: 861451 - protein, 138 aa, Homo sapiens; identical to SEQ ID NO: 861442

SEQ ID NO: 861452 - protein, 138 aa, Homo sapiens; identical to SEQ ID NO: 861442

SEQ ID NO: 861453 - protein, 32 aa, Homo sapiens
MGWWLVIDQGLKQCLYFSFSSGRPDIIYTLEG

SEQ ID NO: 861454 - protein, 138 aa, Homo sapiens; identical to SEQ ID NO: 861442

SEQ ID NO: 861455 - protein, 138 aa, Homo sapiens; identical to SEQ ID NO: 861442

SEQ ID NO: 861456 - protein, 138 aa, Homo sapiens; identical to SEQ ID NO: 861442

SEQ ID NO: 861457 - protein, 123 aa, Homo sapiens
MSWSGLLHGLNTSLTCGPALVPRLWATCSMATLNQMHRLGPQLKGVVLCTFTRKPKKPNSANRKCCRVRLSTGREAVCFIPGEGHTLQEHQIVLVEGGRTQDLPGVKLTVVRGKYDCGHVQKK

SEQ ID NO: 861458 - protein, 140 aa, Homo sapiens
MSWSGLLHGLNTSLTCGKWGTWASGTRLEGEGYSLLDLCASVGAPRETGVEKHGGVLAELGLLEQEVGSSCMEGYCVSSGVWVSFIIYLFKISLLSPRLKCSGVITAHCSLDLLGSSDPPASASQVAGTTGLQNHNQLTF

SEQ ID NO: 861459 - protein, 394 aa, Homo sapiens
MGLGCEGPLNGEPSGPGLLTMPILSPAHSPTAPGATDQTAVPMPAAPGCRPGQHPLTCLQPFPVPHIRSSHDRHSRPTHHVCPAGLGFAEGGQPWAAVPGVVTMPPPQAPVVCTRKRRLEDDERQSIPSVLQGEVARLDPKFLVNLDPSHCSNNGTVHLICKLGECPEGRDWCGKAGPDRSPRTLPSKPDGTAPRTHPVFTPRQAVCSILTHTGLQTACHASVPTARARTLSPPQHRCGFACLGPREVVGRTSGHPSMQSTPGFTFGNLRVRETSSRLCHKLHQNLPGCGVLFQSRAVRQGRPGLVQVTDRAFCVADDKDLPSVPPLELSVPADYPAQSPLWIDRQWQYDANPFLQSVHRCMTSRLLQLPDKHSVTALLNTWAQSVHQACLSAA

SEQ ID NO: 861460 - protein, 777 aa, Homo sapiens
PARFGPGSVTEAAAVAAKRDTGGGSWGTGMDVSGQETDWRSTAFRQKLVSQIEDAMRKAGVAHSKSSKDMESHVFLKAKTRDEYLSLVARLIIHFRDIHNKKSQASVSDPMNALQSLTGGPAAGAAGIGMPPRGPGQSLGGMGSLGAMGQPMSLSGQPPPGTSGMAPHSMAVVSTATPQTQLQLQQVALQQQQQQQQFQQQQQAALQQQQQQQQQQQFQAQQSAMQQQFQAVVQQQQQLQQQQQQQQHLIKLHHQNQQQIQQQQQQLQRIAQLQLQQQQQQQQQQQQQQQQALQAQPPIQQPPMQQPQPPPSQALPQQLQQMHHTQHHQPPPQPQQPPVAQNQPSQLPPQSQTQPLVSQAQALPGQMLYTQPPLKFVRAPMVVQQPPVQPQVQQQQTAVQTAQAAQMVAPGVQVSQSSLPMLSSPSPGQQVQTPQSMPPPPQPSPQPGQPSSQPNSNVSSGPAPSPSSFLPSPSPQPSQSPVTARTPQNFSVPSPGPLNTPVNPSSVMSPAGSSQAEEQQYLDKLKQLSKYIEPLRRMINKIDKNEDRKKDLSKMKSLLDILTDPSKRCPLKTLQKCEIALEKLKNDMAVPTPPPPPVPPTKQQYLCQPLLDAVLANIRSPVFNHSLYRTFVPAMTAIHGPPITAPVVCTRKRRLEDDERQSIPSVLQGEVARLDPKFLVNLDPSHCSNNGTVHLICKLDDKDLPSVPPLELSVPADYPAQSPLWIDRQWQYDANPFLQSVHRCMTSRLLQLPDKHSVTALLNTWAQSVHQACLSAA

SEQ ID NO: 861461 - protein, 693 aa, Homo sapiens
AAPARRAAPARRWDHSEDAMRKAGVAHSKSSKDMESHVFLKAKTRDEYLSLVARLIIHFRDIHNKKSQASVSDPMNALQSLTGGPAAGAAGIGMPPRGPGQSLGGMGSLGAMGQPMSLSGQPPPGTSGMAPHSMAVVSTATPQTQLQLQQVALQQQQQQQQFQQQQQALQAQPPIQQPPMQQPQPPPSQALPQQLQQMHHTQHHQPPPQPQQPPVAQNQPSQLPPQSQTQPLVSQAQALPGQMLYTQPPLKFVRAPMVVQQPPVQPQVQQQQTAVQTAQAAQMVAPGVQMITEALAQGGMHIRARFPPTTAVSAIPSSSIPLGRQPMAQVSQSSLPMLSSPSPGQQVQTPQSMPPPPQPSPQPGQPSSQPNSNVSSGPAPSPSSFLPSPSPQPSQSPVTARTPQNFSVPSPGPLNTPVNPSSVMSPAGSSQAEEQQYLDKLKQLSKYIEPLRRMINKIDKNEDRKKDLSKMKSLLDILTDPSKRCPLKTLQKCEIALEKLKNDMAVPTPPPPPVPPTKQQYLCQPLLDAVLANIRSPVFNHSLYRTFVPAMTAIHGPPITAPVVCTRKRRLEDDERQSIPSVLQGEVARLDPKFLVNLDPSHCSNNGTVHLICKLDDKDLPSVPPLELSVPADYPAQSPLWIDRQWQYDANPFLQSVHRCMTSRLLQLPDKHSVTALLNTWAQSVHQACLSAA

SEQ ID NO: 861462 - protein, 769 aa, Homo sapiens
AAPARRAAPARRWDHSEDAMRKAGVAHSKSSKDMESHVFLKAKTRDEYLSLVARLIIHFRDIHNKKSQASVSDPMNALQSLTGGPAAGAAGIGMPPRGPGQSLGGMGSLGAMGQPMSLSGQPPPGTSGMAPHSMAVVSTATPQTQLQLQQVALQQQQQQQQFQQQQQAALQQQQQQQQQQQFQAQQSAMQQQFQAVVQQQQQLQQQQQQQQHLIKLHHQNQQQIQQQQQQLQRIAQLQLQQQQQQQQQQQQQQQQALQAQPPIQQPPMQQPQPPPSQALPQQLQQMHHTQHHQPPPQPQQPPVAQNQPSQLPPQSQTQPLVSQAQALPGQMLYTQPPLKFVRAPMVVQQPPVQPQVQQQQTAVQTAQAAQMVAPGVQVSQSSLPMLSSPSPGQQVQTPQSMPPPPQPSPQPGQPSSQPNSNVSSGPAPSPSSFLPSPSPQPSQSPVTARTPQNFSVPSPGPLNTPVNPSSVMSPAGSSQAEEQQYLDKLKQLSKYIEPLRRMINKIDKNEDRKKDLSKMKSLLDILTDPSKRCPLKTLQKCEIALEKLKNDMAVPTPPPPPVPPTKQQYLCQPLLDAVLANIRSPVFNHSLYRTFVPAMTAIHGPPITYVQLGWALRRAASPGPRVPGVVTMPPPQAPVVCTRKRRLEDDERQSIPSVLQGEVARLDPKFLVNLDPSHCSNNGTVHLICKLDDKDLPSVPPLELSVPADYPAQSPLWIDRQWQYDANPFLQSVHRCMTSRLLQLPDKHSVTALLNTWAQSVHQACLSAA

SEQ ID NO: 861463 - protein, 741 aa, Homo sapiens
AAPARRAAPARRWDHSEDAMRKAGVAHSKSSKDMESHVFLKAKTRDEYLSLVARLIIHFRDIHNKKSQASVSDPMNALQSLTGGPAAGAAGIGMPPRGPGQSLGGMGSLGAMGQPMSLSGQPPPGTSGMAPHSMAVVSTATPQTQLQLQQVALQQQQQQQQFQQQQQAALQQQQQQQQQQQFQAQQSAMQQQFQAVVQQQQQLQQQQQQQQHLIKLHHQNQQQIQQQQQQLQRIAQLQLQQQQQQQQQQQQQQQQALQAQPPIQQPPMQQPQPPPSQALPQQLQQMHHTQHHQPPPQPQQPPVAQNQPSQLPPQSQTQPLVSQAQALPGQMLYTQPPLKFVRAPMVVQQPPVQPQVQQQQTAVQTAQAAQMVAPGVQVSQSSLPMLSSPSPGQQVQTPQSMPPPPQPSPQPGQPSSQPNSNVSSGPAPSPSSFLPSPSPQPSQSPVTARTPQNFSVPSPGPLNTPVNPSSVMSPAGSSQAEEQQYLDKLKQLSKYIEPLRRMINKIDKNEDRKKDLSKMKSLLDILTDPSKRCPLKTLQKCEIALEKLKNDMAVPTPPPPPVPPTKQQYLCQPLLDAVLANIRSPVFNHSLYRTFVPAMTAIHGPPITAPVVCTRKRRLEDDERQSIPSVLQGEVARLDPKFLVNLDPSHCSNNGTVHLICKLDDKDLPSVPPLELSVPADYPAQSPLWIDRQWQYDANPFLQSVHRCMTSRLLQLPDKHSVTALLNTWAQSVHQACLSAA

SEQ ID NO: 861464 - protein, 741 aa, Homo sapiens; identical to SEQ ID NO: 861463

SEQ ID NO: 861465 - protein, 741 aa, Homo sapiens; identical to SEQ ID NO: 861463

SEQ ID NO: 861466 - protein, 393 aa, Homo sapiens
AAPARRAAPARRWDHSEDAMRKAGVAHSKSSKDMESHVFLKAKTRDEYLSLVARLIIHFRDIHNKKSQASVSDPMNALQSLTGGPAAGAAGIGMPPRGPGQSLGGMGSLGAMGQPMSLSGQPPPGTSGMAPHSMAVVSTATPQTQLQLQQVALQQQQQQQQFQQQQQAALQQQQQQQQQQQFQAQQSAMQQQFQAVVQQQQQLQQQQQQQQHLIKLHHQNQQQIQQQQQQLQRIAQLQLQQQQQQQQQQQQQQQQALQAQPPIQQPPMQQPQPPPSQALPQQLQQMHHTQHHQPPPQPQQPPVAQNQPSQLPPQSQTQPLVSQAQALPGQMLYTQPPLKFVRAPMVVQQPPVQPQVQQQQTAVTYASRSWMPSWPTSAHLSSTIPCTAHSFQP

SEQ ID NO: 861467 - protein, 840 aa, Homo sapiens
AAPARRAAPARRWDHSEDAMRKAGVAHSKSSKDMESHVFLKAKTRDEYLSLVARLIIHFRDIHNKKSQASVSDPMNALQSLTGGPAAGAAGIGMPPRGPGQSLGGMGSLGAMGQPMSLSGQPPPGTSGMAPHSMAVVSTATPQTQLQLQQVALQQQQQQQQFQQQQQAALQQQQQQQQQQQFQAQQSAMQQQFQAVVQQQQQLQQQQQQQQHLIKLHHQNQQQIQQQQQQLQRIAQLQLQQQQQQQQQQQQQQQQALQAQPPIQQPPMQQPQPPPSQALPQQLQQMHHTQHHQPPPQPQQPPVAQNQPSQLPPQSQTQPLVSQAQALPGQMLYTQPPLKFVRAPMVVQQPPVQPQVQQQQTAVQTAQAAQMVAPGVQVSQSSLPMLSSPSPGQQVQTPQSMPPPPQPSPQPGQPSSQPNSNVSSGPAPSPSSFLPSPSPQPSQSPVTARTPQNFSVPSPGPLNTPVNPSSVMSPAGSSQAEEQQYLDKLKQLSKYIEPLRRMINKIDKNEDRKKDLSKMKSLLDILTDPSKRCPLKTLQKCEIALEKLKNDMAVAPVVCTRKRRLEDDERQSIPSVLQGEVARLDPKFLVNLDPSHCSNNGTVHLICKLGECPEGRDWCGKAGPDRSPRTLPSKPDGTAPRTHPVFTPRQAVCSILTHTGLQTACHASVPTARARTLSPPQHRCGFACLGPREVVGRTSGHPSMQSTPGFTFGNLRVRETSSRLCHKLHQNLPGCGVLFQSRAVRQGRPGLVQVTDRAFCVADDKDLPSVPPLELSVPADYPAQSPLWIDRQWQYDANPFLQSVHRCMTSRLLQLPDKHSVTALLNTWAQSVHQACLSAA

SEQ ID NO: 861468 - protein, 417 aa, Homo sapiens
  misc_feature (416)..(416): Xaa can be any naturally occurring amino acid
AAPARRAAPARRWDHSEDAMRKAGVAHSKSSKDMESHVFLKAKTRDEYLSLVARLIIHFRDIHNKKSQASVSDPMNALQSLTGGPAAGAAGIGMPPRGPGQSLGGMGSLGAMGQPMSLSGQPPPGTSGMAPHSMAVVSTATPQTQLQLQQVALQQQQQQQQFQQQQQAALQQQQQQQQQQQFQAQQSAMQQQFQAVVQQQQQLQQQQQQQQHLIKLHHQNQQQIQQQQQQLQRIAQLQLQQQQQQQQQQQQQQQQALQAQPPIQQPPMQQPQPPPSQALPQQLQQMHHTQHHQPPPQPQQPPVAQNQPSQLPPQSQTQPLVSQAQALPGQMLYTQPPLKFVRAPMVVQQPPVQPQVQQQQTAVQTAQAAQMVAPGVQVSQSSLPMLSSPSPGQQVQTPQSMPPPPLLAVFLPASQXR

SEQ ID NO: 861469 - protein, 404 aa, Homo sapiens
AAPARRAAPARRWDHSEDAMRKAGVAHSKSSKDMESHVFLKAKTRDEYLSLVARLIIHFRDIHNKKSQASVSDPMNALQSLTGGPAAGAAGIGMPPRGPGQSLGGMGSLGAMGQPMSLSGQPPPGTSGMAPHSMAVVSTATPQTQLQLQQVALQQQQQQQQFQQQQQAALQQQQQQQQQQQFQAQQSAMQQQFQAVVQQQQQLQQQQQQQQHLIKLHHQNQQQIQQQQQQLQRIAQLQLQQQQQQQQQQQQQQQQALQAQPPIQQPPMQQPQPPPSQALPQQLQQMHHTQHHQPPPQPQQPPVAQNQPSQLPPQSQTQPLVSQAQALPGQMLYTQPPLKFVRAPMVVQQPPVQPQVQQQQTAVQTAQAAQMVAPGVQMITEALAQGGMHIRARFPPTTAVSAIS

SEQ ID NO: 861470 - protein, 602 aa, Homo sapiens
PQRTQVHTCMAEPGSGPRCLTLSSSPLPGALVWADASATMGVCVAPWATSLQLSRSRWDSLGPALQQHVLTTTDGCSHQACPWCSQPGGCGGLWKHVGRRSHWSAEQGPHRPTEEHVTGQAGVSGKARLVPAKGIASQTALFLTLPRHSPQSLCPCGSLAKEQGLPCLGPPRQPLGHLMLCARLGECACVYVQVAFGGRHRCVVRLCGRMGLCVRWAGGVEAGGRACGSAPAEPLHFQVSQSSLPMLSSPSPGQQVQTPQSMPPPPQPSPQPGQPSSQPNSNVSSGPAPSPSSFLPSPSPQPSQSPVTARTPQNFSVPSPGPLNTPVNPSSVMSPAGSSQAEEQQYLDKLKQLSKYIEPLRRMINKIDKNEDRKKDLSKMKSLLDILTDPSKRCPLKTLQKCEIALEKLKNDMAVPTPPPPPVPPTKQQYLCQPLLDAVLANIRSPVFNHSLYRTFVPAMTAIHGPPITAPVVCTRKRRLEDDERQSIPSVLQGEVARLDPKFLVNLDPSHCSNNGTVHLICKLDDKDLPSVPPLELSVPADYPAQSPLWIDRQWQYDANPFLQSVHRCMTSRLLQLPDKHSVTALLNTWAQSVHQACLSAA

SEQ ID NO: 861471 - protein, 781 aa, Homo sapiens
AAPARRAAPARRWDHSEDAMRKAGVAHSKSSKDMESHVFLKAKTRDEYLSLVARLIIHFRDIHNKKSQASVSDPMNALQSLTGGPAAGAAGIGMPPRGPGQSLGGMGSLGAMGQPMSLSGQPPPGTSGMAPHSMAVVSTATPQTQLQLQQVALQQQQQQQQFQQQQQAALQQQQQQQQQQQFQAQQSAMQQQFQAVVQQQQQLQQQQQQQQHLIKLHHQNQQQIQQQQQQLQRIAQLQLQQQQQQQQQQQQQQQQALQAQPPIQQPPMQQPQPPPSQALPQQLQQMHHTQHHQPPPQPQQPPVAQNQPSQLPPQSQTQPLVSQAQALPGQMLYTQPPLKFVRAPMVVQQPPVQPQVQQQQTAVQTAQAAQMVAPGVQMITEALAQGGMHIRARFPPTTAVSAIPSSSIPLGRQPMAQVSQSSLPMLSSPSPGQQVQTPQSMPPPPQPSPQPGQPSSQPNSNVSSGPAPSPSSFLPSPSPQPSQSPVTARTPQNFSVPSPGPLNTPVNPSSVMSPAGSSQAEEQQYLDKLKQLSKYIEPLRRMINKIDKNEDRKKDLSKMKSLLDILTDPSKRCPLKTLQKCEIALEKLKNDMAVPTPPPPPVPPTKQQYLCQPLLDAVLANIRSPVFNHSLYRTFVPAMTAIHGPPITAPVVCTRKRRLEDDERQSIPSVLQGEVARLDPKFLVNLDPSHCSNNGTVHLICKLDDKDLPSVPPLELSVPADYPAQSPLWIDRQWQYDANPFLQSVHRCMTSRLLQLPDKHSVTALLNTWAQSVHQACLSAA

SEQ ID NO: 861472 - protein, 741 aa, Homo sapiens; identical to SEQ ID NO: 861463

SEQ ID NO: 861473 - protein, 741 aa, Homo sapiens; identical to SEQ ID NO: 861463

SEQ ID NO: 861474 - protein, 741 aa, Homo sapiens; identical to SEQ ID NO: 861463

SEQ ID NO: 861475 - protein, 894 aa, Homo sapiens
AAPARRAAPARRWDHSEDAMRKAGVAHSKSSKDMESHVFLKAKTRDEYLSLVARLIIHFRDIHNKKSQASVSDPMNALQSLTGGPAAGAAGIGMPPRGPGQSLGGMGSLGAMGQPMSLSGQPPPGTSGMAPHSMAVVSTATPQTQLQLQQVALQQQQQQQQFQQQQQAALQQQQQQQQQQQFQAQQSAMQQQFQAVVQQQQQLQQQQQQQQHLIKLHHQNQQQIQQQQQQLQRIAQLQLQQQQQQQQQQQQQQQQALQAQPPIQQPPMQQPQPPPSQALPQQLQQMHHTQHHQPPPQPQQPPVAQNQPSQLPPQSQTQPLVSQAQALPGQMLYTQPPLKFVRAPMVVQQPPVQPQVQQQQTAVQTAQAAQMVAPGVQVSQSSLPMLSSPSPGQQVQTPQSMPPPPQPSPQPGQPSSQPNSNVSSGPAPSPSSFLPSPSPQPSQSPVTARTPQNFSVPSPGPLNTPVNPSSVMSPAGSSQAEEQQYLDKLKQLSKYIEPLRRMINKIDKNEDRKKDLSKMKSLLDILTDPSKRCPLKTLQKCEIALEKLKNDMAVPTPPPPPVPPTKQQYLCQPLLDAVLANIRSPVFNHSLYRTFVPAMTAIHGPPITAPVVCTRKRRLEDDERQSIPSVLQGEVARLDPKFLVNLDPSHCSNNGTVHLICKLGECPEGRDWCGKAGPDRSPRTLPSKPDGTAPRTHPVFTPRQAVCSILTHTGLQTACHASVPTARARTLSPPQHRCGFACLGPREVVGRTSGHPSMQSTPGFTFGNLRVRETSSRLCHKLHQNLPGCGVLFQSRAVRQGRPGLVQVTDRAFCVADDKDLPSVPPLELSVPADYPAQSPLWIDRQWQYDANPFLQSVHRCMTSRLLQLPDKHSVTALLNTWAQSVHQACLSAA

SEQ ID NO: 861476 - protein, 741 aa, Homo sapiens; identical to SEQ ID NO: 861463

SEQ ID NO: 861477 - protein, 386 aa, Homo sapiens
AAPARRAAPARRWDHSEDAMRKAGVAHSKSSKDMESHVFLKAKTRDEYLSLVARLIIHFRDIHNKKSQASVSDPMNALQSLTGGPAAGAAGIGMPPRGPGQSLGGMGSLGAMGQPMSLSGQPPPGTSGMAPHSMAVVSTATPQTQLQLQQVALQQQQQQQQFQQQQQAALQQQQQQQQQQQFQAQQSAMQQQFQAVVQQQQQLQQQQQQQQHLIKLHHQNQQQIQQQQQQLQRIAQLQLQQQQQQQQQQQQQQQQALQAQPPIQQPPMQQPQPPPSQALPQQLQQMHHTQHHQPPPQPQQPPVAQNQPSQLPPQSQTQPLVSQAQALPGQMLYTQPPLKFVRAPMVVQQPPVQPQVQQQQTAVQTAQAAQMVAPGVQVRAWGWRAP

SEQ ID NO: 861478 - protein, 104 aa, Homo sapiens
MIGNPKINTNATSYSIFLSVVNGTFRFQRQPWQWGFCWLFCPLLCSPAAFLGICPVELTGDSGLFSAQLQLQQVALQQQQQQQQFQQQQQAALQQQQQQQQQQQ

SEQ ID NO: 861479 - protein, 199 aa, Homo sapiens
MDALNSMQNFLRGRPKTFKSLENAIEWSVKSGQIRNLESARVSMVGQVKQCEGITSPEGSKSIVEGIIEEEEEDEEGSESISKRKKEDDMETKKDHPYTWRIELAKTEKYWDGWFRGLSNLFLSCPIPKLLLLAGVDRLDKDLTIGQMQGKFQMQVLPQCGHAVHEDAPDKVAEAVATFLIRHRFAEPIGGFQCVFPGC

SEQ ID NO: 861480 - protein, 138 aa, Homo sapiens
MSALEKSMHLGRLPSRPPLPGSGGSQSGAKMRMGPGRKRDFSPVPWSQYFESMEDVEVENETGKDTFRVYKSGSEGPVLLLLHGGGHSALSWAVFTDKLCDLSISTRLCHVSGPVLSNRNRVQTTYVILNFLVDTLNR

SEQ ID NO: 861481 - protein, 386 aa, Homo sapiens; identical to SEQ ID NO: 792910

SEQ ID NO: 861482 - protein, 390 aa, Homo sapiens
MSALEKSMHLGRLPSRPPLPGSGGSQSGAKMRMGPGRKRDFSPVPWSQYFESMEDVEVENETGKDTFRVYKSGSEGPVLLLLHGGGHSALSWAVFTQRLISTSSVEDSYASDLRQLMVKQRSNTSCHDLPAQTMATRRLRTAADAMYGDLPPPIMLIGHSMGGAIAVHTASSNLVPSLLGLCMIDVVEGTAMDALNSMQNFLRGRPKTFKSLENAIEWSVKSGQIRNLESARVSMVGQVKQCEGITSPEGSKSIVEGIIEEEEEDEEGSESISKRKKEDDMETKKDHPYTWRIELAKTEKYWDGWFRGLSNLFLSCPIPKLLLLAGVDRLDKDLTIGQMQGKFQMQVLPQCGHAVHEDAPDKVAEAVATFLIRHRFAEPIGGFQCVFPGC

SEQ ID NO: 861483 - protein, 386 aa, Homo sapiens; identical to SEQ ID NO: 792910

SEQ ID NO: 861484 - protein, 260 aa, Homo sapiens
MSALEKSMHLGRLPSRPPLPGSGGSQSGAKMRMGPGRKRDFSPVPWSQYFESMEDVEVENETGKDTFRVYKSGSEGPVLLLLHGGGHSALSWAVFTAAIISRVQCRIVALDLRSHGETKVKNPEDLSAETMAKDVGNVVEAMYGDLPPPIMLIGHSMGGAIAVHTASSNLVPSLLGLCMIDVVEGTAMDALNSMQNFLRGRPKTFKSLENAIEWSVKSGQIRNLESARVSMVGQVKQGSPAPFPSLYWGSSCLLSLRCLG

SEQ ID NO: 861485 - protein, 451 aa, Homo sapiens
  misc_feature (410)..(410): Xaa can be any naturally occurring amino acid
MSALEKSMHLGRLPSRPPLPGSGGSQSGAKMRMGPGRKRDFSPVPWSQYFESMEDVEVENETGKDTFRVYKSGSEGPVLLLLHGGGHSALSWAVFTAAIISRVQCRIVALDLRSHGETKVKNPEDLSAETMAKDVGNVVEAMYGDLPPPIMLIGHSMGGAIAVHTASSNLVPSLLGLCMIDVVEGTAMDALNSMQNFLRGRPKTFKSLENAIEWSVKSGQIRNLESARVSMVGQVKQCEGITSPEGSKSIVEGIIEEEEEDEEGSESISKRKKEDDMETKKDHPYTWRIELAKTEKYWDGWFRGLSNLFLSCPIPKLLLLAGVDRLDKDLTIGQMQGKFQMQVLPQCGHAVHEDAPDKVAEAVATFLIRHRFAEPIGGFQCVLSMSCLSDTACSNPLRTSIGDSCMYTYXSQTKKAHVVIAHLFITLPSRAEPMLNTWTHLVMTGAPPRGM

SEQ ID NO: 861486 - protein, 106 aa, Homo sapiens
MSALEKSMHLGRLPSRPPLPGSGGSQSGAKMRMGPGRKRDFSPVPWSQYFESMEDVEVENCLDPGGKGCSEWRSCMPLHSSLGDKSKILSQTKQNKTNKKLLTRIF

SEQ ID NO: 861487 - protein, 125 aa, Homo sapiens
MRTSGGSAEASGWSLRSRWAVGGATGSWVLSKGDRASLGERVVTGWATLNVGRSFAYCLTTCVQPPLDVGPRKEHAPRPPSLSPTSTRQRGQSERSQDANGVRDPYPFSLWARPQPLENGISGRS

SEQ ID NO: 861488 - protein, 334 aa, Homo sapiens
DGSESVSWSSLLPGLKSRRSYPIQALLLLLHGGGHSALSWAVFTAAIISRVQCRIVALDLRSHGETKVKNPEDLSAETMAKDVGNVVEAMYGDLPPPIMLIGHSMGGAIAVHTASSNLVPSLLGLCMIDVVEGTAMDALNSMQNFLRGRPKTFKSLENAIEWSVKSGQIRNLESARVSMVGQVKQCEGITSPEGSKSIVEGIIEEEEEDEEGSESISKRKKEDDMETKKDHPYTWRIELAKTEKYWDGWFRGLSNLFLSCPIPKLLLLAGVDRLDKDLTIGQMQGKFQMQVLPQCGHAVHEDAPDKVAEAVATFLIRHRFAEPIGGFQCVFPGC

SEQ ID NO: 861489 - protein, 386 aa, Homo sapiens; identical to SEQ ID NO: 792910

SEQ ID NO: 861490 - protein, 386 aa, Homo sapiens; identical to SEQ ID NO: 792910

SEQ ID NO: 861491 - protein, 341 aa, Homo sapiens
MSALEKSMHLGRLPSRPPLPGSGGSQSGAKMRMGPGRKRDFSPVPWSQYFESMEDVEVENETGKDTFRVYKSGSEGPVLLLLHGGGHSALSWAVFTAAIISRVQCRIVALDLRSHGETKVKNPEDLSAETMAKDVGNVVEAMYGDLPPPIMLIGHSMGGAIAVHTASSNLVPSLLGLCMIDVVEGTAMDALNSMQNFLRGRPKTFKSLENAIEWSVKSGQIRNLESARVSMVGQVKQCEGITSPEGSKSIVEGIIEEEEEDEEGSESISKRKKEDDMERAMCLMLLSVARAFLSMVVRTEEVAGFRWPDLRLLTTTTPLPSDDDLNAHSLAVNQSGVAKGI

SEQ ID NO: 861492 - protein, 914 aa, Homo sapiens
MSQSQNAIFTSPTGEENLMNSNHRDSESITDVCSNEDLPEVELVSLLEEQLPQYRLKVDTLFLYENQDWTQSPHQRQHASDALSPVLAEETFRYMILGTDRVEQMTKTYNDIDMVTHLLAERDRDLELAARIGQALLKRNHVLSEQNESLEEQLGQAFDQVNQLQHELCKKDELLRIVSIASEESETDSSCSTPLRFNESFSLSQGLLQLEMLQEKLKELEEENMALRSKACHIKTETVTYEEKEQQLVSDCVKELRETNAQMSRMTEELSGKSDELIRYQEELSSLLSQIVDLQHKLKEHVIEKEELKLHLQASKDAQRQLTMELHELQDRNMECLGMLHESQEEIKELRSRSGPTAHLYFSQSYGAFTGESLAAEIEGTMRKKLSLDEESSLFKQKAQQKRVFDTVRIANDTRGRSISFPALLPIPGSNRSSVIMTAKPFESGLQQTEDKSLLNQGSSSEEVAGSSQKMGQPGPSGDSDLATALHRLSLRRQNYLSEKQFFAEEWQRKIQVLADQKEGVSGCVTPTESLASLCTTQSEITDLSSASCLRGFMPEKLQIVKPLEGSQTLYHWQQLAQPNLGTILDPRPGVITKGFTQLPGDAIYHISDLEEDEEEGITFQVQQPLEVEEKLSTSKPVTGIFLPPITSAGGPVTVATANPGKCLSCTNSTFTFTTCRILHPSDITQVTPSSGFPSLSCGSSGSSSSNTAVNSPALSYRLSIGESITNRRDSTTTFSSTMSLAKLLQERGISAKVYHSPISENPLQPLPKSLAIPSTPPNSPSHSPCPSPLPFEPRVHLSENFLASRPAETFLQEMYGLRPSRNPPDVGQLKMNLVDRLKRLGIARVVKNPGAQENGRCQEAEIGPQKPDSAVYLNSGSSLLGGLRRNQSLPVIMGSFAAPVCTSSPKMGVLKED

SEQ ID NO: 861493 - protein, 361 aa, Homo sapiens [sequence omitted]

SEQ ID NO: 861494 - protein, 914 aa, Homo sapiens; identical to SEQ ID NO: 861492

SEQ ID NO: 861495 - protein, 664 aa, Homo sapiens
MSQSQNAIFTSPTGEENLMNSNHRDSESITDVCSNEDLPEVELVSLLEEQLPQYRLKVDTLFLYENQDWTQSPHQRQHASDALSPVLAEETFRYMILGTDRVEQMTKTYNDIDMVTHLLAERDRDLELAARIGQALLKRNHVLSEQNESLEEQLGQAFDQVNQLQHELCKKDELLRIVSIASEESETDSSCSTPLRFNESFSLSQGLLQLEMLQEKLKELEEENMALRSKACHIKTETVTYEEKEQQLVSDCVKELRETNAQMSRMTEELSGKSDELIRYQEELSSLLSQIVDLQHKLKEHVIEKEELKLHLQASKDAQRQLTMELHELQDRNMECLGMLHESQEEIKELRSRSGPTAHLYFSQSYGAFTGESLAAEIEGTMRKKLSLDEESSLFKQKAQQKRVFDTVRIANDTRGRSISFPALLPIPGSNRSSVIMTAKPFESGLQQTEDKSLLNQGSSSEEVAGSSQKMGQPGPSGDSDLATALHRLSLRRQNYLSEKQFFAEEWQRKIQVLADQKEGVSGCVTPTESLASLCTTQSEITDLSSASCLRGFMPEKLQIVKPLEGSQTLYHWQQLAQPNLGTILDPRPGVITKGFTQLPGDAIYHISDLEEDEEEGITFQVQQPLEVEEKLSTSKPVTGIFLPPITSAGGPVTGEKSVWLNMV

SEQ ID NO: 861496 - protein, 176 aa, Homo sapiens [sequence omitted]

SEQ ID NO: 861497 - protein, 914 aa, Homo sapiens; identical to SEQ ID NO: 861492

SEQ ID NO: 861498 - protein, 1158 aa, Homo sapiens
GTHIGWRGASGGSFSRVGEGTGLQEGSNNSSPVDFVNNKRTDLSSEHFSHSSKWLETCQHESDEQPLDPIPQISSTPKTSEEAVDPLGNYMVKTIVLVPSPLGQQQDMIFEARLDTMAETNSISLNGPLRTDDLVREEVAPCMGDRFSEVAAVSEKPIFQESPSHLLEESPPNPCSEQLHCSKESLSSRTEAVREDLVPSESNAFLPSSVLWLSPSTALAADFRVNHVDPEEEIVEHGAMEEREMRFPTHPKESETEDQALVSSVEDILSTCLTPNLVEMESQEAPGPAVEDVGRILGSDTESWMSPLAWLEKGVNTSVMLENLRQSLSLPSMLRDAAIGTTPFSTCSVGTWFTPSAPQEKSTNTSQTGLVGTKHSTSETEQLLCGRPPDLTALSRHDLEDNLLSSLVILEVLSRQLRDWKSQLAVPHPETQDSSTQTDTSHSGITNKLQHLKESHEMGQALQQARNVMQSWVLISKELISLLHLSLLHLEEDKTTVSQESRRAETLVCCCFDLLKKLRAKLQSLKAEREEARHREEMALRGKDAAEIVLEAFCAHASQRISQLEQDLASMREFRGLLKDAQTQLVGLHAKQEELVQQTVSLTSTLQQDWRSMQLDYTTWTALLSRSRQLTEKLTVKSQQALQERDVAIEEKQEVSRVLEQVSAQLEECKGQTEQLELENSRLATDLRAQLQILANMDSQLKELQSQHTHCAQDLAMKDELLCQLTQSNEEQAAQWQKEEMALKHMQAELQQQQAVLAKEVRDLKETLEFADQENQVAHLELGQVECQLKTTLEVLRERSLQCENLKDTVENLTAKLASTIADNQEQDLEKTRQYSQKLGLLTEQLQSLTLFLQTKLKEKTEQETLLLSTACPPTQEHPLPNDRTFLGSILTAVADEEPESTPVPLLGSDKSAFTRVASMVSLQPAETPGMEESLAEMSIMTTELQSLCSLLQESKEEAIRTLQRKICELQARLQAQEEQHQEVQKAKEADIEKLNQALCLRYKNEKELQEVIQQQNEKILEQIDKSGELISLREEVTHLTRSLRRAETETKVLQEALAGQLDSNCQPMATNWIQEKVWLSQEVDKLRVMFLEMKNEKEKLMIKFQSHRNILEENLRRSDKELEKLDDIVQHIYKTLLSIPEVVRGCKELQGLLEFLS

SEQ ID NO: 861499 - protein, 1208 aa, Homo sapiens
MWRVKKLSLSLSPSPQTGKPSMRTPLRELTLQPGALTNSGKRSPACSSLTPSLCKLGLQEGSNNSSPVDFVNNKRTDLSSEHFSHSSKWLETCQHESDEQPLDPIPQISSTPKTSEEAVDPLGNYMVKTIVLVPSPLGQQQDMIFEARLDTMAETNSISLNGPLRTDDLVREEVAPCMGDRFSEVAAVSEKPIFQESPSHLLEESPPNPCSEQLHCSKESLSSRTEAVREDLVPSESNAFLPSSVLWLSPSTALAADFRVNHVDPEEEIVEHGAMEEREMRFPTHPKESETEDQALVSSVEDILSTCLTPNLVEMESQEAPGPAVEDVGRILGSDTESWMSPLAWLEKGVNTSVMLENLRQSLSLPSMLRDAAIGTTPFSTCSVGTWFTPSAPQEKSTNTSQTGLVGTKHSTSETEQLLCGRPPDLTALSRHDLEDNLLSSLVILEVLSRQLRDWKSQLAVPHPETQDSSTQTDTSHSGITNKLQHLKESHEMGQALQQARNVMQSWVLISKELISLLHLSLLHLEEDKTTVSQESRRAETLVCCCFDLLKKLRAKLQSLKAEREEARHREEMALRGKDAAEIVLEAFCAHASQRISQLEQDLASMREFRGLLKDAQTQLVGLHAKQEELVQQTVSLTSTLQQDWRSMQLDYTTWTALLSRSRQLTEKLTVKSQQALQERDVAIEEKQEVSRVLEQVSAQLEECKGQTEQLELENSRLATDLRAQLQILARRSATDLRAQLQILANMDSQLKELQSQHTHCAQDLAMKDELLCQLTQSNEEQAAQWQKEEMALKHMQAELQQQQAVLAKEVRDLKETLEFADQENQVAHLELGQVECQLKTTLEVLRERSLQCENLKDTVENLTAKLASTIADNQEQDLEKTRQYSQKLGLLTEQLQSLTLFLQTKLKEKTEQETLLLSTACPPTQEHPLPNDRTFLGSILTAVADEEPESTPVPLLGSDKSAFTRVASMVSLQPAETPGMEESLAEMSIMTTELQSLCSLLQESKEEAIRTLQRKICELQARLQAQEEQHQEVQKAKEADIEKLNQALCLRYKNEKELQEVIQQQNEKILEQIDKSGELISLREEVTHLTRSLRRAETETKVLQEALAGQLDSNCQPMATNWIQEKVWLSQEVDKLRVMFLEMKNEKEKLMIKFQSHRNILEENLRRSDKELEKLDDIVQHIYKTLLSIPEVVRGCKELQGLLEFLS

SEQ ID NO: 861500 - protein, 1193 aa, Homo sapiens
MWRVKKLSLSLSPSPQTGKPSMRTPLRELTLQPGALTNSGKRSPACSSLTPSLCKLGLQEGSNNSSPVDFVNNKRTDLSSEHFSHSSKWLETCQHESDEQPLDPIPQISSTPKTSEEAVDPLGNYMVKTIVLVPSPLGQQQDMIFEARLDTMAETNSISLNGPLRTDDLVREEVAPCMGDRFSEVAAVSEKPIFQESPSHLLEESPPNPCSEQLHCSKESLSSRTEAVREDLVPSESNAFLPSSVLWLSPSTALAADFRVNHVDPEEEIVEHGAMEEREMRFPTHPKESETEDQALVSSVEDILSTCLTPNLVEMESQEAPGPAVEDVGRILGSDTESWMSPLAWLEKGVNTSVMLENLRQSLSLPSMLRDAAIGTTPFSTCSVGTWFTPSAPQEKSTNTSQTGLVGTKHSTSETEQLLCGRPPDLTALSRHDLEDNLLSSLVILEVLSRQLRDWKSQLAVPHPETQDSSTQTDTSHSGITNKLQHLKESHEMGQALQQARNVMQSWVLISKELISLLHLSLLHLEEDKTTVSQESRRAETLVCCCFDLLKKLRAKLQSLKAEREEARHREEMALRGKDAAEIVLEAFCAHASQRISQLEQDLASMREFRGLLKDAQTQLVGLHAKQEELVQQTVSLTSTLQQDWRSMQLDYTTWTALLSRSRQLTEKLTVKSQQALQERDVAIEEKQEVSRVLEQVSAQLEECKGQTEQLELENSRLATDLRAQLQILANMDSQLKELQSQHTHCAQDLAMKDELLCQLTQSNEEQAAQWQKEEMALKHMQAELQQQQAVLAKEVRDLKETLEFADQENQVAHLELGQVECQLKTTLEVLRERSLQCENLKDTVENLTAKLASTIADNQEQDLEKTRQYSQKLGLLTEQLQSLTLFLQTKLKEKTEQETLLLSTACPPTQEHPLPNDRTFLGSILTAVADEEPESTPVPLLGSDKSAFTRVASMVSLQPAETPGMEESLAEMSIMTTELQSLCSLLQESKEEAIRTLQRKICELQARLQAQEEQHQEVQKAKEADIEKLNQALCLRYKNEKELQEVIQQQNEKILEQIDKSGELISLREEVTHLTRSLRRAETETKVLQEALAGQLDSNCQPMATNWIQEKVWLSQEVDKLRVMFLEMKNEKEKLMIKFQSHRNILEENLRRSDKELEKLDDIVQHIYKTLLSIPEVVRGCKELQGLLEFLS

SEQ ID NO: 861501 - protein, 1171 aa, Homo sapiens
MWRVKKLSLSLSPSPQTGKPSMRTPLRELTLQPGALTNSGKRSPACSSLTPSLCKLGLQEGSNNSSPVDFVNNKRTDLSSEHFSHSSKWLETCQHESDEQPLDPIPQISSTPKTSEEAVDPLGNYMVKTIVLVPSPLGQQQDMIFEARLDTMAETNSISLNGPLRTDDLVREEVAPCMGDRFSEVAAVSEKPIFQESPSHLLEESPPNPCSEQLHCSKESLSSRTEAVREDLVPSESNAFLPSSVLWLSPSTALAADFRVNHVDPEEEIVEHGAMEEREMRFPTHPKESETEDQALVSSVEDILSTCLTPNLVEMESQEAPGPAVEDVGRILGSDTESWMSPLAWLEKGVNTSVMLENLRQSLSLPSMLRDAAIGTTPFSTCSVGTWFTPSAPQEKSTNTSQTGLVGTKHSTSETEQLLCGRPPDLTALSRHDLEDNLLSSLVILEVLSRQLRDWKSQLAVPHPETQDSSTQTDTSHSGITNKLQHLKESHEMGQALQQARNVMQSWVLISKELISLLHLSLLHLEEDKTTVSQESRRAETLVCCCFDLLKKLRAKLQSLKAEREEARHREEMALRGKDAAEIVLEAFCAHASQRISQLEQDLASMREFRGLLKDAQTQLVGLHAKQEELVQQTVSLTSTLQQDWRSMQLDYTTWTALLSRSRQLTEKLTVKSQQALQERDVAIEEKQEVSRVLEQVSAQLEECKGQTEQLELENSRLATDLRAQLQILANMDSQLKELQSQHTHCAQDLAMKDELLCQLTQSNEEQAAQWQKEEMALKHMQAELQQQQAVLAKEVRDLKETLEFADQENQVAHLELGQVECQLKTTLEVLRERSLQCENLKDTVENLTAKLASTIADNQEQDLEKTRQYSQKLGLLTEQLQSLTLFLQTKLKEKTEQETLLLSTACPPTQEHPLPNDRTFLGSILTAVADEEPESTPVPLLGSDKSAFTRVASMVSLQPAETPGMEESLAEMSIMTTELQSLCSLLQESKEEAIRTLQRKICELQARLQAQEEQHQEVQKAKEADIEKLNQALCLRYKNEKELQEVIQQQNEKILEQIDKSGELISLREEVTHLTRSLRRAETETKVLQEALAGQLDSNCQPMATNWIQEKVWLSQEVDKLRVMFLEMKNEKEKLMIKFQSHRNILEENLRRSDKELEKLDDIVQHIYKV

SEQ ID NO: 861502 - protein, 1122 aa, Homo sapiens
MWRVKKLSLSLSPSPQTGKPSMRTPLRELTLQPGALTNSGKRSPACSSLTPSLCKLGLQEGSNNSSPVDFVNNKRTDLSSEHFSHSSKWLETCQHESDEQPLDPIPQISSTPKTSEEAVDPLGNYMVKTIVLVPSPLGQQQDMIFEARLDTMAETNSISLNGPLRTDDLVREEVAPCMGDRFSEVAAVSEKPIFQESPSHLLEESPPNPCSEQLHCSKESLSSRTEAVREDLVPSESNAFLPSSVLWLSPSTALAADFRVNHVDPEEEIVEHGAMEEREMRFPTHPKESETEDQALVSSVEDILSTCLTPNLVEMESQEAPGPAVEDVGRILGSDTESWMSPLAWLEKGVNTSVMLENLRQSLSLPSMLRDAAIGTTPFSTCSVGTWFTPSAPQEKSTNTSQTGLVGTKHSTSETEQLLCGRPPDLTALSRHDLEDNLLSSLVILEVLSRQLRDWKSQLAVPHPETQDSSTQTDTSHSGITNKLQHLKESHEMGQALQQARNVMQSWVLISKELISLLHLSLLHLEEDKTTVSQESRRAETLVCCCFDLLKKLRAKLQSLKAEREEARHREEMALRGKDAAEIVLEAFCAHASQRISQLEQDLASMREFRGLLKDAQTQLVGLHAKQEELVQQTVSLTSTLQQDWRSMQLDYTTWTALLSRSRQLTEKLTVKSQQALQERDVAIEEKQEVSRVLEQVSAQLEECKGQTEQLELENSRLATDLRAQLQILANMDSQLKELQSQHTHCAQDLAMKDELLCQLTQSNEEQAAQWQKEEMALKHMQAELQQQQAVLAKEVRDLKETLEFADQENQVAHLELGQVECQLKTTLEVLRERSLQCENLKDTVENLTAKLASTIADNQEQDLEKTRQYSQKLGLLTEQLQSLTLFLQTKLKEKTEQETLLLSTACPPTQEHPLPNDRTFLGSILTAVADEEPESTPVPLLGSDKSAFTRVASMVSLQPAETPGMEESLAEMSIMTTELQSLCSLLQESKEEAIRTLQRKICELQARLQAQEEQHQEVQKAKEADIEKLNQALCLRYKNEKELQEVIQQQNEKILEQIDKSGELISLREEVTHLTRSLRRAETETKVLQEALAGQLDSNCQPMATNWIQEKVWLSQEVTQS

SEQ ID NO: 861503 - protein, 1122 aa, Homo sapiens; identical to SEQ ID NO: 861502

SEQ ID NO: 861504 - protein, 919 aa, Homo sapiens
MEEREMRFPTHPKESETEDQALVSSVEDILSTCLTPNLVEMESQEAPGPAVEDVGRILGSDTESWMSPLAWLEKGVNTSVMLENLRQSLSLPSMLRDAAIGTTPFSTCSVGTWFTPSAPQEKSTNTSQTGLVGTKHSTSETEQLLCGRPPDLTALSRHDLEDNLLSSLVILEVLSRQLRDWKSQLAVPHPETQDSSTQTDTSHSGITNKLQHLKESHEMGQALQQARNVMQSWVLISKELISLLHLSLLHLEEDKTTVSQESRRAETLVCCCFDLLKKLRAKLQSLKAEREEARHREEMALRGKDAAEIVLEAFCAHASQRISQLEQDLASMREFRGLLKDAQTQLVGLHAKQEELVQQTVSLTSTLQQDWRSMQLDYTTWTALLSRSRQLTEKLTVKSQQALQERDVAIEEKQEVSRVLEQVSAQLEECKGQTEQLELENSRLATDLRAQLQILANMDSQLKELQSQHTHCAQDLAMKDELLCQLTQSNEEQAAQWQKEEMALKHMQAELQQQQAVLAKEVRDLKETLEFADQENQVAHLELGQVECQLKTTLEVLRERSLQCENLKDTVENLTAKLASTIADNQEQDLEKTRQYSQKLGLLTEQLQSLTLFLQTKLKEKTEQETLLLSTACPPTQEHPLPNDRTFLGSILTAVADEEPESTPVPLLGSDKSAFTRVASMVSLQPAETPGMEESLAEMSIMTTELQSLCSLLQESKEEAIRTLQRKICELQARLQAQEEQHQEVQKAKEADIEKLNQALCLRYKNEKELQEVIQQQNEKILEQIDKSGELISLREEVTHLTRSLRRAETETKVLQEALAGQLDSNCQPMATNWIQEKVWLSQEVDKLRVMFLEMKNEKEKLMIKFQSHRNILEENLRRSDKELEKLDDIVQHIYKTLLSIPEVVRGCKELQGLLEFLS

SEQ ID NO: 861505 - protein, 894 aa, Homo sapiens
MEEREMRFPTHPKESETEDQALVSSVEDILSTCLTPNLVEMESQEAPGPAVEDVGRILGSDTESWMSPLAWLEKGVNTSVMLENLRQSLSLPSMLRDAAIGTTPFSTCSVGTWFTPSAPQEKSTNTSQTGLVGTKHSTSETEQLLCGRPPDLTALSRHDLEDNLLSSLVILEVLSRQLRDWKSQLAVPHPETQDSSTQTDTSHSGQSWVLISKELISLLHLSLLHLEEDKTTVSQESRRAETLVCCCFDLLKKLRAKLQSLKAEREEARHREEMALRGKDAAEIVLEAFCAHASQRISQLEQDLASMREFRGLLKDAQTQLVGLHAKQEELVQQTVSLTSTLQQDWRSMQLDYTTWTALLSRSRQLTEKLTVKSQQALQERDVAIEEKQEVSRVLEQVSAQLEECKGQTEQLELENSRLATDLRAQLQILANMDSQLKELQSQHTHCAQDLAMKDELLCQLTQSNEEQAAQWQKEEMALKHMQAELQQQQAVLAKEVRDLKETLEFADQENQVAHLELGQVECQLKTTLEVLRERSLQCENLKDTVENLTAKLASTIADNQEQDLEKTRQYSQKLGLLTEQLQSLTLFLQTKLKEKTEQETLLLSTACPPTQEHPLPNDRTFLGSILTAVADEEPESTPVPLLGSDKSAFTRVASMVSLQPAETPGMEESLAEMSIMTTELQSLCSLLQESKEEAIRTLQRKICELQARLQAQEEQHQEVQKAKEADIEKLNQALCLRYKNEKELQEVIQQQNEKILEQIDKSGELISLREEVTHLTRSLRRAETETKVLQEALAGQLDSNCQPMATNWIQEKVWLSQEVDKLRVMFLEMKNEKEKLMIKFQSHRNILEENLRRSDKELEKLDDIVQHIYKTLLSIPEVVRGCKELQGLLEFLS

SEQ ID NO: 861506 - protein, 520 aa, Homo sapiens
MWRVKKLSLSLSPSPQTGKPSMRTPLRELTLQPGALTNSGKRSPACSSLTPSLCKLGLQEGSNNSSPVDFVNNKRTDLSSEHFSHSSKWLETCQHESDEQPLDPIPQISSTPKTSEEAVDPLGNYMVKTIVLVPSPLGQQQDMIFEARLDTMAETNSISLNGPLRTDDLVREEVAPCMGDRFSEVAAVSEKPIFQESPSHLLEESPPNPCSEQLHCSKESLSSRTEAVREDLVPSESNAFLPSSVLWLSPSTALAADFRVNHVDPEEEIVEHGAMEEREMRFPTHPKESETEDQALVSSVEDILSTCLTPNLVEMESQEAPGPAVEDVGRILGSDTESWMSPLAWLEKGVNTSVMLENLRQSLSLPSMLRDAAIGTTPFSTCSVGTWFTPSAPQEKSTNTSQTGLVGTKHSTSETEQLLCGRPPDLTALSRHDLEDNLLSSLVILEVLSRQLRDWKSQLAVPHPETQDSSTQTDTSHSGLINFSLPKAPGLQRPAGSLSWLPLFSLTVDQRAACVILKPL

SEQ ID NO: 861507 - protein, 284 aa, Homo sapiens
MWRVKKLSLSLSPSPQTGKPSMRTPLRELTLQPGALTNSGKRSPACSSLTPSLCKLGLQEGSNNSSPVDFVNNKRTDLSSEHFSHSSKWLETCQHESDEQPLDPIPQISSTPKTSEEAVDPLGNYMVKTIVLVPSPLGQQQDMIFEARLDTMAETNSISLNGPLRTDDLVREEVAPCMGDRFSEVAAVSEKPIFQESPSHLLEESPPNPCSEQLHCSKESLSSRTEAVREDLVPSESNAFLPSSVLWLSPSTALAADFRVNHVDPEARTHDEDLSRHRPAEFKL

SEQ ID NO: 861508 - protein, 265 aa, Homo sapiens
MWRVKKLSLSLSPSPQTGKPSMRTPLRELTLQPGALTNSGKRSPACSSLTPSLCKLGLQEGSNNSSPVDFVNNKRTDLSSEHFSHSSKWLETCQHESDEQPLDPIPQISSTPKTSEEAVDPLGNYMVKTIVLVPSPLGQQQDMIFEARVNTSVMLENLRQSLSLPSMLRDAAIGTTPFSTCSVGTWFTPSAPQEKSTNTSQTGLVGTKHSTSETEQLLCGRPPDLTALSRHDLEDNLLSSLVILEVLSRQLRDWKSQLAVPHPPP

SEQ ID NO: 861509 - protein, 45 aa, Homo sapiens
MWRVKKLSLSLSPSPQTVSGRSLAERTGPGCCRGGTGRVYCPGKL

SEQ ID NO: 861510 - protein, 1193 aa, Homo sapiens; identical to SEQ ID NO: 861500

SEQ ID NO: 861511 - protein, 1214 aa, Homo sapiens
RRAQGGQKPPVGRDRPAFWLKMWRVKKLSLSLSPSPQTGKPSMRTPLRELTLQPGALTNSGKRSPACSSLTPSLCKLGLQEGSNNSSPVDFVNNKRTDLSSEHFSHSSKWLETCQHESDEQPLDPIPQISSTPKTSEEAVDPLGNYMVKTIVLVPSPLGQQQDMIFEARLDTMAETNSISLNGPLRTDDLVREEVAPCMGDRFSEVAAVSEKPIFQESPSHLLEESPPNPCSEQLHCSKESLSSRTEAVREDLVPSESNAFLPSSVLWLSPSTALAADFRVNHVDPEEEIVEHGAMEEREMRFPTHPKESETEDQALVSSVEDILSTCLTPNLVEMESQEAPGPAVEDVGRILGSDTESWMSPLAWLEKGVNTSVMLENLRQSLSLPSMLRDAAIGTTPFSTCSVGTWFTPSAPQEKSTNTSQTGLVGTKHSTSETEQLLCGRPPDLTALSRHDLEDNLLSSLVILEVLSRQLRDWKSQLAVPHPETQDSSTQTDTSHSGITNKLQHLKESHEMGQALQQARNVMQSWVLISKELISLLHLSLLHLEEDKTTVSQESRRAETLVCCCFDLLKKLRAKLQSLKAEREEARHREEMALRGKDAAEIVLEAFCAHASQRISQLEQDLASMREFRGLLKDAQTQLVGLHAKQEELVQQTVSLTSTLQQDWRSMQLDYTTWTALLSRSRQLTEKLTVKSQQALQERDVAIEEKQEVSRVLEQVSAQLEECKGQTEQLELENSRLATDLRAQLQILANMDSQLKELQSQHTHCAQDLAMKDELLCQLTQSNEEQAAQWQKEEMALKHMQAELQQQQAVLAKEVRDLKETLEFADQENQVAHLELGQVECQLKTTLEVLRERSLQCENLKDTVENLTAKLASTIADNQEQDLEKTRQYSQKLGLLTEQLQSLTLFLQTKLKEKTEQETLLLSTACPPTQEHPLPNDRTFLGSILTAVADEEPESTPVPLLGSDKSAFTRVASMVSLQPAETPGMEESLAEMSIMTTELQSLCSLLQESKEEAIRTLQRKICELQARLQAQEEQHQEVQKAKEADIEKLNQALCLRYKNEKELQEVIQQQNEKILEQIDKSGELISLREEVTHLTRSLRRAETETKVLQEALAGQLDSNCQPMATNWIQEKVWLSQEVDKLRVMFLEMKNEKEKLMIKFQSHRNILEENLRRSDKELEKLDDIVQHIYKTLLSIPEVVRGCKELQGLLEFLS

SEQ ID NO: 861512 - protein, 1224 aa, Homo sapiens
MWRVKKLSLSLSPSPQTGKPSMRTPLRELTLQPGALTNSGKRSPACSSLTPSLCKLGLQEGSNNSSPVDFVNNKRTDLSSEHFSHSSKWLETCQHESDEQPLDPIPQISSTPKTSEEAVDPLGNYMVKTIVLVPSPLGQQQDMIFEARLDTMAETNSISLNGPLRTDDLVREEVAPCMGDRFSEVAAVSEKPIFQESPSHLLEESPPNPCSEQLHCSKESLSSRTEAVREDLVPSESNAFLPSSVLWLSPSTALAADFRVNHVDPEEEIVEHGAMEEREMRFPTHPKESETEDQALVSSVEDILSTCLTPNLVEMESQEAPGPAVEDVGRILGSDTESWMSPLAWLEKGVNTSVMLENLRQSLSLPSMLRDAAIGTTPFSTCSVGTWFTPSAPQEKSTNTSQTGLVGTKHSTSETEQLLCGRPPDLTALSRHDLEDNLLSSLVILEVLSRQLRDWKSQLAVPHPETQDSSTQTDTSHSGITNKLQHLKESHEMGQALQQARNVMQSWVLISKELISLLHLSLLHLEEDKTTVSQESRRAETLVCCCFDLLKKLRAKLQSLKAEREEARHREEMALRGKDAAEIVLEAFCAHASQRISQLEQDLASMREFRGLLKDAQTQLVGLHAKQEELVQQTVSLTSTLQQDWRSMQLDYTTWTALLSRSRQLTEKLTVKSQQALQERDVAIEEKQEVSRVLEQVSAQLEECKGQTEQLELENSRLATDLRAQLQILANMDSQLKELQSQHTHCAQDLAMKDELLCQLTQSNEEQAAQWQKEEMALKHMQAELQQQQAVLAKEVRDLKETLEFADQENQVAHLELGQVECQLKTTLEVLRERSLQCENLKDTVENLTAKLASTIADNQEQDLEKTRQYSQKLGLLTEQLQSLTLFLQTKLKEKTMFQESRNIAFFGLPAVCTKQEMVDIIQNTKTEQETLLLSTACPPTQEHPLPNDRTFLGSILTAVADEEPESTPVPLLGSDKSAFTRVASMVSLQPAETPGMEESLAEMSIMTTELQSLCSLLQESKEEAIRTLQRKICELQARLQAQEEQHQEVQKAKEADIEKLNQALCLRYKNEKELQEVIQQQNEKILEQIDKSGELISLREEVTHLTRSLRRAETETKVLQEALAGQLDSNCQPMATNWIQEKVWLSQEVDKLRVMFLEMKNEKEKLMIKFQSHRNILEENLRRSDKELEKLDDIVQHIYKTLLSIPEVVRGCKELQGLLEFLS

SEQ ID NO: 861513 - protein, 1172 aa, Homo sapiens
MWRVKKLSLSLSPSPQTGKPSMRTPLRELTLQPGALTNSGKRSPACSSLTPSLCKLGLQEGSNNSSPVDFVNNKRTDLSSEHFSHSSKWLETCQHESDEQPLDPIPQISSTPKTSEEAVDPLGNYMVKTIVLVPSPLGQQQDMIFEARLDTMAETNSISLNGPLRTDDLVREEVAPCMGDRFSEVAAVSEKPIFQESPSHLLEESPPNPCSEQLHCSKESLSSRTEAVREDLVPSESNAFLPSSVLWLSPSTALAADFRVNHVDPEEEIVEHGAMEEREMRFPTHPKESETEDQALVSSVEDILSTCLTPNLVEMESQEAPGPAVEDVGRILGSDTESWMSPLAWLEKGVNTSVMLENLRQSLSLPSMLRDAAIGTTPFSTCSVGTWFTPSAPQEKSTNTSQTGLVGTKHSTSETEQLLCGRPPDLTALSRHDLEDNLLSSLVILEVLSRQLRDWKSQLAVPHPETQDSSTQTDTSHSGITNKLQHLKESHEMGQALQQARNVMQSWVLISKELISLLHLSLLHLEEDKTTVSQESRRAETLVCCCFDLLKKLRAKLQSLKAEREEARHREEMALRGKDAAEIVLEAFCAHASQRISQLEQDLASMREFRGLLKDAQTQLVGLHAKQEELVQQTVSLTSTLQQDWRSMQLDYTTWTALLSRSRQLTEKLTVKSQQALQERDVAIEEKQEVSRVLEQVSAQLEECKGQTEQLELENSRLATDLRAQLQILANMDSQLKELQSQHTHCAQDLAMKDELLCQLTQSNEEQAAQWQKEEMALKHMQAELQQQQAVLAKEVRDLKETLEFADQENQVAHLELGQVECQLKTTLEVLRERSLQCENLKDTVENLTAKLASTIADNQEQDLEKTRQYSQKLGLLTEQLQSLTLFLQTKLKEKTEQETLLLSTACPPTQEHPLPNDRTFLGSILTAVADEEPESTPVPLLGSDKSAFTRVASMVSLQPAETPGMEESLAEMSIMTTELQSLCSLLQESKEEAIRTLQRKICELQARLQAQEEQHQEVQKAKEADIEKLNQALCLRYKNEKELQEVIQQQNEKILEQIDKSGELISLREEVTHLTRSLRRAETETKVLQEALAGQLDSNCQPMATNWIQEKVWLSQEVDKLRVMFLEMKNEKEKLMIKFQSHRNILEENLRRSDKELEKLDDIVQHIYKRW

SEQ ID NO: 861514 - protein, 1122 aa, Homo sapiens; identical to SEQ ID NO: 861502

SEQ ID NO: 861515 - protein, 1216 aa, Homo sapiens
MWRVKKLSLSLSPSPQTGKPSMRTPLRELTLQPGALTNSGKRSPACSSLTPSLCKLGLQEGSNNSSPVDFVNNKRTDLSSEHFSHSSKWLETCQHESDEQPLDPIPQISSTPKTSEEAVDPLGNYMVKTIVLVPSPLGQQQDMIFEARLDTMAETNSISLNGPLRTDDLVREEVAPCMGDRFSEVAAVSEKPIFQESPSHLLEESPPNPCSEQLHCSKESLSSRTEAVREDLVPSESNAFLPSSVLWLSPSTALAADFRVNHVDPEEEIVEHGAMEEREMRFPTHPKESETEDQALVSSVEDILSTCLTPNLVEMESQEAPGPAVEDVGRILGSDTESWMSPLAWLEKGVNTSVMLENLRQSLSLPSMLRDAAIGTTPFSTCSVGTWFTPSAPQEKSTNTSQTGLVGTKHSTSETEQLLCGRPPDLTALSRHDLEDNLLSSLVILEVLSRQLRDWKSQLAVPHPETQDSSTQTDTSHSGITNKLQHLKESHEMGQALQQARNVMQSWVLISKELISLLHLSLLHLEEDKTTVSQESRRAETLVCCCFDLLKKLRAKLQSLKAEREEARHREEMALRGKDAAEIVLEAFCAHASQRISQLEQDLASMREFRGLLKDAQTQLVGLHAKQEELVQQTVSLTSTLQQDWRSMQLDYTTWTALLSRSRQLTEKLTVKSQQALQERDVAIEEKQEVSRVLEQVSAQLEECKGQTEQLELENSRLATDLRAQLQILARRSATDLRAQLQILANMDSQLKELQSQHTHCAQDLAMKDELLCQLTQSNEEQAAQWQKEEMALKHMQAELQQQQAVLAKEVRDLKETLEFADQENQVAHLELGQVECQLKTTLEVLRERSLQCENLKDTVENLTAKLASTIADNQEQDLEKTRQYSQKLGLLTEQLQSLTLFLQTKLKEKLFFLLCPETEQETLLLSTACPPTQEHPLPNDRTFLGSILTAVADEEPESTPVPLLGSDKSAFTRVASMVSLQPAETPGMEESLAEMSIMTTELQSLCSLLQESKEEAIRTLQRKICELQARLQAQEEQHQEVQKAKEADIEKLNQALCLRYKNEKELQEVIQQQNEKILEQIDKSGELISLREEVTHLTRSLRRAETETKVLQEALAGQLDSNCQPMATNWIQEKVWLSQEVDKLRVMFLEMKNEKEKLMIKFQSHRNILEENLRRSDKELEKLDDIVQHIYKTLLSIPEVVRGCKELQGLLEFLS

SEQ ID NO: 861516 - protein, 730 aa, Homo sapiens
MWRVKKLSLSLSPSPQTGKPSMRTPLRELTLQPGALTNSGKRSPACSSLTPSLCKLGLQEGSNNSSPVDFVNNKRTDLSSEHFSHSSKWLETCQHESDEQPLDPIPQISSTPKTSEEAVDPLGNYMVKTIVLVPSPLGQQQDMIFEARLDTMAETNSISLNGPLRTDDLVREEVAPCMGDRFSEVAAVSEKPIFQESPSHLLEESPPNPCSEQLHCSKESLSSRTEAVREDLVPSESNAFLPSSVLWLSPSTALAADFRVNHVDPEEEIVEHGAMEEREMRFPTHPKESETEDQALVSSVEDILSTCLTPNLVEMESQEAPGPAVEDVGRILGSDTESWMSPLAWLEKGVNTSVMLENLRQSLSLPSMLRDAAIGTTPFSTCSVGTWFTPSAPQEKSTNTSQTGLVGTKHSTSETEQLLCGRPPDLTALSRHDLEDNLLSSLVILEVLSRQLRDWKSQLAVPHPETQDSSTQTDTSHSGITNKLQHLKESHEMGQALQQARNVMQSWVLISKELISLLHLSLLHLEEDKTTVSQESRRAETLVCCCFDLLKKLRAKLQSLKAEREEARHREEMALRGKDAAEIVLEAFCAHASQRISQLEQDLASMREFRGLLKDAQTQLVGLHAKQEELVQQTVSLTSTLQQDWRSMQLDYTTWTALLSRSRQLTEKLTVKSQQALQERDVAIEEKQEVSRVLEQVSAQLEECKGQTEQLELENSRLATDLRAQLQILS

SEQ ID NO: 861517 - protein, 274 aa, Homo sapiens
HQRGPLPLLVFLLEPESTPVPLLGSDKSAFTRVASMVSLQPAETPGMEESLAEMSIMTTELQSLCSLLQESKEEAIRTLQRKICELQARLQAQEEQHQEVQKAKEADIEKLNQALCLRYKNEKELQEVIQQQNEKILEQIDKSGELISLREEVTHLTRSLRRAETETKVLQEALAGQLDSNCQPMATNWIQEKVWLSQEVDKLRVMFLEMKNEKEKLMIKFQSHRNILEENLRRSDKELEKLDDIVQHIYKTLLSIPEVVRGCKELQGLLEFLS

SEQ ID NO: 861518 - protein, 95 aa, Homo sapiens
RRAQGGQKPPVGRDRPAFWLKMWRVKKLSLSLSPSPQTGKPSMRTPLRELTLQPGALTNSGKRSPACSSLTPSLCKLGLQQQISVSIMWTQRRKL

SEQ ID NO: 861519 - protein, 443 aa, Homo sapiens
MQKATYYDSSAIYGGYPYQAANGFAYNANQQPYPASAALGADGEYHRPACSLQSPSSAGGHPKAHELSEACLRTLSAPPSQPPSLGEPPLHPPPPQAAPPAPQPPQPAPQPPAPTPAAPPPPSSASPPQNASNNPTPANAAKSPLLNSPTVAKQIFPWMKESRQNTKQKTSSSSSGESCAGDKSPPGQASSKRARTAYTSAQLVELEKEFHFNRYLCRPRRVEMANLLNLTERQIKIWFQNRRMKYKKDQKGKGMLTSSGGQSPSRSPVPPGAGGYLNSMHSLVNSVPYEPQSPPPFSKPPQGTYGLPPASYPASLPSCAPPPPPQKRYTAAGAGAGGTPDYDPHAHGLQGNGSYGTPHIQGSPVFVGGSYVEPMSNSGPALFGLTHLPHAASGAMDYGGAGPLGSGHHHGPGPGEPHPTYTDLTGHHPSQGRIQEAPKLTHL

SEQ ID NO: 861520 - protein, 162 aa, Homo sapiens
MAAGLFGLSARRLLAAAATRGLPAARVRWESSFSRTVVAPSAVAGKRPPEPTTPWQEDPEPEDENLYEKNPDSHGYDKDPVLDVWNMRLVFFFGVSIILVLGSTFVAYLPDYRCTGCPRAWDGMKEWSRREAERLVKYRRGQWPSHHGIQLLRPQQDPAARG

SEQ ID NO: 861521 - protein, 152 aa, Homo sapiens
MAAGLFGLSARRLLAAAATRGLPAARVRWESSFSRTVVAPSAVAGKRPPEPTTPWQEDPEPEDENLYEKNPDSHGYDKDPVLDVWNMRLVFFFGVSIILVLGSTFVAYLPDYRMKEWSRREAERLVKYRRGQWPSHHGIQLLRPQQDPAARG

SEQ ID NO: 861522 - protein, 152 aa, Homo sapiens; identical to SEQ ID NO: 861521

SEQ ID NO: 861523 - protein, 123 aa, Homo sapiens
MAAGLFGLSARRLLAAAATRGLPAARVRWESSFSRTVVAPSAVAGKRPPEPTTPWQEDPEPEDENLYEKNPDSHGYDKDPVLDVWNMRLVFFFGVSIILVLGSTFVAYLPDYRCTGCPRAWDG

SEQ ID NO: 861524 - protein, 152 aa, Homo sapiens; identical to SEQ ID NO: 861521

SEQ ID NO: 861525 - protein, 152 aa, Homo sapiens; identical to SEQ ID NO: 861521

SEQ ID NO: 861526 - protein, 124 aa, Homo sapiens
GSQTSPLPAATSSNSPSSAGAGARNNQVRDWRQIGGRGEAPSALPSQGNSLPPTPSRPQSPAQNGDDEKGVGAPTTIHLLRKRALAGPGDWSPPARGQPWPPLIGKRWPPPHTPCERSPSGEKE

SEQ ID NO: 861527 - protein, 634 aa, Homo sapiens
SGQNAPDAERQEALGIVRRIGTDTEAATEPAGATVPAAAAAARIGTVGPQPPAMPRRKRNAGSSSDGTEDSDFSTDLEHTDSSESDGTSRRSARVTRSSARLSQSSQDSSPVRNLQSFGTEEPAYSTRRVTRSQQQPTPVTPKKYPLRQTRSSGSETEQVVDFSDRETKNTADHDESPPRTPTGNAPSSESDIDISSPNVSHDESIAKDMSLKDSGSDLSHRPKRRRFHESYNFNMKCPTPGCNSLGHLTGKHERHFSISGCPLYHNLSADECKAPTERQLRYKEKVAELRKKRNSGLSKEQKEKYMEHRQTYGNTREPLLENLTSEYDLDLFRRAQARASEDLEKLRLQGQITEGSNMIKTIAFGRYELDTWYHSPYPEEYARLGRLYMCEFCLKYMKSQTILRRHMAKCVWKHPPGDEIYRKGSISVFEVDGKKNKIYCQNLCLLAKLFLDHKTLYYDVEPFLFYVMTEADNTGCHLIGYFSKEKNSFLNYNVSCILTMPQYMRQGYGKMLIDFSYLLSKVEEKVGSPERPLSDLGLISYRSYWKEVLLRYLHNFQGKEISIKEISQETAVNPVDIVSTLQALQMLKYWKGKHLVLKRQDLIDEWIAKEAKRSNSNKTMDPSCLKWTPPKGT

SEQ ID NO: 861528 - protein, 664 aa, Homo sapiens
SGQNAPDAERQEALGIVRRIGTDTEAATEPAGATVPAAAAAARIGTVGPQPPAMPRRKRNAGSSSDGTEDSDFSTDLEHTDSSESDGTSRRSARVTRSSARLSQSSQDSSPVRNLQSFGTEEPAYSTRRVTRSQQQPTPVTPKKYPLRQTRSSGSETEQVVDFSDRETKNTADHDESPPRTPTGNAPSSESDIDISSPNVSHDESIAKDMSLKDSGSDLSHRPKRRRFHESYNFNMKCPTPGCNSLGHLTGKHERHFSISGCPLYHNLSADECKVRAQSRDKQIEERMLSHRQDDNNRHATRHQAPTERQLRYKEKVAELRKKRNSGLSKEQKEKYMEHRQTYGNTREPLLENLTSEYDLDLFRRAQARASEDLEKLRLQGQITEGSNMIKTIAFGRYELDTWYHSPYPEEYARLGRLYMCEFCLKYMKSQTILRRHMAKCVWKHPPGDEIYRKGSISVFEVDGKKNKIYCQNLCLLAKLFLDHKTLYYDVEPFLFYVMTEADNTGCHLIGYFSKEKNSFLNYNVSCILTMPQYMRQGYGKMLIDFSYLLSKVEEKVGSPERPLSDLGLISYRSYWKEVLLRYLHNFQGKEISIKEISQETAVNPVDIVSTLQALQMLKYWKGKHLVLKRQDLIDEWIAKEAKRSNSNKTMDPSCLKWTPPKGT

SEQ ID NO: 861529 - protein, 399 aa, Homo sapiens
MDTRLLAQGNPIYRVCTRYPLVRVERGDAFPGTQGREILEKVVFRKKEKGHRPSKQIVKSEEKREHLRTKLEEHRQTYGNTREPLLENLTSEYDLDLFRRAQARASEDLEKLRLQGQITEGSNMIKTIAFGRYELDTWYHSPYPEEYARLGRLYMCEFCLKYMKSQTILRRHMAKCVWKHPPGDEIYRKGSISVFEVDGKKNKIYCQNLCLLAKLFLDHKTLYYDVEPFLFYVMTEADNTGCHLIGYFSKEKNSFLNYNVSCILTMPQYMRQGYGKMLIDFSYLLSKVEEKVGSPERPLSDLGLISYRSYWKEVLLRYLHNFQGKEISIKEISQETAVNPVDIVSTLQALQMLKYWKGKHLVLKRQDLIDEWIAKEAKRSNSNKTMDPSCLKWTPPKGT

SEQ ID NO: 861530 - protein, 276 aa, Homo sapiens
MIKTIAFGRYELDTWYHSPYPEEYARLGRLYMCEFCLKYMKSQTILRRHMAKCVWKHPPGDEIYRKGSISVFEVDGKKNKIYCQNLCLLAKLFLDHKTLYYDVEPFLFYVMTEADNTGCHLIGYFSKEKNSFLNYNVSCILTMPQYMRQGYGKMLIDFSYLLSKVEEKVGSPERPLSDLGLISYRSYWKEVLLRYLHNFQGKEISIKEISQETAVNPVDIVSTLQALQMLKYWKGKHLVLKRQDLIDEWIAKEAKRSNSNKTMDPSCLKWTPPKGT

SEQ ID NO: 861531 - protein, 134 aa, Homo sapiens
MPQYMRQGYGKMLIDFSYLLSKVEEKVGSPERPLSDLGLISYRSYWKEVLLRYLHNFQGKEISIKEISQETAVNPVDIVSTLQALQMLKYWKGKHLVLKRQDLIDEWIAKEAKRSNSNKTMDPSCLKWTPPKGT

SEQ ID NO: 861532 - protein, 550 aa, Homo sapiens
SGQNAPDAERQEALGIVRRIGTDTEAATEPAGATVPAAAAAARIGTVGPQPPAMPRRKRNAGSSSDGTEDSDFSTDLEHTDSSESDGTSRRSARVTRSSARLSQSSQDSSPVRNLQSFGTEEPAYSTRRVTRSQQQPTPVTPKKYPLRQTRSSGSETEQVVDFSDRETKNTADHDESPPRTPTGNAPSSESDIDISSPNVSHDESIAKDMSLKDSGSDLSHRPKRRRFHESYNFNMKCPTPGCNSLGHLTGKHERHFSISGCPLYHNLSADECKVRAQSRDKQIEERMLSHRQDDNNRHATRHQAPTERQLRYKEKVAELRKKRNSGLSKEQKEKYMEHRQTYGNTREPLLENLTSEYDLDLFRRAQARASEDLEKLRLQGQITEGSNMIKTIAFGRYELDTWYHSPYPEEYARLGRLYMCEFCLKYMKSQTILRRHMAKCVWKHPPGDEIYRKGSISVFEVDGKKNKIYCQNLCLLAKLFLDHKTLYYDVEPFLFYVMTEADNTGCHLIGYFSKVSRIWRLRSQWPEQGDPCSQLGAQITDRKKLYSGQ

SEQ ID NO: 861533 - protein, 281 aa, Homo sapiens
SGQNAPDAERQEALGIVRRIGTDTEAATEPAGATVPAAAAAARIGTVGPQPPAMPRRKRNAGSSSDGTEDSDFSTDLEHTDSSESDGTSRRSARVTRSSARLSQSSQDSSPVRNLQSFGTEEPAYSTRRVTRSQQQPTPVTPKKYPLRQTRSSGSETEQVVDFSDRETKNTADHDESPPRTPTGNAPSSESDIDISSPNVSHDESIAKDMSLKDSGSDLSHRPKRRRFHESYNFNMKCPTPGCNSLGHLTGKHERHFSISGCPLYHNLSADECKVRAAEPG

SEQ ID NO: 861534 - protein, 664 aa, Homo sapiens; identical to SEQ ID NO: 861528

SEQ ID NO: 861535 - protein, 634 aa, Homo sapiens; identical to SEQ ID NO: 861527

SEQ ID NO: 861536 - protein, 337 aa, Homo sapiens
LERILVVTAMEHRQTYGNTREPLLENLTSEYDLDLFRRAQARASEDLEKLRLQGQITEGSNMIKTIAFGRYELDTWYHSPYPEEYARLGRLYMCEFCLKYMKSQTILRRHMAKCVWKHPPGDEIYRKGSISVFEVDGKKNKIYCQNLCLLAKLFLDHKTLYYDVEPFLFYVMTEADNTGCHLIGYFSKEKNSFLNYNVSCILTMPQYMRQGYGKMLIDFSYLLSKVEEKVGSPERPLSDLGLISYRSYWKEVLLRYLHNFQGKEISIKEISQETAVNPVDIVSTLQALQMLKYWKGKHLVLKRQDLIDEWIAKEAKRSNSNKTMDPSCLKWTPPKGT

SEQ ID NO: 861537 - protein, 174 aa, Homo sapiens
LSSDLTSMSQEADNTGCHLIGYFSKEKNSFLNYNVSCILTMPQYMRQGYGKMLIDFSYLLSKVEEKVGSPERPLSDLGLISYRSYWKEVLLRYLHNFQGKEISIKEISQETAVNPVDIVSTLQALQMLKYWKGKHLVLKRQDLIDEWIAKEAKRSNSNKTMDPSCLKWTPPKGT

SEQ ID NO: 861538 - protein, 497 aa, Homo sapiens
SGQNAPDAERQEALGIVRRIGTDTEAATEPAGATVPAAAAAARIGTVGPQPPAMPRRKRNAGSSSDGTEDSDFSTDLEHTDSSESDGTSRRSARVTRSSARLSQSSQDSSPVRNLQSFGTEEPAYSTRRVTRSQQQPTPVTPKKYPLRQTRSSGSETEQVVDFSDRETKNTADHDESPPRTPTGNAPSSESDIDISSPNVSHDESIAKDMSLKDSGSDLSHRPKRRRFHESYNFNMKCPTPGCNSLGHLTGKHERHFSISGCPLYHNLSADECKVRAQSRDKQIEERMLSHRQDDNNRHATRHQAPTERQLRYKEKVAELRKKRNSGLSKEQKEKYMEHRQTYGNTREPLLENLTSEYDLDLFRRAQARASEDLEKLRLQGQITEGSNMIKTIAFGRYELDTWYHSPYPEEYARLGRLYMCEFCLKYMKSQTILRRHMAKCVWKHPPGDEIYRKGSISVFEVDGKKNKVKSGDFRKELKCCIFTGFRRHMFFLHHTL

SEQ ID NO: 861539 - protein, 73 aa, Homo sapiens
ALTVRHVPSSLHLPLPGSNDSPTSASRIAGITGVATTPSKYCTFSRDGVSPCCPGWSQTPELKPSSRLQLPKC

SEQ ID NO: 861540 - protein, 207 aa, Homo sapiens
MASLQRKGLQARILTSEEEEKLKRDQTLVSDFKQQKLEQEAQKNWDLFYKRNSTNFFKDRHWTTREFEELRSCREFEDQKLTMLEAGCGVGNCLFPLLEEDPNIFAYACDFSPRAIEYVKQNPLYDTERCKVFQCDLTKDDLLDHVPPESVDVVMLIFVLSAVHPDKMHLVLQNIYKCHGCSSELRQPWDKDDFAVTWDPWSPAIRY

SEQ ID NO: 861541 - protein, 284 aa, Homo sapiens
MASLQRKGLQARILTSEEEEKLKRDQTLVSDFKQQKLEQEAQKNWDLFYKRNSTNFFKDRHWTTREFEELRSCREFEDQKLTMLEAGCGVGNCLFPLLEEDPNIFAYACDFSPRAIEYVKQNPLYDTERCKVFQCDLTKDDLLDHVPPESVDVVMLIFVLSAVHPDKMHLVLQNIYKVLKPGKSVLFRDYGLYDHAMLRFKASSKLGENFYVRQDGTRSYFFTDDFLAQLFMDTGYEEVVNEYVFRETVNKKEGLCVPRVFLQSKFLKPPKNPSPVVLGLDPKS

SEQ ID NO: 861542 - protein, 207 aa, Homo sapiens; identical to SEQ ID NO: 861540

SEQ ID NO: 861543 - protein, 158 aa, Homo sapiens
AAASRSSPRASGNVPRGPAAGLRSHSWPRTCLAPRSALSRCSRDPSFWRWRLGGLCFRATALEDKESRAGTHPGPEASSLLCVGVREESEEARPWDFRRRVGTSGFLAEVAGAVPWQKNSRRIRIRGPQNWFRVVSRFFPYSASEAQWGWLWGECAWP

SEQ ID NO: 861544 - protein, 158 aa, Homo sapiens; identical to SEQ ID NO: 861543

SEQ ID NO: 861545 - protein, 256 aa, Homo sapiens
MASLQRKGLQARILTSEEEEKLKRDQTLVSDFKQQKLEQEAQKNWDLFYKRNSTNFFKDRHWTTREFEELRSCREFEDQKLTMLEAGCGVGNCLFPLLEEDPNIFAYACDFSPRAIEYVKQNPLYDTERCKVFQCDLTKDDLLDHVPPESVDVVMLIFVLSAVHPDKMHLVLQNIYKCHGCSSELRQPWDKDDFAVTWDPWSPAISTDCMIMPCLGLKPAANLEKTFMLDKMGPDHIFLLMTSWLSSLWTQVMKKW

SEQ ID NO: 861546 - protein, 284 aa, Homo sapiens; identical to SEQ ID NO: 861541

SEQ ID NO: 861547 - protein, 207 aa, Homo sapiens; identical to SEQ ID NO: 861540

SEQ ID NO: 861548 - protein, 251 aa, Homo sapiens
MASLQRKGLQARILTSEEEEKLKRDQTLVSDFKQQKLEQEAQKNWDLFYKRNSTNFFKDRHWTTREFEELRSCREFEDQKLTMLEAGCGVGNCLFPLLEEDPNIFAYACDFSPRAIEYVKQNPLYDTERCKVFQCDLTKDDLLDHVPPESVDVVMLIFVLSAVHPDKMHLVLQNIYKCHGCSSELRQPWDKDDFAVTWDPWSPAIRLLGEGLRHVHETLKQALYCTIFTQHLEGTDLAPALEELTSLLWCQ

SEQ ID NO: 861549 - protein, 127 aa, Homo sapiens
  misc_feature (24)..(24): Xaa can be any naturally occurring amino acid
  misc_feature (26)..(26): Xaa can be any naturally occurring amino acid
  misc_feature (30)..(30): Xaa can be any naturally occurring amino acid
MGATVTRYRWERVWQRPTRAGIDXLXEGPXGLRLTRASGSPGLQEFGTSGNMPEQKGVMAEHGPTCMVLHPLAGSPSKTKLTWLLSIDLKGWLPKSIINQVLSQTQVDFANHLRKRLESHPASEARC

SEQ ID NO: 861550 - protein, 69 aa, Homo sapiens
  misc_feature (25)..(25): Xaa can be any naturally occurring amino acid
  misc_feature (27)..(27): Xaa can be any naturally occurring amino acid
  misc_feature (31)..(31): Xaa can be any naturally occurring amino acid
AEGATVTRYRWERVWQRPTRAGIDXLXEGPXGLRLTRASGSPGLQEFGTSTIFKMLVADMGVGDANHRA

SEQ ID NO: 861551 - protein, 286 aa, Homo sapiens
MLLATFKLCAGSSYRHMRNMKGLRQQAVMAISQELNRRALGGPTPSTWINQVRRRSSLLGSRLEETLYSDQELAYLQQGEEAMQKALGILSNQEGWKKESQQDNGDKVMSKVVPDVGKVFRLEVVVDQPMERLYEELVERMEAMGEWNPNVKEIKVLQKIGKDTFITHELAAEAVQENLVGPRDFVSVRCAKRRGSTCVLAGMATDFGNMPEQKGVIRAEHGPTCMVLHPLAGSPSKTKLTWLLSIDLKGWLPKSIINQVLSQTQVDFANHLRKRLESHPASEARC

SEQ ID NO: 861552 - protein, 286 aa, Homo sapiens; identical to SEQ ID NO: 861551

SEQ ID NO: 861553 - protein, 286 aa, Homo sapiens; identical to SEQ ID NO: 861551

SEQ ID NO: 861554 - protein, 286 aa, Homo sapiens; identical to SEQ ID NO: 861551

SEQ ID NO: 861555 - protein, 286 aa, Homo sapiens; identical to SEQ ID NO: 861551

SEQ ID NO: 861556 - protein, 286 aa, Homo sapiens; identical to SEQ ID NO: 861551

SEQ ID NO: 861557 - protein, 286 aa, Homo sapiens; identical to SEQ ID NO: 861551

SEQ ID NO: 861558 - protein, 286 aa, Homo sapiens; identical to SEQ ID NO: 861551

SEQ ID NO: 861559 - protein, 267 aa, Homo sapiens
MLLATFKLCAGSSYRHMRNMKGLRQQAVMAISQELNRRALGGPTPSTWINQVRRRSSLLGSRLEETLYSDQELAYLQQGEEAMQKALGILSNQEGWKKESQQDNGDKVMSKVVPDVGKVFRLEVVVDQPMERLYEELVERMEAMGEWNPNVKEIKVQENLVGPRDFVSVRCAKRRGSTCVLAGMATDFGNMPEQKGVIRAEHGPTCMVLHPLAGSPSKTKLTWLLSIDLKGWLPKSIINQVLSQTQVDFANHLRKRLESHPASEARC

SEQ ID NO: 861560 - protein, 178 aa, Homo sapiens
MSKVVPDVGKVFRLEVVVDQPMERLYEELVERMEAMGEWNPNVKEIKVLQKIGKDTFITHELAAEAVQENLVGPRDFVSVRCAKRRGSTCVLAGMATDFGNMPEQKGVIRAEHGPTCMVLHPLAGSPSKTKLTWLLSIDLKGWLPKSIINQVLSQTQVDFANHLRKRLESHPASEARC

SEQ ID NO: 861561 - protein, 191 aa, Homo sapiens
MLLATFKLCAGSSYRHMRNMKGLRQQAVMAISQELNRRALGGPTPSTWINQVRRRSSLLGSRLEETLYSDQELAYLQQGEEAMQKALGILSNQEGWKKESQQDNGDKVMSKVVPDVGKVFRLEVVVDQPMERLYEELVERMEAMGEWNPNVKEIKVLQKIGKDTFITHELAAEARLHLCAGWHGHRLREHA

SEQ ID NO: 861562 - protein, 191 aa, Homo sapiens
  misc_feature (11)..(11): Xaa can be any naturally occurring amino acid
  misc_feature (13)..(13): Xaa can be any naturally occurring amino acid
  misc_feature (17)..(17): Xaa can be any naturally occurring amino acid
MATTHESRHRXPXGGAXRTSGSLELADPPGCRNSARALYEELVERMEAMGEWNPNVKEIKVLQKIGKDTFITHELAAEAVQENLVGPRDFVSVRCAKRRGSTCVLAGMATDFGNMPEQKGVIRAEHGPTCMVLHPLAGSPSKTKLTWLLSIDLKGWLPKSIINQVLSQTQVDFANHLRKRLESHPASEARC

SEQ ID NO: 861563 - protein, 177 aa, Homo sapiens
MLLATFKLCAGSSYRHMRNMKGLRQQAVMAISQELNRRALGGPTPSTWINQVRRRSSLLGSRLEETLYSDQELAYLQQGEEAMQKALGILSNQEGWKKESQQDNGDKVMSKVVPDVGKVFRLEGSPSKTKLTWLLSIDLKGWLPKSIINQVLSQTQVDFANHLRKRLESHPASEARC

SEQ ID NO: 861564 - protein, 90 aa, Homo sapiens
  misc_feature (25)..(25): Xaa can be any naturally occurring amino acid
  misc_feature (27)..(27): Xaa can be any naturally occurring amino acid
  misc_feature (31)..(31): Xaa can be any naturally occurring amino acid
AEGATVTRYRWERVWQRPTRAGIDXLXEGPXGLRLTRASGSPGLQEFGTSSEAKLEGLRKDEEPPLREEAAAAAAAAAAATPPLPHEARC

SEQ ID NO: 861565 - protein, 236 aa, Homo sapiens
MLLATFKLCAGSSYRHMRNMKGLRQQAVMAISQELNRRALGGPTPSTWINQVRRRSSLLGSRLEETLYSDQELAYLQQGEEAMQKALGILSNQEGWKKESQQDNGDKVMSKVVPDVGKVFRLEVVVDQPMERLYEELVERMEAMGEWNPNVKEIKVLQKIGKDTFITHELAAEAVQENLVGPRDFVSVRCAKRRGSTCVLAGMAAAQQHHRTSSTPQWVPSRNIVQAFSVEKDKTH

SEQ ID NO: 861566 - protein, 191 aa, Homo sapiens; identical to SEQ ID NO: 861561

SEQ ID NO: 861567 - protein, 177 aa, Homo sapiens
  misc_feature (167)..(167): Xaa can be any naturally occurring amino acid
MLLATFKLCAGSSYRHMRNMKGLRQQAVMAISQELNRRALGGPTPSTWINQVRRRSSLLGSRLEETLYSDQELAYLQQGEEAMQKALGILSNQEGWKKESQQDNGDKVMSKVVPDVGKVFRLEVVVDQPMERLYEELVERMEAMGEWNPNVKEIKGPAENAGLVSVXLQAPRFTVAG

SEQ ID NO: 861568 - protein, 112 aa, Homo sapiens
  misc_feature (25)..(25): Xaa can be any naturally occurring amino acid
  misc_feature (27)..(27): Xaa can be any naturally occurring amino acid
  misc_feature (31)..(31): Xaa can be any naturally occurring amino acid
AEGATVTRYRWERVWQRPTRAGIDXLXEGPXGLRLTRASGSPGLQEFGTSSEAKLEGLRKDEEPPLREEAAAAAAAAAAATPPLPHCAQLHWYTRSSGESLLEACKSKISIW

SEQ ID NO: 861569 - protein, 286 aa, Homo sapiens; identical to SEQ ID NO: 861551

SEQ ID NO: 861570 - protein, 286 aa, Homo sapiens; identical to SEQ ID NO: 861551

SEQ ID NO: 861571 - protein, 286 aa, Homo sapiens; identical to SEQ ID NO: 861551

SEQ ID NO: 861572 - protein, 286 aa, Homo sapiens; identical to SEQ ID NO: 861551

SEQ ID NO: 861573 - protein, 286 aa, Homo sapiens; identical to SEQ ID NO: 861551

SEQ ID NO: 861574 - protein, 286 aa, Homo sapiens; identical to SEQ ID NO: 861551

SEQ ID NO: 861575 - protein, 286 aa, Homo sapiens; identical to SEQ ID NO: 861551

SEQ ID NO: 861576 - protein, 306 aa, Homo sapiens
MLLATFKLCAGSSYRHMRNMKGLRQQAVMAISQELNRRALGGPTPSTWINQVRRRSSLLGSRLEETLYSDQELAYLQQGEEAMQKALGILSNQEGWKKESQQDNGDKVMSKVVPDVGKVFRLEVVVDQPMERLYEELVERMEAMGEWNPNVKEIKVLQKIGKDTFITHELAAEAVQENLVGPRDFVSVRCAKRRGSTCVLAGMATDFGNMPEQKGVIREVPLRPNLRGYSASTSRGGCPRASSTRSCPRPRWILPTTCASAWSPTLPLKPGVEDQPAVPNCAQLHWYTRSSGESLLEACKSKISIW

SEQ ID NO: 861577 - protein, 289 aa, Homo sapiens
MLLATFKLCAGSSYRHMRNMKGLRQQAVMAISQELNRRALGGPTPSTWINQVRRRSSLLGSRLEETLYSDQELAYLQQGEEAMQKALGILSNQEGWKKESQQDNGDKVMSKVVPDVGKVFRLEVVVDQPMERLYEELVERMEAMGEWNPNVKEIKVLQKIGKDTFITHELAAEAVQENLVGPRDFVSVRCAKRRGSTCVLAGMATDFGNMPEQKGVIRGGCPRASSTRSCPRPRWILPTTCASAWSPTLPLKPGVEDQPAVPNCAQLHWYTRSSGESLLEACKSKISIW

SEQ ID NO: 861578 - protein, 312 aa, Homo sapiens
MWCMWLWLPSCHSFILRGRPQPRVPQGQIPLWSPGAAVINSTSRLAPMALVRALQSNEQTQSSRDESWWRLGEEGSSVSPQAVYPGSRLEETLYSDQELAYLQQGEEAMQKALGILSNQEGWKKESQQDNGDKVMSKVVPDVGKVFRLEVVVDQPMERLYEELVERMEAMGEWNPNVKEIKVLQKIGKDTFITHELAAEAVQENLVGPRDFVSVRCAKRRGSTCVLAGMATDFGNMPEQKGVIRAEHGPTCMVLHPLAGSPSKTKLTWLLSIDLKGWLPKSIINQVLSQTQVDFANHLRKRLESHPASEARC

SEQ ID NO: 861579 - protein, 268 aa, Homo sapiens
MLLATFKLCAGSSYRHMRNMKGLRQQAVMAISQELNRRALGGPTPSTWINQVRRRSSLLGSRLEETLYSDQELAYLQQGEEAMQKALGILSNQVVPDVGKVFRLEVVVDQPMERLYEELVERMEAMGEWNPNVKEIKVLQKIGKDTFITHELAAEAVQENLVGPRDFVSVRCAKRRGSTCVLAGMATDFGNMPEQKGVIRAEHGPTCMVLHPLAGSPSKTKLTWLLSIDLKGWLPKSIINQVLSQTQVDFANHLRKRLESHPASEARC

SEQ ID NO: 861580 - protein, 270 aa, Homo sapiens
MLLATFKLCAGSSYRHMRNMKGLRQQAVMAISQELNRRALGGPTPSTWINQVRRRSSLLGSRLEETLYSDQELAYLQQGEEAMQKALGILSNQEGWKKESQQDNGDKVMSKVVPDVGKVFRLEVVVDQPMERLYEELVERMEAMGEWNPNVKEIKVQENLVGPRDFVSVRCAKRRGSTCVLAGMATDFGNMPEQKGVIRGGCPRASSTRSCPRPRWILPTTCASAWSPTLPLKPGVEDQPAVPNCAQLHWYTRSSGESLLEACKSKISIW

SEQ ID NO: 861581 - protein, 87 aa, Homo sapiens
  misc_feature (25)..(25): Xaa can be any naturally occurring amino acid
  misc_feature (27)..(27): Xaa can be any naturally occurring amino acid
  misc_feature (31)..(31): Xaa can be any naturally occurring amino acid
AEGATVTRYRWERVWQRPTRAGIDXLXEGPXGLRLTRASGSPGLQEFGTSGWLPKSIINQVLSQTQVDFANHLRKRLESHPASEARC

SEQ ID NO: 861582 - protein, 236 aa, Homo sapiens; identical to SEQ ID NO: 861565

SEQ ID NO: 861583 - protein, 202 aa, Homo sapiens
MLLATFKLCAGSSYRHMRNMKGLRQQAVMAISQELNRRALGGPTPSTWINQVRRRSSLLGSRLEETLYSDQELAYLQQGEEAMQKALGILSNQEGWKKESQQDNGDKVMSKVVPDVGKVFRLEVVVDQPMERLYEELVERMEAMGEWNPNVKEIKLALQKNGKDRYITDDLAVNALELTLVLVGLARLWDMLTVGSLRPSRD

SEQ ID NO: 861584 - protein, 182 aa, Homo sapiens
MLLATFKLCAGSSYRHMRNMKGLRQQAVMAISQELNRRALGGPTPSTWINQVRRRSSLLGSRLEETLYSDQELAYLQQGEEAMQKALGILSNQEGWKKESQQDNGDKVMSKVVPDVGKVFRLEVVVDQPMERLYEELVERMEAMGEWNPNVKEIKQHRQTSYNPITFKTYASPNPETHLFPT

SEQ ID NO: 861585 - protein, 69 aa, Homo sapiens; identical to SEQ ID NO: 861550
  misc_feature (25)..(25): Xaa can be any naturally occurring amino acid
  misc_feature (27)..(27): Xaa can be any naturally occurring amino acid
  misc_feature (31)..(31): Xaa can be any naturally occurring amino acid

SEQ ID NO: 861586 - protein, 135 aa, Homo sapiens
MEFAELIKTPRVDNVVLHRPFYPAVEGTLCLTGHHLILSSRQDNTEELWLLHSNIDAIDKRFVGSLGTIIIKCKDFRIIQLDIPGMEECLNIASSIEALSTLDSITLMYPFFYRPMFEVIEDGWHSFKHRTVKKK

SEQ ID NO: 861587 - protein, 610 aa, Homo sapiens
MRRAAFDKCAVKHLNEENGGRMSEQADCPRGAGNNHVRDNQIPAYSASSLFMWSESWFLYRRYVKKAPQIIFLKYKGSPQSSIEHIRILRFEISTFFFFNQKNIVVGLYVFKNLKLFWWQDLSINIYLVKIFYFDFIKWEESKQKYVKFSRFKTIYKCILFPRKLRVSKQDFKVILRRLGGDNNRHSCQIPYGGFLNISLNFEAWFRGGILLLFVLKDEICGVLVFDSVSIWFMLNKKSVSWKRYDHNLVSSSEKQEYMFRCTLKDLLQGITRVVVWFQDSCLNCHSKVGHQVHYYPTLIWDKGFGICPLLDRMNENNTSVYEHSLSERYFLDQKWAIVTIVDPLFWNFEIYQRMKSFSTSDKVLLCCCCCCFNWATLRTEEVQRTFQVYTIPQDHIDELLLILSHGLGLFSSSRPSILSYYHIVFLCYPSSLKTYRLGMVAYACNPSTLGGQGGRIMRSGDRDHPGYHGENPCLLKIQKISQVWWRAPVVPATQEAEEENGVNPGGRACSEPRSHHCTPAWAKGQDSISKKKKKKDSFIHLHLFSDDKIYTDTITFLWYQFSLFSWIKLLLPSFGLYNPLSTASSFKPKSQKRPSEILGLDIKMPEPVI

SEQ ID NO: 861588 - protein, 141 aa, Homo sapiens
MEFAELIKTPRVDNVVLHRPFYPAVEGTLCLTGHHLILSSRQDNTEELWLLHSNIDAIDKRFVGSLGTIIIKCKDFRIIQLDIPGMEECLNIASSIEALSTLDSITLMYPFFYRPMFEVIEDGWHSFLPEQEFELYSSAVS

SEQ ID NO: 861589 - protein, 324 aa, Homo sapiens
MEFAELIKTPRVDNVVLHRPFYPAVEGTLCLTGHHLILSSRQDNTEELWLLHSNIDAIDKRFVGSLGTIIIKCKDFRIIQLDIPGMEECLNIASSIEALSTLDSITLMYPFFYRPMFEVIEDGWHSFLPEQEFELYSSATSEWRLSYVNKEFAVCPSYPPIVTVPKSIDDEALRKVATFRHGGRFPVLSYYHKKNGMVIMRSGQPLTGTNGRRCKEDEKLINATLRAGKRGYIIDTRSLNVAQQTRAKGGGFEQEAHYPQWRRIHKSIERYHILQESLIKLVEACNDQTHNMDRWLSKLEASNWLTHIKEILTTACLAAQCIDR

SEQ ID NO: 861590 - protein, 549 aa, Homo sapiens
MEFAELIKTPRVDNVVLHRPFYPAVEGTLCLTGHHLILSSRQDNTEELWLLHSNIDAIDKRFVGSLGTIIIKCKDFRIIQLDIPGMEECLNIASSIEALSTLDSITLMYPFFYRPMFEVIEDGWHSFLPEQEFELYSSATSEWRLSYVNKEFAVCPSYPPIVTVPKSIDDEALRKVATFRHGGRFPVLSYYHKKNGMVIMRSGQPLTGTNGRRCKEDEKLINATLRAGKRGYIIDTRSLNVAQQTRAKGGGFEQEAHYPQWRRIHKSIERYHILQESLIKLVEACNDQTHNMDRWLSKLEASNWLTHIKEILTTACLAAQCIDREGASILIHGTEGTDSTLQVTSLAQIILEPRSRTIRGFEALIEREWLQAGHPFQQRCAQSAYCNTKQKWEAPVFLLFLDCVWQILRQFPCSFEFNENFLIMLFEHAYASQFGTFLGNNESERCKLKLQQKTMSLWSWVNQPSELSKFTNPLFEANNLVIWPSVAPQSLPLWEGIFLRWNRSSKYLDEAYEEMVNIIEYNKELQAKVNILRRQLAELETEDGMQESP

SEQ ID NO: 861591 - protein, 95 aa, Homo sapiens
MLNTAGESEVEVKAWGGDGRGAGVCKAKHLPGPVRRHWMEHSKGKCAPWLFSNVNQPCSVTIVSYYPNNILMEKYSSLKNDHPRRFPSNISPQKG

SEQ ID NO: 861592 - protein, 125 aa, Homo sapiens
MLRPKALTQVLSQANTGGVQSTLLLNNEGSLLAYSGYGDTDARVTAAIASNIWAAYDRNGNQAFNEDNLKFILMDCMEGRVAITRVANLLLCMYAKETVGFGMLKAKAQALVQYLEEPLTQVAAS

SEQ ID NO: 861593 - protein, 134 aa, Homo sapiens
MLRPKALTQVLSQANTGGVQSTLLLNNEGSLLAYSGYGDTDARVTAAIASNIWAAYDRNGNQAFNEDNLKFILMDCMVWRGEPDFPCPPKGIPRGRPGPHPGWLEGQGQDLRKITKSWSAAAFVIGRTLFIKWW

SEQ ID NO: 861594 - protein, 125 aa, Homo sapiens; identical to SEQ ID NO: 861592

SEQ ID NO: 861595 - protein, 134 aa, Homo sapiens; identical to SEQ ID NO: 861593

SEQ ID NO: 861596 - protein, 207 aa, Homo sapiens
MLRPKALTQVLSQANTGGVQSTLLLNNEGSLLAYSGYGDTDARVTAAIASNIWAAYDRNGNQAFNEDNLKFILMDCMEGRVAITRVANLLLCMYAKETVGFGMLKAKVCMCPSLHSPGPSLRALHCVHSHQDPVSRVLMSTQSISGVGQLPRAGGGWGLVASYGTGSRPGFGVPNARLCAGLISVLPLQAQALVQYLEEPLTQVAAS

SEQ ID NO: 861597 - protein, 125 aa, Homo sapiens; identical to SEQ ID NO: 861592

SEQ ID NO: 861598 - protein, 150 aa, Homo sapiens
MLRPKALTQVLSQANTGGVQSTLLLNNEGSLLAYSGYGDTDARVTAAIASNIWAAYDRNGNQAFNEDNLKFILMDCMEGRVAITRVANLLLCMYAKETVGFGMLKAKAVCGTDLCSPSAGPGFGAVPGGAPHPSGGILTALVEAGVRKEK

SEQ ID NO: 861599 - protein, 154 aa, Homo sapiens
MGGGWDFVFSKNKLQLLSTKTPYTTNRPPPNHPHTHLWRPPPLPTTGEKTLVYTTPPAVMGQAPGGPPETHTATTTGCSISRLIPHNDKNRVRPKTTPKAAAGTRPHPEKNNTAAGRHKPTSVLQPKIPKRGQTPPTGGDPKTQAATTGARISQ

SEQ ID NO: 861600 - protein, 103 aa, Homo sapiens
YVVPAQTKESNYHWASHARYACLWGSAGDSAMQGWLRAGFGVETRGKYLDFGLSLWCSIPAACWDHREMTKPSPALTLGPSNEHLRGLGGLHKDLLIGTHLFL

SEQ ID NO: 861601 - protein, 533 aa, Homo sapiens
MATSLHEGPTNQLDLLIRAVEASVHSSNAHCTDKTIEAAEALLHMESPTCLRDSRSPVEVFVPPCVSTPEFIHAAMRPDVITETVVEVSTEESEPMDTSPIPTSPDSHEPMKKKKVGRKPKTQQSPISNGSPELGIKKKPREGKGNTTYLWEFLLDLLQDKNTCPRYIKWTQREKGIFKLVDSKAVSKLWGKHKNKPDMNYETMGRALRYYYQRGILAKVEGQRLVYQFKDMPKNIVVIDDDKSETCNEDLAGTTDEKSLERVSLSAESLLKAASSVRSGKNSSPINCSRAEKGVARVVNITSPGHDASSRSPTTTASVSATAAPRTVRVAMQVPVVMTSLGQKISTVAVQSVNAGAPLITSTSPTTATSPKVVIQTIPTVMPASTENGDKITMQPAKIITIPATQLAQCQLQTKSNLTGSGSINIVGTPLAVRALTPVSIAHGTPVMRLSMPTQQASGQTPPRVISAVIKGPEVKSEAVAKKQEHDVKTLQLVEEKPADGNKTVTHVVVVSAPSAIALPVTMKTEGLVTCEK

SEQ ID NO: 861602 - protein, 521 aa, Homo sapiens
MATSLHEGPTNQLDLLIRAVEASVHSSNAHCTDKTIEAAEALLHMESPTCLRDSRSPEFIHAAMRPDVITETVVEVSTEESEPMDTSPIPTSPDSHEPMKKKKVGRKPKTQQSPISNGSPELGIKKKPREGKGNTTYLWEFLLDLLQDKNTCPRYIKWTQREKGIFKLVDSKAVSKLWGKHKNKPDMNYETMGRALRYYYQRGILAKVEGQRLVYQFKDMPKNIVVIDDDKSETCNEDLAGTTDEKSLERVSLSAESLLKAASSVRSGKNSSPINCSRAEKGVARVVNITSPGHDASSRSPTTTASVSATAAPRTVRVAMQVPVVMTSLGQKISTVAVQSVNAGAPLITSTSPTTATSPKVVIQTIPTVMPASTENGDKITMQPAKIITIPATQLAQCQLQTKSNLTGSGSINIVGTPLAVRALTPVSIAHGTPVMRLSMPTQQASGQTPPRVISAVIKGPEVKSEAVAKKQEHDVKTLQLVEEKPADGNKTVTHVVVVSAPSAIALPVTMKTEGLVTCEK

SEQ ID NO: 861603 - protein, 89 aa, Homo sapiens
PPSPRRLGVGGAARAGVAARGGEPLFCLLLSLWSGSGCWGGPGSLRTLGQRRRLVRGPAEREKDAAVFPGVAESSSKELLVQILALPKL

SEQ ID NO: 861604 - protein, 89 aa, Homo sapiens; identical to SEQ ID NO: 861603

SEQ ID NO: 861605 - protein, 492 aa, Homo sapiens
MATSLHEGPTNQLDLLIRAVEASVHSSNAHCTDKTIEAAEALLHMESPTCLRDSRSPEFIHAAMRPDVITETVVEVSTEESEPMDTSPIPTSPDSHEPMKKKKGNTTYLWEFLLDLLQDKNTCPRYIKWTQREKGIFKLVDSKAVSKLWGKHKNKPDMNYETMGRALRYYYQRGILAKVEGQRLVYQFKDMPKNIVVIDDDKSETCNEDLAGTTDEKSLERVSLSAESLLKAASSVRSGKNSSPINCSRAEKGVARVVNITSPGHDASSRSPTTTASVSATAAPRTVRVAMQVPVVMTSLGQKISTVAVQSVNAGAPLITSTSPTTATSPKVVIQTIPTVMPASTENGDKITMQPAKIITIPATQLAQCQLQTKSNLTGSGSINIVGTPLAVRALTPVSIAHGTPVMRLSMPTQQASGQTPPRVISAVIKGPEVKSEAVAKKQEHDVKTLQLVEEKPADGNKTVTHVVVVSAPSAIALPVTMKTEGLVTCEK

SEQ ID NO: 861606 - protein, 593 aa, Homo sapiens
MTSAVVDSGGTILELSSNGVENQEESEKVSEYPAVIVEPVPSARLEQGYAAQVLVYDDETYMMQDVAEEQEVETENVETVEASVHSSNAHCTDKTIEAAEALLHMESPTCLRDSRSPVEVFVPPCVSTPEFIHAAMRPDVITETVVEVSTEESEPMDTSPIPTSPDSHEPMKKKKVGRKPKTQQSPISNGSPELGIKKKPREGKGNTTYLWEFLLDLLQDKNTCPRYIKWTQREKGIFKLVDSKAVSKLWGKHKNKPDMNYETMGRALRYYYQRGILAKVEGQRLVYQFKDMPKNIVVIDDDKSETCNEDLAGTTDEKSLERVSLSAESLLKAASSVRSGKNSSPINCSRAEKGVARVVNITSPGHDASSRSPTTTASVSATAAPRTVRVAMQVPVVMTSLGQKISTVAVQSVNAGAPLITSTSPTTATSPKVVIQTIPTVMPASTENGDKITMQPAKIITIPATQLAQCQLQTKSNLTGSGSINIVGTPLAVRALTPVSIAHGTPVMRLSMPTQQASGQTPPRVISAVIKGPEVKSEAVAKKQEHDVKTLQLVEEKPADGNKTVTHVVVVSAPSAIALPVTMKTEGLVTCEK

SEQ ID NO: 861607 - protein, 581 aa, Homo sapiens
MTSAVVDSGGTILELSSNGVENQEESEKVSEYPAVIVEPVPSARLEQGYAAQVLVYDDETYMMQDVAEEQEVETENVETVEASVHSSNAHCTDKTIEAAEALLHMESPTCLRDSRSPEFIHAAMRPDVITETVVEVSTEESEPMDTSPIPTSPDSHEPMKKKKVGRKPKTQQSPISNGSPELGIKKKPREGKGNTTYLWEFLLDLLQDKNTCPRYIKWTQREKGIFKLVDSKAVSKLWGKHKNKPDMNYETMGRALRYYYQRGILAKVEGQRLVYQFKDMPKNIVVIDDDKSETCNEDLAGTTDEKSLERVSLSAESLLKAASSVRSGKNSSPINCSRAEKGVARVVNITSPGHDASSRSPTTTASVSATAAPRTVRVAMQVPVVMTSLGQKISTVAVQSVNAGAPLITSTSPTTATSPKVVIQTIPTVMPASTENGDKITMQPAKIITIPATQLAQCQLQTKSNLTGSGSINIVGTPLAVRALTPVSIAHGTPVMRLSMPTQQASGQTPPRVISAVIKGPEVKSEAVAKKQEHDVKTLQLVEEKPADGNKTVTHVVVVSAPSAIALPVTMKTEGLVTCEK

SEQ ID NO: 861608 - protein, 521 aa, Homo sapiens; identical to SEQ ID NO: 861602

SEQ ID NO: 861609 - protein, 521 aa, Homo sapiens; identical to SEQ ID NO: 861602

SEQ ID NO: 861610 - protein, 521 aa, Homo sapiens; identical to SEQ ID NO: 861602

SEQ ID NO: 861611 - protein, 331 aa, Homo sapiens
MATSLHEGPTNQLDLLIRAVEASVHSSNAHCTDKTIEAAEALLHMESPTCLRDSRSPEFIHAAMRPDVITETVVEVSTEESEPMDTSPIPTSPDSHEPMKKKKVGRKPKTQQSPISNGSPELGIKKKPREGKGNTTYLWEFLLDLLQDKNTCPRYIKWTQREKGIFKLVDSKAVSKLWGKHKNKPDMNYETMGRALRYYYQRGILAKVEGQRLVYQFKDMPKNIVVIDDDKSETCNEDLAGTTDEKSLERVSLSAESLLKAASSVRSGKNSSPINCSRAEKGVARVVNITSPGHDASSRSPTTTASVSATAAPRFFGENKQKTAKHPSVVS

SEQ ID NO: 861612 - protein, 94 aa, Homo sapiens
RGAEGSRCQLRRPPQPQPPPPPPPPLPLPPLPLPLGGGVSQPGGGRRAGLGFLSEDAQGSGRRSVCECVSVCRSHGVCLRPRVPPPPLPPLLTV

SEQ ID NO: 861613 - protein, 94 aa, Homo sapiens; identical to SEQ ID NO: 861612

SEQ ID NO: 861614 - protein, 521 aa, Homo sapiens; identical to SEQ ID NO: 861602

SEQ ID NO: 861615 - protein, 581 aa, Homo sapiens; identical to SEQ ID NO: 861607

SEQ ID NO: 861616 - protein, 581 aa, Homo sapiens; identical to SEQ ID NO: 861607

SEQ ID NO: 861617 - protein, 521 aa, Homo sapiens; identical to SEQ ID NO: 861602

SEQ ID NO: 861618 - protein, 323 aa, Homo sapiens
MATSLHEGPTNQLDLLIRAVEASVHSSNAHCTDKTIEAAEALLHMESPTCLRDSRSPEFIHAAMRPDVITETVVEVSTEESEPMDTSPIPTSPDSHEPMKKKKVGRKPKTQQSPISNGSPELGIKKKPREGKGNTTYLWEFLLDLLQDKNTCPRYIKWTQREKGIFKLVDSKAVSKLWGKHKNKPDMNYETMGRALRYYYQRGILAKVEGQRLVYQFKDMPKNIVVIDDDKSETCNEDLAGTTDEKSLERVSLSAESLLKAASSVRSGKNSSPINCSRAEKGVARVVNITSPGHDASSRSPTTTASVSATAAPRWQSQTRQES

SEQ ID NO: 861619 - protein, 1099 aa, Homo sapiens
MIGSKGWVGRAGARKGQQLLALTRLLATYAPSIINPKQSKDAPKSFTFDYSYWSHTSTEDPQFASQQQVYRDIGEEMLLHAFEGYNVCIFAYGQTGAGKSYTMMGRQEPGQQGIVPQLCEDLFSRVSENQSAQLSYSVEVSYMEIYCERVRDLLNPKSRGSLRVREHPILGPYVQDLSKLAVTSYADIADLMDCGNKARTVAATNMNETSSRSHAVFTIVFTQRCHDQLTGLDSEKVSKISLVDLAGSERADSSGARGMRLKEGANINKSLTTLGKVISALADMQSKKRKSDFIPYRDSVLTWLLKENLGGNSRTAMIAALSPADINYEETLSTLRYADRTKQIRCNAIINEDPNARLIRELQEEVARLRELLMAQGLSASALEGLKTEEGSVRGALPAVSSPPAPVSPSSPTTHNGELEPSFSPNTESQIGPEEAMERLQETEKIIAELNETWEEKLRKTEALRMEREALLAEMGVAVREDGGTVGVFSPKKTPHLVNLNEDPLMSECLLYHIKDGVTRVGQVDMDIKLTGQFIREQHCLFRSIPQPDGEVVVTLEPCEGAETYVNGKLVTEPLVLKSGNRIVMGKNHVFRFNHPEQARLERERGVPPPPGPPSEPVDWNFAQKELLEQQGIDIKLEMEKRLQDLENQYRKEKEEADLLLEQQRLYADSDSGDDSDKRSCEESWRLISSLREQLPPTTVQTIVKRCGLPSSGKRRAPRRVYQIPQRRRLQGKDPRWATMADLKMQAVKEICYEVALADFRHGRAEIEALAALKMRELCRTYGKPDGPGDAWRAVARDVWDTVGEEEGGGAGSGGGSEEGARGAEVEDLRAHIDKLTGILQEVKLQNSSKDRELQALRDRMLRMERVIPLAQDHEDENEEGGEVPWAPPEGSEAAEEAAPSDRMPSARPPSPPLSSWERVSRLMEEDPAFRRGRLRWLKQEQLRLQGLQGSGGRGGGLRRPPARFVPPHDCKLRFPFKSNPQHRESWPGMGSGEAPTPLQPPEEVTPHPATPARRPPSPRRSHHPRRNSLDGGGRSRGAGSAQPEPQHFQPKKHNSYPQPPQPYPAQRPPGPRYPPYTTPPRMRRQRSAPDLKESGAAV

SEQ ID NO: 861620 - protein, 1103 aa, Homo sapiens
MAGASVKVAVRVRPFNARETSQDAKCVVSMQGNTTSIINPKQSKDAPKSFTFDYSYWSHTSTEDPQFASQQQVYRDIGEEMLLHAFEGYNVCIFAYGQTGAGKSYTMMGRQEPGQQGIVPQLCEDLFSRVSENQSAQLSYSVEVSYMEIYCERVRDLLNPKSRGSLRVREHPILGPYVQDLSKLAVTSYADIADLMDCGNKARTVAATNMNETSSRSHAVFTIVFTQRCHDQLTGLDSEKVSKISLVDLAGSERADSSGARGMRLKEGANINKSLTTLGKVISALADMQSKKRKSDFIPYRDSVLTWLLKENLGGNSRTAMIAALSPADINYEETLSTLRYADRTKQIRCNAIINEDPNARLIRELQEEVARLRELLMAQGLSASALEGLKTEEGSVRGALPAVSSPPAPVSPSSPTTHNGELEPSFSPNTESQIGPEEAMERLQETEKIIAELNETWEEKLRKTEALRMEREALLAEMGVAVREDGGTVGVFSPKKTPHLVNLNEDPLMSECLLYHIKDGVTRVGQVDMDIKLTGQFIREQHCLFRSIPQPDGEVVVTLEPCEGAETYVNGKLVTEPLVLKSGNRIVMGKNHVFRFNHPEQARLERERGVPPPPGPPSEPVDWNFAQKELLEQQGIDIKLEMEKRLQDLENQYRKEKEEADLLLEQQRLYADSDSGDDSDKRSCEESWRLISSLREQLPPTTVQTIVKRCGLPSSGKRRAPRRVYQIPQRRRLQGKDPRWATMADLKMQAVKEICYEVALADFRHGRAEIEALAALKMRELCRTYGKPDGPGDAWRAVARDVWDTVGEEEGGGAGSGGGSEEGARGAEVEDLRAHIDKLTGILQEVKLQNSSKDRELQALRDRMLRMERVIPLAQDHEDENEEGGEVPWAPPEGSEAAEEAAPSDRMPSARPPSPPLSSWERVSRLMEEDPAFRRGRLRWLKQEQLRLQGLQGSGGRGGGLRRPPARFVPPHDCKLRFPFKSNPQHRESWPGMGSGEAPTPLQPPEEVTPHPATPARRPPSPRRSHHPRRNSLDGGGRSRGAGSAQPEPQHFQPKKHNSYPQPPQPYPAQRPPGPRYPPYTTPPRMRRQRSAPDLKESGAAV

SEQ ID NO: 861621 - protein, 1103 aa, Homo sapiens; identical to SEQ ID NO: 861620

SEQ ID NO: 861622 - protein, 1103 aa, Homo sapiens; identical to SEQ ID NO: 861620

SEQ ID NO: 861623 - protein, 928 aa, Homo sapiens
MAGASVKVAVRVRPFNARETSQDAKCVVSMQGNTTSIINPKQSKDAPKSFTFDYSYWSHTSTEDPQFASQQQVYRDIGEEMLLHAFEGYNVCIFAYGQTGAGKSYTMMGRQEPGQQGIVPQLCEDLFSRVSENQSAQLSYSVEVSYMEIYCERVRDLLNPKSRGSLRVREHPILGPYVQDLSKLAVTSYADIADLMDCGNKARTVAATNMNETSSRSHAVFTIVFTQRCHDQLTGLDSEKVSKISLVDLAGSERADSSGARGMRLKEGANINKSLTTLGKVISALADMQSKKRKSDFIPYRDSVLTWLLKENLGGNSRTAMIAALSPADINYEETLSTLRYADRTKQIRCNAIINEDPNARLIRELQEEVARLRELLMAQGLSASALEGLKTEEGSVRGALPAVSSPPAPVSPSSPTTHNGELEPSFSPNTESQIGPEEAMERLQPVDWNFAQKELLEQQGIDIKLEMEKRLQDLENQYRKEKEEADLLLEQQRLYADSDSGDDSDKRSCEESWRLISSLREQLPPTTVQTIVKRCGLPSSGKRRAPRRVYQIPQRRRLQGKDPRWATMADLKMQAVKEICYEVALADFRHGRAEIEALAALKMRELCRTYGKPDGPGDAWRAVARDVWDTVGEEEGGGAGSGGGSEEGARGAEVEDLRAHIDKLTGILQEVKLQNSSKDRELQALRDRMLRMERVIPLAQDHEDENEEGGEVPWAPPEGSEAAEEAAPSDRMPSARPPSPPLSSWERVSRLMEEDPAFRRGRLRWLKQEQLRLQGLQGSGGRGGGLRRPPARFVPPHDCKLRFPFKSNPQHRESWPGMGSGEAPTPLQPPEEVTPHPATPARRPPSPRRSHHPRRNSLDGGGRSRGAGSAQPEPQHFQPKKHNSYPQPPQPYPAQRPPGPRYPPYTTPPRMRRQRSAPDLKESGAAV

SEQ ID NO: 861624 - protein, 677 aa, Homo sapiens
SLHTGYEEAAAYIQCQFEDLNRRKDTKEIYTHFTCATDTKNVQFVFDAVTDVIIKNNLKECGLYGEAWMLVKVTTVRSVETRHLLLSHGAATSMNGTRVGQVDMDIKLTGQFIREQHCLFRSIPQPDGEVVVTLEPCEGAETYVNGKLVTEPLVLKSGNRIVMGKNHVFRFNHPEQARLERERGVPPPPGPPSEPVDWNFAQKELLEQQGIDIKLEMEKRLQDLENQYRKEKEEADLLLEQQRLYADSDSGDDSDKRSCEESWRLISSLREQLPPTTVQTIVKRCGLPSSGKRRAPRRVYQIPQRRRLQGKDPRWATMADLKMQAVKEICYEVALADFRHGRAEIEALAALKMRELCRTYGKPDGPGDAWRAVARDVWDTVGEEEGGGAGSGGGSEEGARGAEVEDLRAHIDKLTGILQEVKLQNSSKDRELQALRDRMLRMERVIPLAQDHEDENEEGGEVPWAPPEGSEAAEEAAPSDRMPSARPPSPPLSSWERVSRLMEEDPAFRRGRLRWLKQEQLRLQGLQGSGGRGGGLRRPPARFVPPHDCKLRFPFKSNPQHRESWPGMGSGEAPTPLQPPEEVTPHPATPARRPPSPRRSHHPRRNSLDGGGRSRGAGSAQPEPQHFQPKKHNSYPQPPQPYPAQRPPGPRYPPYTTPPRMRRQRSAPDLKESGAAV

SEQ ID NO: 861625 - protein, 586 aa, Homo sapiens
VGHCFPRVGQVDMDIKLTGQFIREQHCLFRSIPQPDGEVVVTLEPCEGAETYVNGKLVTEPLVLKSGNRIVMGKNHVFRFNHPEQARLERERGVPPPPGPPSEPVDWNFAQKELLEQQGIDIKLEMEKRLQDLENQYRKEKEEADLLLEQQRLYADSDSGDDSDKRSCEESWRLISSLREQLPPTTVQTIVKRCGLPSSGKRRAPRRVYQIPQRRRLQGKDPRWATMADLKMQAVKEICYEVALADFRHGRAEIEALAALKMRELCRTYGKPDGPGDAWRAVARDVWDTVGEEEGGGAGSGGGSEEGARGAEVEDLRAHIDKLTGILQEVKLQNSSKDRELQALRDRMLRMERVIPLAQDHEDENEEGGEVPWAPPEGSEAAEEAAPSDRMPSARPPSPPLSSWERVSRLMEEDPAFRRGRLRWLKQEQLRLQGLQGSGGRGGGLRRPPARFVPPHDCKLRFPFKSNPQHRESWPGMGSGEAPTPLQPPEEVTPHPATPARRPPSPRRSHHPRRNSLDGGGRSRGAGSAQPEPQHFQPKKHNSYPQPPQPYPAQRPPGPRYPPYTTPPRMRRQRSAPDLKESGAAV

SEQ ID NO: 861626 - protein, 656 aa, Homo sapiens
MAGASVKVAVRVRPFNARETSQDAKCVVSMQGNTTSIINPKQSKDAPKSFTFDYSYWSHTSTEDPQFASQQQVYRDIGEEMLLHAFEGYNVCIFAYGQTGAGKSYTMMGRQEPGQQGIVPQLCEDLFSRVSENQSAQLSYSVEVSYMEIYCERVRDLLNPKSRGSLRVREHPILGPYVQDLSKLAVTSYADIADLMDCGNKARTVAATNMNETSSRSHAVFTIVFTQRCHDQLTGLDSEKVSKISLVDLAGSERADSSGARGMRLKEGANINKSLTTLGKVISALADMQSKKRKSDFIPYRDSVLTWLLKENLGGNSRTAMIAALSPADINYEETLSTLRYADRTKQIRCNAIINEDPNARLIRELQEEVARLRELLMAQGLSASALEGLKTEEGSVRGALPAVSSPPAPVSPSSPTTHNGELEPSFSPNTESQIGPEEAMERLQETEKIIAELNETWEEKLRKTEALRMEREALLAEMGVAVREDGGTVGVFSPKKTPHLVNLNEDPLMSECLLYHIKDGVTRVGQVDMDIKLTGQFIREQHCLFRSIPQPDGEVVVTLEPCEGAETYVNGKLVTEPLVLKSGNRIVMGKNHVFRFNHPEQARLERERGVPPPPGPPSEPVDWNFAQKELLEQQGIDIKLEMEKRLQDLENQYRK

SEQ ID NO: 861627 - protein, 320 aa, Homo sapiens
MAGASVKVAVRVRPFNARETSQDAKCVVSMQGNTTSIINPKQSKDAPKSFTFDYSYWSHTSTEDPQFASQQQVYRDIGEEMLLHAFEGYNVCIFAYGQTGAGKSYTMMGRQEPGQQGIVPQLCEDLFSRVSENQSAQLSYSVEVSYMEIYCERVRDLLNPKSRGSLRVREHPILGPYVQDLSKLAVTSYADIADLMDCGNKARTVAATNMNETSSRSHAVFTIVFTQRCHDQLTGLDSEKVSKISLVDLAGSERADSSGARGMRLKEGANINKSLTTLGKVISALADMQSKKRKSDFIPYRDSVLTWLLKENLGDREDYS

SEQ ID NO: 861628 - protein, 91 aa, Homo sapiens
NYRFEPNGRFRPHASRLSVSVCGGFCFLGGMVDHKSFPSPSRPPAIFGGPDWFGWSPMRMRTESEASSPQPLSVCLSVCGGFCFLGGMVGS

SEQ ID NO: 861629 - protein, 144 aa, Homo sapiens
MAGASVKVAVRVRPFNARETSQDAKCVVSMQGNTTSIINPKQSKDAPKSFTFDYSYWSHTSTEDPQFASQQQVYRDIGEEMLLHAFEGYNVCIFAYGQTGAGKSYTMMGRQEPGQQGIVPQLCEDLFSRVSENQSAQLSYSVEC

SEQ ID NO: 861630 - protein, 1103 aa, Homo sapiens; identical to SEQ ID NO: 861620

SEQ ID NO: 861631 - protein, 1103 aa, Homo sapiens; identical to SEQ ID NO: 861620

SEQ ID NO: 861632 - protein, 1120 aa, Homo sapiens
QDQKDSCNGDSGGPLICNGYLQGLVSFGKAPCGQVGVPGVYTNLCKFTEWIEKTVQAINSGDWEPMKLTPKYILRKEFTEDPQFASQQQVYRDIGEEMLLHAFEGYNVCIFAYGQTGAGKSYTMMGRQEPGQQGIVPQLCEDLFSRVSENQSAQLSYSVEVSYMEIYCERVRDLLNPKSRGSLRVREHPILGPYVQDLSKLAVTSYADIADLMDCGNKARTVAATNMNETSSRSHAVFTIVFTQRCHDQLTGLDSEKVSKISLVDLAGSERADSSGARGMRLKEGANINKSLTTLGKVISALADMQSKKRKSDFIPYRDSVLTWLLKENLGGNSRTAMIAALSPADINYEETLSTLRYADRTKQIRCNAIINEDPNARLIRELQEEVARLRELLMAQGLSASALEGLKTEEGSVRGALPAVSSPPAPVSPSSPTTHNGELEPSFSPNTESQIGPEEAMERLQETEKIIAELNETWEEKLRKTEALRMEREALLAEMGVAVREDGGTVGVFSPKKTPHLVNLNEDPLMSECLLYHIKDGVTRVGQVDMDIKLTGQFIREQHCLFRSIPQPDGEVVVTLEPCEGAETYVNGKLVTEPLVLKSGNRIVMGKNHVFRFNHPEQARLERERGVPPPPGPPSEPVDWNFAQKELLEQQGIDIKLEMEKRLQDLENQYRKEKEEADLLLEQQRLYADSDSGDDSDKRSCEESWRLISSLREQLPPTTVQTIVKRCGLPSSGKRRAPRRVYQIPQRRRLQGKDPRWATMADLKMQAVKEICYEVALADFRHGRAEIEALAALKMRELCRTYGKPDGPGDAWRAVARDVWDTVGEEEGGGAGSGGGSEEGARGAEVEDLRAHIDKLTGILQEVKLQNSSKDRELQALRDRMLRMERVIPLAQDHEDENEEGGEVPWAPPEGSEAAEEAAPSDRMPSARPPSPPLSSWERVSRLMEEDPAFRRGRLRWLKQEQLRLQGLQGSGGRGGGLRRPPARFVPPHDCKLRFPFKSNPQHRESWPGMGSGEAPTPLQPPEEVTPHPATPARRPPSPRRSHHPRRNSLDGGGRSRGAGSAQPEPQHFQPKKHNSYPQPPQPYPAQRPPGPRYPPYTTPPRMRRQRSAPDLKESGAAV

SEQ ID NO: 861633 - protein, 1103 aa, Homo sapiens; identical to SEQ ID NO: 861620

SEQ ID NO: 861634 - protein, 657 aa, Homo sapiens
MGSWSRHSPPTRSPRLGLRKPWRGCREALLAEMGVAVREDGGTVGVFSPKKTPHLVNLNEDPLMSECLLYHIKDGVTRVGQVDMDIKLTGQFIREQHCLFRSIPQPDGEVVVTLEPCEGAETYVNGKLVTEPLVLKSGNRIVMGKNHVFRFNHPEQARLERERGVPPPPGPPSEPVDWNFAQKELLEQQGIDIKLEMEKRLQDLENQYRKEKEEADLLLEQQRLYADSDSGDDSDKRSCEESWRLISSLREQLPPTTVQTIVKRCGLPSSGKRRAPRRVYQIPQRRRLQGKDPRWATMADLKMQAVKEICYEVALADFRHGRAEIEALAALKMRELCRTYGKPDGPGDAWRAVARDVWDTVGEEEGGGAGSGGGSEEGARGAEVEDLRAHIDKLTGILQEVKLQNSSKDRELQALRDRMLRMERVIPLAQDHEDENEEGGEVPWAPPEGSEAAEEAAPSDRMPSARPPSPPLSSWERVSRLMEEDPAFRRGRLRWLKQEQLRLQGLQGSGGRGGGLRRPPARFVPPHDCKLRFPFKSNPQHRESWPGMGSGEAPTPLQPPEEVTPHPATPARRPPSPRRSHHPRRNSLDGGGRSRGAGSAQPEPQHFQPKKHNSYPQPPQPYPAQRPPGPRYPPYTTPPRMRRQRSAPDLKESGAAV

SEQ ID NO: 861635 - protein, 820 aa, Homo sapiens
MAGASVKVAVRVRPFNARETSQDAKCVVSMQGNTTSIINPKQSKDAPKSFTFDYSYWSHTSTEDPQFASQQQVYRDIGEEMLLHAFEGYNVCIFAYGQTGAGKSYTMMGRQEPGQQGIVPQLCEDLFSRVSENQSAQLSYSVEVSYMEIYCERVRDLLNPKSRGSLRVREHPILGPYVQDLSKLAVTSYADIADLMDCGNKARTVAATNMNETSSRSHAVFTIVFTQRCHDQLTGLDSEKVSKISLVDLAGSERADSSGARGMRLKEGANINKSLTTLGKVISALADMQSKKRKSDFIPYRDSVLTWLLKENLGGNSRTAMIAALSPADINYEETLSTLRYADRTKQIRCNAIINEDPNARLIRELQEEVARLRELLMAQGLSASALEGLKTEEGSVRGALPAVSSPPAPVSPSSPTTHNGELEPSFSPNTESQIGPEEAMERLQETEKIIAELNETWEEKLRKTEALRMEREALLAEMGVAVREDGGTVGVFSPKKTPHLVNLNEDPLMSECLLYHIKDGVTRVGQVDMDIKLTGQFIREQHCLFRSIPQPDGEVVVTLEPCEGAETYVNGKLVTEPLVLKSGNRIVMGKNHVFRFNHPEQARLERERGVPPPPGPPSEPVDWNFAQKELLEQQGIDIKLEMEKRLQDLENQYRKEKEEQEQLRLQGLQGSGGRGGGLRRPPARFVPPHDCKLRFPFKSNPQHRESWPGMGSGEAPTPLQPPEEVTPHPATPARRPPSPRRSHHPRRNSLDGGGRSRGAGSAQPEPQHFQPKKHNSYPQPPQPYPAQRPPGPRYPPYTTPPRMRRQRSAPDLKESGAAV

SEQ ID NO: 861636 - protein, 593 aa, Homo sapiens
MGGGLWLRVPVSPRVGQVDMDIKLTGQFIREQHCLFRSIPQPDGEVVVTLEPCEGAETYVNGKLVTEPLVLKSGNRIVMGKNHVFRFNHPEQARLERERGVPPPPGPPSEPVDWNFAQKELLEQQGIDIKLEMEKRLQDLENQYRKEKEEADLLLEQQRLYADSDSGDDSDKRSCEESWRLISSLREQLPPTTVQTIVKRCGLPSSGKRRAPRRVYQIPQRRRLQGKDPRWATMADLKMQAVKEICYEVALADFRHGRAEIEALAALKMRELCRTYGKPDGPGDAWRAVARDVWDTVGEEEGGGAGSGGGSEEGARGAEVEDLRAHIDKLTGILQEVKLQNSSKDRELQALRDRMLRMERVIPLAQDHEDENEEGGEVPWAPPEGSEAAEEAAPSDRMPSARPPSPPLSSWERVSRLMEEDPAFRRGRLRWLKQEQLRLQGLQGSGGRGGGLRRPPARFVPPHDCKLRFPFKSNPQHRESWPGMGSGEAPTPLQPPEEVTPHPATPARRPPSPRRSHHPRRNSLDGGGRSRGAGSAQPEPQHFQPKKHNSYPQPPQPYPAQRPPGPRYPPYTTPPRMRRQRSAPDLKESGAAV

SEQ ID NO: 861637 - protein, 456 aa, Homo sapiens
APVTVRNFVAWNEADLLLEQQRLYADSDSGDDSDKRSCEESWRLISSLREQLPPTTVQTIVKRCGLPSSGKRRAPRRVYQIPQRRRLQGKDPRWATMADLKMQAVKEICYEVALADFRHGRAEIEALAALKMRELCRTYGKPDGPGDAWRAVARDVWDTVGEEEGGGAGSGGGSEEGARGAEVEDLRAHIDKLTGILQEVKLQNSSKDRELQALRDRMLRMERVIPLAQDHEDENEEGGEVPWAPPEGSEAAEEAAPSDRMPSARPPSPPLSSWERVSRLMEEDPAFRRGRLRWLKQEQLRLQGLQGSGGRGGGLRRPPARFVPPHDCKLRFPFKSNPQHRESWPGMGSGEAPTPLQPPEEVTPHPATPARRPPSPRRSHHPRRNSLDGGGRSRGAGSAQPEPQHFQPKKHNSYPQPPQPYPAQRPPGPRYPPYTTPPRMRRQRSAPDLKESGAAV

SEQ ID NO: 861638 - protein, 506 aa, Homo sapiens
MAGASVKVAVRVRPFNARETSQDAKCVVSMQGNTTSIINPKQSKDAPKSFTFDYSYWSHTSTEDPQFASQQQVYRDIGEEMLLHAFEGYNVCIFAYGQTGAGKSYTMMGRQEPGQQGIVPQLCEDLFSRVSENQSAQLSYSVEVSYMEIYCERVRDLLNPKSRGSLRVREHPILGPYVQDLSKLAVTSYADIADLMDCGNKARTVAATNMNETSSRSHAVFTIVFTQRCHDQLTGLDSEKVSKISLVDLAGSERADSSGARGMRLKEGANINKSLTTLGKVISALADMQSKKRKSDFIPYRDSVLTWLLKENLGGNSRTAMIAALSPADINYEETLSTLRYADRTKQIRCNAIINEDPNARLIRELQEEVARLRELLMAQGLSASALEGLKTEEGSVRGALPAVSSPPAPVSPSSPTTHNGELEPSFSPNTESQIGPEEAMERLQETEKIIAELNETWEEKLRKTEALRMEREALLAEMGVAVREDGGTVGVFSPKKVSEESSEEA

SEQ ID NO: 861639 - protein, 361 aa, Homo sapiens
MAGASVKVAVRVRPFNARETSQDAKCVVSMQGNTTSIINPKQSKDAPKSFTFDYSYWSHTSTEDPQFASQQQVYRDIGEEMLLHAFEGYNVCIFAYGQTGAGKSYTMMGRQEPGQQGIVPQLCEDLFSRVSENQSAQLSYSVEVSYMEIYCERVRDLLNPKSRGSLRVREHPILGPYVQDLSKLAVTSYADIADLMDCGNKARTVAATNMNETSSLALNLGMLYLAPSALSFLTPLCCWFPESVPLEPFTLPDHLTSLPAPCAFMDLEFLAPSSLKPDFLPTATSSLTTGLLLSLLVLLVLVMLGASYWYRARLHQRLCQLKGPTCQYRYEHHLPATTSIQLGTVLKLPHLSALPPKIRAG

SEQ ID NO: 861640 - protein, 78 aa, Homo sapiens
DKLTGILQEVKLQNSSKDRELQALRDRMLRMERVIPLAQVGLAFCLLFSPPSALHFRSLNLPSQSLTFPKSGKNCIEV

SEQ ID NO: 861641 - protein, 246 aa, Homo sapiens
MQPFLLLLAFLLTPGAGTEEIIGGHEAKPHSRPYMAFVQFLQEKSRKRCGGILVRKDFVLTAAHCQGSSINVTLGAHNIKEQERTQQFIPVKRPIPHPAYNPKNFSNDIMLLQLERKAKWTTAVRPLRLPSSKAQVKPGQLCSVAGWGYVSMSTLATTLQEVLLTVQKDCQCERLFHGNYSRATEICVGDPKKTQTGFKGDSGGPLVCKDVAQGILSYGNKKGTPPGVYIKVSHFLPWIKRTMKRL

SEQ ID NO: 861642 - protein, 147 aa, Homo sapiens
YNPKNFSNDIMLLQLERKAKWTTAVRPLRLPSSKAQVKPGQLCSVAGWGYVSMSTLATTLQEVLLTVQKDCQCERLFHGNYSRATEICVGDPKKTQTGFKGDSGGPLVCKDVAQGILSYGNKKGTPPGVYIKVSHFLPWIKRTMKRL

SEQ ID NO: 861643 - protein, 182 aa, Homo sapiens
MQPFLLLLAFLLTPGAGTEEIIGGHEAKPHSRPYMAFVQFLQEKSRKRCGGILVRKDFVLTAAHCQGSSINVTLGAHNIKEQERTQQFIPVKRPIPHPAYNPKNFSNDIMLLQLERKAKWTTAVRPLRLPSSKAQGDSGGPLVCKDVAQGILSYGNKKGTPPGVYIKVSHFLPWIKRTMKRL

SEQ ID NO: 861644 - protein, 307 aa, Homo sapiens
MQKGKGRTSRIRRRKLCGSSESRGVNESHKSEFIELRKWLKARKFQDSNLAPACFPGTGRGLMSQTSLQEGQMIISLPESCLLTTDTVIRSYLGAYITKWKPPPSPLLALCTFLVSEKHAGHRSLWKPYLEILPKAYTCPVCLEPEVVNLLPKSLKAKAEEQRAHVQEFFASSRDFFSSLQPLFAEAVDSIFSYSALLWAWCTVNTRAVYLRPRQRECLSAEPDTCALAPYLDLLNHSPHVQVKAAFNEETHSYEIRTTSRWRKHEEVFICYGPHDNQRLFLEYGFVSVHNPHACVYVSRGWNQLCS

SEQ ID NO: 861645 - protein, 283 aa, Homo sapiens
MNESHKSEFIELRKWLKARKFQDSNLAPACFPGTGRGLMSQTSLQEGQMIISLPESCLLTTDTVIRSYLGAYITKWKPPPSPLLALCTFLVSEKHAGHRSLWKPYLEILPKAYTCPVCLEPEVVNLLPKSLKAKAEEQRAHVQEFFASSRDFFSSLQPLFAEAVDSIFSYSALLWAWCTVNTRAVYLRPRQRECLSAEPDTCALAPYLDLLNHSPHVQVKAAFNEETHSYEIRTTSRWRKHEEVFICYGPHDNQRLFLEYGFVSVHNPHACVYVSRGWNQLCS

SEQ ID NO: 861646 - protein, 440 aa, Homo sapiens
MQKGKGRTSRIRRRKLCGSSESRGVNESHKSEFIELRKWLKARKFQDSNLAPACFPGTGRGLMSQTSLQEGQMIISLPESCLLTTDTVIRSYLGAYITKWKPPPSPLLALCTFLVSEKHAGHRSLWKPYLEILPKAYTCPVCLEPEVVNLLPKSLKAKAEEQRAHVQEFFASSRDFFSSLQPLFAEAVDSIFSYSALLWAWCTVNTRAVYLRPRQRECLSAEPDTCALAPYLDLLNHSPHVQVKAAFNEETHSYEIRTTSRWRKHEEVFICYGPHDNQRLFLEYGFVSVHNPHACVYVSREILVKYLPSTDKQMDKKISILKDHGYIENLTFGWDGPSWRLLTALKLLCLEAEKFTCWKKVLLGEVISDTNEKTSLDIAQKICYYFIEETNAVLQKVSHMKDEKEALINQLTLVESLWTEELKILRASAETLHSLQTAFT

SEQ ID NO: 861647 - protein, 416 aa, Homo sapiens
MNESHKSEFIELRKWLKARKFQDSNLAPACFPGTGRGLMSQTSLQEGQMIISLPESCLLTTDTVIRSYLGAYITKWKPPPSPLLALCTFLVSEKHAGHRSLWKPYLEILPKAYTCPVCLEPEVVNLLPKSLKAKAEEQRAHVQEFFASSRDFFSSLQPLFAEAVDSIFSYSALLWAWCTVNTRAVYLRPRQRECLSAEPDTCALAPYLDLLNHSPHVQVKAAFNEETHSYEIRTTSRWRKHEEVFICYGPHDNQRLFLEYGFVSVHNPHACVYVSREILVKYLPSTDKQMDKKISILKDHGYIENLTFGWDGPSWRLLTALKLLCLEAEKFTCWKKVLLGEVISDTNEKTSLDIAQKICYYFIEETNAVLQKVSHMKDEKEALINQLTLVESLWTEELKILRASAETLHSLQTAFT

SEQ ID NO: 861648 - protein, 416 aa, Homo sapiens; identical to SEQ ID NO: 861647

SEQ ID NO: 861649 - protein, 283 aa, Homo sapiens; identical to SEQ ID NO: 861645

SEQ ID NO: 861650 - protein, 440 aa, Homo sapiens; identical to SEQ ID NO: 861646

SEQ ID NO: 861651 - protein, 245 aa, Homo sapiens [sequence omitted]

SEQ ID NO: 861652 - protein, 440 aa, Homo sapiens; identical to SEQ ID NO: 861646

SEQ ID NO: 861653 - protein, 218 aa, Homo sapiens
SFKLAFNFQRWKPPPSPLLALCTFLVSEKHAGHRSLWKPYLEILPKAYTCPVCLEPEVVNLLPKSLKAKAEEQRAHVQEFFASSRDFFSSLQPLFAEAVDSIFSYSALLWAWCTVNTRAVYLRPRQRECLSAEPDTCALAPYLDLLNHSPHVQVKAAFNEETHSYEIRTTSRWRKHEEVFICYGPHDNQRLFLEYGFVSVHNPHACVYVSRGWNQLCS

SEQ ID NO: 861654 - protein, 416 aa, Homo sapiens; identical to SEQ ID NO: 861647

SEQ ID NO: 861655 - protein, 129 aa, Homo sapiens
MQKGKGRTSRIRRRKLCGSSESRGVNESHKSEFIELRKWLKARKFQDSNLAPACFPGTGRGLMSQTSLQVEASSISSAGAVHLFSFRKACWAPISLEALPGDFTQGVYLPCLFGAGSGEPSSQIFKSKG

SEQ ID NO: 861656 - protein, 307 aa, Homo sapiens; identical to SEQ ID NO: 861644

SEQ ID NO: 861657 - protein, 106 aa, Homo sapiens
MGRGGVGFILWKNQNKTANGDCRRDPRERSRSPIERAVAPTMSLHGSHLYTSLPSLGLEQPLALTKNSLDASRPAGLSPTLTPGERQQVITEANSSWLWLKQNASS

SEQ ID NO: 861658 - protein, 295 aa, Homo sapiens [sequence omitted]

SEQ ID NO: 861659 - protein, 290 aa, Homo sapiens
METPLDVLSRAASLVHADDEKREAALRGEPRMQTLPVASALSSHRTGPPPISPSKRKFSMEPGDEDLDCDNDHVSKMSRIFNPHLNKTANGDCRRDPRERSRSPIERAVAPTMSLHGSHLYTSLPSLGLEQPLALTKNSLDASRPAGLSPTLTPGERQQNRPSVITCASAGARNCNLSHCPIAHSGCAAPGPASYRRPPSAATTCDPVVEEHFRRSLGKNYKEPEPAPNSVSITGSVDDHFAKALGDTWLQIKAAKDGASSSPESASRRGQPASPSAHMVSHSHSPSVVS

SEQ ID NO: 861660 - protein, 363 aa, Homo sapiens
PALPSAGPVRACVCVCVFGGGPCGGSGASPPVRLRALGVRPACPGPVPAPGSPAGPGRPQAGAPRAAGRLQPGMETPLDVLSRAASLVHADDEKREAALRGEPRMQTLPVASALSSHRTGPPPISPSKRKFSMEPGDEDLDCDNDHVSKMSRIFNPHLNKTANGDCRRDPRERSRSPIERAVAPTMSLHGSHLYTSLPSLGLEQPLALTKNSLDASRPAGLSPTLTPGERQQNRPSVITCASAGARNCNLSHCPIAHSGCAAPGPASYRRPPSAATTCDPVVEEHFRRSLGKNYKEPEPAPNSVSITGSVDDHFAKALGDTWLQIKAAKDGASSSPESASRRGQPASPSAHMVSHSHSPSVVS

SEQ ID NO: 861661 - protein, 295 aa, Homo sapiens [sequence omitted]

SEQ ID NO: 861662 - protein, 225 aa, Homo sapiens
AFLWEDAGLSSCSLAMIKVRNKTANGDCRRDPRERSRSPIERAVAPTMSLHGSHLYTSLPSLGLEQPLALTKNSLDASRPAGLSPTLTPGERQQNRPSVITCASAGARNCNLSHCPIAHSGCAAPGPASYRRPPSAATTCDPVVEEHFRRSLGKNYKEPEPAPNSVSITGSVDDHFAKALGDTWLQIKAAKDGASSSPESASRRGQPASPSAHMVSHSHSPSVVS

SEQ ID NO: 861663 - protein, 204 aa, Homo sapiens
METPLDVLSRAASLVHADDEKREAALRGEPRMQTLPVASALSSHRTGPPPISPSKRKFSMEPGDEDLDCDNDHVSKMSRIFNPHLNKTANGDCRRDPRERSRSPIERAVAPTMSLHGSHLYTSLPSLGLEQPLALTKNSLDASRPAGLSPTLTPGERQQNRPSVITCASAGARNCNLSHCPIAHSGCAAPGPASYRRPPSATCV

SEQ ID NO: 861664 - protein, 200 aa, Homo sapiens
METPLDVLSRAASLVHADDEKREAALRGEPRMQTLPVASALSSHRTGPPPISPSKRKFSMEPGDEDLDCDNDHVSKMSRIFNPHLNKTANGDCRRDPRERSRSPIERAVAPTMSLHGSHLYTSLPSLGLEQPLALTKNSLDASRPAGLSPTLTPGERQQNRPSVITCASAGARNCNLSQGQPASPSAHMVSHSHSPSVVS

SEQ ID NO: 861665 - protein, 291 aa, Homo sapiens [sequence omitted]

SEQ ID NO: 861666 - protein, 295 aa, Homo sapiens [sequence omitted]

SEQ ID NO: 861667 - protein, 290 aa, Homo sapiens; identical to SEQ ID NO: 861659

SEQ ID NO: 861668 - protein, 385 aa, Homo sapiens
PALPSAGPVRACVCVCVFGGGPCGGSGASPPVRLRALGVRPACPGPVPAPGSPAGPGRPQAGAPRAAGRNTWQFECDSSDAHPPGLHIQTRLQPGMETPLDVLSRAASLVHADDEKREAALRGEPRMQTLPVASALSSHRTGPPPISPSKRKFSMEPGDEDLDCDNDHVSKMSRIFNPHLNKTANGDCRRDPRERSRSPIERAVAPTMSLHGSHLYTSLPSLGLEQPLALTKNSLDASRPAGLSPTLTPGERQQNRPSVITCASAGARNCNLSHCPIAHSGCAAPGPASYRRPPSAATTCDPVVEEHFRRSLGKNYKEPEPAPNSVSITGSVDDHFAKALGDTWLQIKAAKDGASSSPESASRRGQPASPSAHMVSHSHSPSVVS

SEQ ID NO: 861669 - protein, 259 aa, Homo sapiens
MQTLPVASALSSHRTGPPPISPSKRKFSMEPGDEDLDCDNDHVSKMSRIFNPHLNKTANGDCRRDPRERSRSPIERAVAPTMSLHGSHLYTSLPSLGLEQPLALTKNSLDASRPAGLSPTLTPGERQQNRPSVITCASAGARNCNLSHCPIAHSGCAAPGPASYRRPPSAATTCDPVVEEHFRRSLGKNYKEPEPAPNSVSITGSVDDHFAKALGDTWLQIKAAKDGASSSPESASRRGQPASPSAHMVSHSHSPSVVS

SEQ ID NO: 861670 - protein, 206 aa, Homo sapiens
MNKTANGDCRRDPRERSRSPIERAVAPTMSLHGSHLYTSLPSLGLEQPLALTKNSLDASRPAGLSPTLTPGERQQNRPSVITCASAGARNCNLSHCPIAHSGCAAPGPASYRRPPSAATTCDPVVEEHFRRSLGKNYKEPEPAPNSVSITGSVDDHFAKALGDTWLQIKAAKDGASSSPESASRRGQPASPSAHMVSHSHSPSVVS

SEQ ID NO: 861671 - protein, 148 aa, Homo sapiens
KSDLPKCLTYRGRWVLSAEPTLTVAASPALGCLREGAATVPVCLQPPVSDCLPSCLPAAATTCDPVVEEHFRRSLGKNYKEPEPAPNSVSITGSVDDHFAKALGDTWLQIKAAKDGASSSPESASRRGQPASPSAHMVSHSHSPSVVS

SEQ ID NO: 861672 - protein, 1074 aa, Homo sapiens
PALGAPAPPGRGGGEGSPPRRPSEPAPSPAWRLGTPAHEVDAPGEDLGAQPGEKVLSQTEHQPWGPWTTIMETESEQNSNSTNGSSSSGGSSRPQIAQMSLYERQAVQALQALQRQPNAAQYFHQFMLQQQLSNAQLHSLAAVQQATIAASRQASSPNTSTTQQQTTTTQASINLATTSAAQLISRSQSVSSPSATTLTQSVLLGNTTSPPLNQSQAQMYLRPQLGNLLQVNRTLGRNVPLASQLILMPNGAVAAVQQEVPSAQSPGVHADADQVQNLAVRNQQASAQGPQMQGSTQKAIPPGASPVSSLSQASSQALAVAQASSGATNQSLNLSQAGGGSGNSIPGSMGPGGGGQAHGGLGQLPSSGMGGGSCPRKGTGVVQPLPAAQTVTVSQGSQTEAESAAAKKAEADGSGQQNVGMNLTRTATPAPSQTLISSATYTQIQPHSLIQQQQQIHLQQKQVVIQQQIAIHHQQQFQHRQSQLLHTATHLQLAQQQQQQQQQQQQQQQPQATTLTAPQPPQVPPTQQVPPSQSQQQAQTLVVQPMLQSSPLSLPPDAAPKPPIPIQSKPPVAPIKPPQLGAAKMSAAQQPPPHIPVQVVGTRQPGTAQAQALGLAQLAAAVPTSRGMPGTVQSGQAHLASSPPSSQAPGALQECPPTLAPGMTLAPVQGTAHVVKGGATTSSPVVAQVPAAFYMQSVHLPGKPQTLAVKRKADSEEERDDVSTLGSMLPAKASPVAESPKVMDEKSSLGEKAESVANVNANTPSSELVALTPAPSVPPPTLAMVSRQMGDSKPPQAIVKPQILTHIIEGFVIQEGAEPFPVGCSQLLKESEKPLQTGLPTGLTENQSGGPLGVDSPSAELDKKANLLKCEYCGKYAPAEQFRGSKRFCSMTCAKRYNVSCSHQFRLKRKKMKEFQEANYARVRRRGPRRSSSDIARAKIQGKCHRGQEDSSRGSDNSSYDEALSPTSPGPLSVRAGHGERDLGNPNTAPPTPELHGINPVFLSSNPSRWSVEEVYEFIASLQGCQEIAEEFRSQEIDGQALLLLKEEHLMSAMNIKLGPALKICAKINVLKET

SEQ ID NO: 861673 - protein, 906 aa, Homo sapiens
PALGAPAPPGRGGGEGSPPRRPSEPAPSPAWRLGTPAHEVDAPGEDLGAQPGEKVLSQTEHQPWGPWTTIMETESEQNSNSTNGSSSSGGSSRPQIAQMSLYERQAVQALQALQRQPNAAQYFHQFMLQQQLSNAQLHSLAAVQQATIAASRQASSPNTSTTQQQTTTTQASINLATTSAAQLISRSQSVSSPSATTLTQSVLLGNTTSPPLNQSQAQMYLRPQLGNLLQVNRTLGRNVPLASQLILMPNGAVAAVQQEVPSAQSPGVHADADQVQNLAVRNQQASAQGPQMQGSTQKAIPPGASPVSSLSQASSQALAVAQASSGATNQSLNLSQAGGGSGNSIPGSMGPGGGGQAHGGLGQLPSSGMGGGSCPRKGTGVVQPLPAAQTVTVSQGSQTEAESAAAKKAEADGSGQQNVGMNLTRTATPAPSQTLISSATYTQIQPHSLIQQQQQIHLQQKQVVIQQQIAIHHQQQFQHRQSQLLHTATHLQLAQQQQQQQQQQQQQQQPQATTLTAPQPPPGPTYSAGPTFPGKPQTLAVKRKADSEEERDDVSTLGSMLPAKASPVAESPKVMDEKSSLGEKAESVANVNANTPSSELVALTPAPSVPPPTLAMVSRQMGDSKPPQAIVKPQILTHIIEGFVIQEGAEPFPVGCSQLLKESEKPLQTGLPTGLTENQSGGPLGVDSPSAELDKKANLLKCEYCGKYAPAEQFRGSKRFCSMTCAKRYNVSCSHQFRLKRKKMKEFQEANYARVRRRGPRRSSSDIARAKIQGKCHRGQEDSSRGSDNSSYDEALSPTSPGPLSVRAGHGERDLGNPNTAPPTPELHGINPVFLSSNPSRWSVEEVYEFIASLQGCQEIAEEFRSQEIDGQALLLLKEEHLMSAMNIKLGPALKICAKINVLKET

SEQ ID NO: 861674 - protein, 347 aa, Homo sapiens [sequence omitted]

SEQ ID NO: 861675 - protein, 520 aa, Homo sapiens
PALGAPAPPGRGGGEGSPPRRPSEPAPSPAWRLGTPAHEVDAPGEDLGAQPGEKVLSQTEHQPWGPWTTIMETESEQNSNSTNGSSSSGGSSRPQIAQMSLYERQAVQALQALQRQPNAAQYFHQFMLQQQLSNAQLHSLAAVQQATIAASRQASSPNTSTTQQQTTTTQASINLATTSAAQLISRSQSVSSPSATTLTQSVLLGNTTSPPLNQSQAQMYLRPQLGNLLQVNRTLGRNVPLASQLILMPNGAVAAVQQEVPSAQSPGVHADADQVQNLAVRNQQASAQGPQMQGSTQKAIPPGASPVSSLSQASSQALAVAQASSGATNQSLNLSQAGGGSGNSIPGSMGPGGGGQAHGGLGQLPSSGMGGGSCPRKGTGVVQPLPAAQTVTVSQGSQTEAESAAAKKAEADGSGQQNVGMNLTRTATPAPSQTLISSATYTQIQPHSLIQQQQQIHLQQKQVVIQQQIAIHHQQQFQHRQSQLLHTATHLQLAQQQQQQQQQQQQQQQPQATTLSGQKI

SEQ ID NO: 861676 - protein, 358 aa, Homo sapiens
PALGAPAPPGRGGGEGSPPRRPSEPAPSPAWRLGTPAHEVDAPGEDLGAQPGEKVLSQTEHQPWGPWTTIMETESEQNSNSTNGSSSSGGSSRPQIAQMSLYERQAVQALQALQRQPNAAQYFHQFMLQQQLSNAQLHSLAAVQQATIAASRQASSPNTSTTQQQTTTTQASINLATTSAAQLISRSQSVSSPSATTLTQSVLLGNTTSPPLNQSQAQMYLRPQLGNLLQVNRTLGRNVPLASQLILMPNGAVAAVQQEVPSAQSPGVHADADQVQNLAVRNQQASAQGPQMQGSTQKAIPPGASPVSSLSQASSQALAVAQASSGATNQSLNLSQAGGGSGNSIPGSMGPMGEVGFF

SEQ ID NO: 861677 - protein, 783 aa, Homo sapiens
MQGSTQKAIPPGASPVSSLSQASSQALAVAQASSGATNQSLNLSQAGGGSGNSIPGSMGPGGGGQAHGGLGQLPSSGMGGGSCPRKGTGVVQPLPAAQTVTVSQGSQTEAESAAAKKAEADGSGQQNVGMNLTRTATPAPSQTLISSATYTQIQPHSLIQQQQQIHLQQKQVVIQQQIAIHHQQQFQHRQSQLLHTATHLQLAQQQQQQQQQQQQQQQPQATTLTAPQPPQVPPTQQVPPSQSQQQAQTLVVQPMLQSSPLSLPPDAAPKPPIPIQSKPPVAPIKPPQLGAAKMSAAQQPPPHIPVQVVGTRQPGTAQAQALGLAQLAAAVPTSRGMPGTVQSGQAHLASSPPSSQAPGALQECPPTLAPGMTLAPVQGTAHVVKGGATTSSPVVAQVPAAFYMQSVHLPGKPQTLAVKRKADSEEERDDVSTLGSMLPAKASPVAESPKVMDEKSSLGEKAESVANVNANTPSSELVALTPAPSVPPPTLAMVSRQMGDSKPPQAIVKPQILTHIIEGFVIQEGAEPFPVGCSQLLKESEKPLQTGLPTGLTENQSGGPLGVDSPSAELDKKANLLKCEYCGKYAPAEQFRGSKRFCSMTCAKRYNVSCSHQFRLKRKKMKEFQEANYARVRRRGPRRSSSDIARAKIQGKCHRGQEDSSRGSDNSSYDEALSPTSPGPLSVRAGHGERDLGNPNTAPPTPELHGINPVFLSSNPSRWSVEEVYEFIASLQGCQEIAEEFRSQEIDGQALLLLKEEHLMSAMNIKLGPALKICAKINVLKET

SEQ ID NO: 861678 - protein, 705 aa, Homo sapiens
PALGAPAPPGRGGGEGSPPRRPSEPAPSPAWRLGTPAHEVDAPGEDLGAQPGEKVLSQTEHQPWGPWTTIMETESEQNSNSTNGSSSSGGSSRPQIAQMSLYERQAVQALQALQRQPNAAQYFHQFMLQQQLSNAQLHSLAAVQQATIAASRQASSPNTSTTQQQTTTTQASINLATTSAAQLISRSQSVSSPSATTLTQSVLLGNTTSPPLNQSQAQMYLRPQLGNLLQVNRTLGRNVPLASQLILMPNGAVAAVQQEVPSAQSPGVHADADQVQNLAVRNQQASAQGPQMQGSTQKAIPPGASPVSSLSQASSQALAVAQASSGATNQSLNLSQAGGGSGNSIPGSMGPGGGGQAHGGLGQLPSSGMGGGSCPRKGTGVVQPLPAAQTVTVSQGSQTEAESAAAKKAEADGSGQQNVGMNLTRTATPAPSQTLISSATYTQIQPHSLIQQQQQIHLQQKQVVIQQQIAIHHQQQFQHRQSQLLHTATHLQLAQQQQQQQQQQQQQQQPQATTLTAPQPPQVPPTQQVPPSQSQQQAQTLVVQPMLQSSPLSLPPDAAPKPPIPIQSKPPVAPIKPPQLGAAKMSAAQQPPPHIPVQVVGTRQPGTAQAQALGLAQLAAAVPTSRGMPGTVQSGQAHLASSPPSSQAPGALQECPPTLAPGMTLAPVQGTAHVVKGGATTSSPVVAQVPAAFYMQSVHLPVSDV

SEQ ID NO: 861679 - protein, 494 aa, Homo sapiens
PALGAPAPPGRGGGEGSPPRRPSEPAPSPAWRLGTPAHEVDAPGEDLGAQPGEKVLSQTEHQPWGPWTTIMETESEQNSNSTNGSSSSGGSSRPQIAQMSLYERQAVQALQALQRQPNAAQYFHQFMLQQQLSNAQLHSLAAVQQATIAASRQASSPNTSTTQQQTTTTQASINLATTSAAQLISRSQSVSSPSATTLTQSVLLGNTTSPPLNQSQAQMYLRPQLGNLLQVNRTLGRNVPLASQLILMPNGAVAAVQQEVPSAQSPGVHADADQVQNLAVRNQQASAQGPQMQGSTQKAIPPGASPVSSLSQASSQALAVAQASSGATNQSLNLSQAGGGSGNSIPGSMGPGGGGQAHGGLGQLPSSGMGGGSCPRKGTGVVQPLPAAQTVTVSQGSQTEAESAAAKKAEADGSGQQNVGMNLTRTATPAPSQTLISSATYTQIQPHSMWLLSFFLHPTVPLQFMLFSTLFFSSISALSYSFIKPECVGLRSGV

SEQ ID NO: 861680 - protein, 1143 aa, Homo sapiens [sequence omitted]

SEQ ID NO: 861681 - protein, 1016 aa, Homo sapiens
MGDNPFQPKSNSKMAELFMECEEEELEPWQKKVKEVEDDDDDEPIFVGEISSSKPAISNILNRVNPSSYSRGLKNGALSRGITAAFKPTSQHYTNPTSNPVPASPINFHPESRSSDSSVIVQPFSKPGYITNSSRVVSNKSSELLFDLTQDTGLSHYQGGPTLSMAGMSESSFLSKRPSTSEVNNVNPKKPKPSESVSGANSSAVLPSVKSPSVTSSQAMLAKGTNTSSNQSKNGTPFPRACPKCNIHFNLLDPLKNHMKYCCPDMINNFLGLAKTEFSSTVNKNTTIDSEKGKLIMLVNDFYYGKHEGDVQEEQKTHTTFKCFSCLKILKNNIRFMNHMKHHLELEKQSSESWENHTTCQHCYRQFPTPFQLQCHIESTHTPHEFSTICKICELSFETEHVLLQHMKDNHKPGEMPYVCQVCNYRSSSFSDVETHFRTSHENTKNLLCPFCLKVIKIATPYMHHYMKHQKKGIHRCTKCRLQFLTCKEKMDHKTQHHRTFIKPKQLEGLPPGTKVTIRASVGPLQSGASPTPSISASASTLQLSPPRTKNITAKNPAKSNTSKPNTIKSNASKPNTSKPNGSKSKYKPKISNMQKKQSTLASSNKKSKVNTALRNLRYRRGIHKCIECCSEIKDFANHFPTYVHCSFCRYNTSCSKAYVNHMMSFHSNRPSKRFCIFKKHSENLRCVGGQIECDLPKLHKLVVEPRLTLGLLTPTFNNWYDRGITLVCLNCDFLSDVSGLDNMATHLSQHKTHTCQVVMQKVSVCIPTSEHLSELKKEAPAKEQEPVSKEIARPNMAERETETSNSESKQDKAASSKEKNGCNANSFEGSSTTKSEESITVSDKENETCLADQETGSKNIVSCDSNIGADKVEKKKQIQHVCQEMELKMCQSSENIILSDQIKDHNSSEARFSSKNIKDLRLASDNVSIDQFLRKRHEPESVSSDVSEQGSIHLEPLTPSEVLEYEATEILQKGSGDPSAKTDEVVSDQTDDIPGGNNPSTTEATVDLEDEKERS

SEQ ID NO: 861682 - protein, 1180 aa, Homo sapiens
MTFSLSKPTDWGSLHTRRARNARLLACKFRAVRILGLPPGHTSQQLAPTWRQGPGPRPGPARGGARGSSRARDAAHMPVPASRVGEKTGSSDTGRLTRSLPMRQRAGCTRAPPFPRLGCQLRNGSRRRRRSVVFRAPPFPPPLSPPPQGSSQADPLRSRKENRNNLLACLESHGNSKMAELFMECEEEELEPWQKKVKEVEDDDDDEPIFVGEISSSKPAISNILNRVNPSSYSRGLKNGALSRGITAAFKPTSQHYTNPTSNPVPASPINFHPESRSSDSSVIVQPFSKPGYITNSSRVVSNKSSELLFDLTQDTGLSHYQGGPTLSMAGMSESSFLSKRPSTSEVNNVNPKKPKPSESVSGANSSAVLPSVKSPSVTSSQAMLAKGTNTSSNQSKNGTPFPRACPKCNIHFNLLDPLKNHMKYCCPDMINNFLGLAKTEFSSTVNKNTTIDSEKGKLIMLVNDFYYGKHEGDVQEEQKTHTTFKCFSCLKILKNNIRFMNHMKHHLELEKQSSESWENHTTCQHCYRQFPTPFQLQCHIESTHTPHEFSTICKICELSFETEHVLLQHMKDNHKPGEMPYVCQVCNYRSSSFSDVETHFRTSHENTKNLLCPFCLKVIKIATPYMHHYMKHQKKGIHRCTKCRLQFLTCKEKMDHKTQHHRTFIKPKQLEGLPPGTKVTIRASVGPLQSGASPTPSISASASTLQLSPPRTKNITAKNPAKSNTSKPNTIKSNASKPNTSKPNGSKSKYKPKISNMQKKQSTLASSNKKSKVNTALRNLRYRRGIHKCIECCSEIKDFANHFPTYVHCSFCRYNTSCSKAYVNHMMSFHSNRPSKRFCIFKKHSENLRCVGGQIECDLPKLHKLVVEPRLTLGLLTPNFNNWYDRGITLVCLNCDFLSDVSGLDNMATHLSQHKTHTCQVVMQKVSVCIPTSEHLSELKKEAPAKEQEPVSKEIARPNMAERETETSNSESKQDKAASSKEKNGCNANSFEGSSTTKSEESITVSDKENETCLADQETGSKNIVSCDSNIGADKVEKKKQIQHVCQEMELKMCQSSENIILSDQIKDHNSSEARFSSKNIKDLRLASDNVSIDQFLRKRHEPESVSSDVSEQGSIHLEPLTPSEVLEYEATEILQKGSGDPSAKTDEVVSDQTDDIPGGNNPSTTEATVDLEDEKERS

SEQ ID NO: 861683 - protein, 176 aa, Homo sapiens
MTFSLSKPTDWGSLHTRRARNARLLACKFRAVRILGLPPGHTSQQLAPTWRQGPGPRPGPARGGARGSSRARDAAHMPVPASRVGEKTGSSDTGRLTRSLPMRQRAGCTRAPPFPRLGCQLRNGSRRRRRSVVFRAPPFPPPLSPPPQGSSQADPLRSRKENRNNLLACLESHVLR

SEQ ID NO: 861684 - protein, 164 aa, Homo sapiens
MRPEVNLHPSEERDSCTGICDVDQELWNLGAEGQQSVDTFEDDDDDDSFSVGRDIKFNNQQSYQDILNRVNPSSYSRGLKNGALSRGITAAFKPTSQHYTNPTSNPVPASPINFHPESRSSDSSVIVQPFSKPVSVSKTIRPAQGSIGCCLSISTVPSYNSGLS

SEQ ID NO: 861685 - protein, 236 aa, Homo sapiens
MTFSLSKPTDWGSLHTRRARNARLLACKFRAVRILGLPPGHTSQQLAPTWRQGPGPRPGPARGGARGSSRARDAAHMPVPASRVGEKTGSSDTGRLTRSLPMRQRAGCTRAPPFPRLGCQLRNGSRRRRRSVVFRAPPFPPPLSPPPQGSSQADPLRSRRRKGDQRGFGICRHRAPHFAQMTGRSTFAPSFLSKRPPLLCHRIPVIVYRRRALRRNVELETKFSELCKVHLLRRKE

SEQ ID NO: 861686 - protein, 961 aa, Homo sapiens
MGDNPFQPKSNSKMAELFMECEEEELEPWQKKVKEVEDDDDDEPIFVGEISSSKPAISNILNRVNPSSYSRGLKNGALSRGITAAFKPTSQHYTNPTSNPVPASPINFHPESRSSDSSVIVQPFSKPGYITNSSRVVSNKSSELLFDLTQDTGLSHYQGGPTLSMAGMSESSFLSKRPSTSEVNNVNPKKPKPSESVSGANSSAVLPSVKSPSVTSSQAMLAKGTNTSSNQSKNGTPFPRACPKCNIHFNLLDPLKNHMKYCCPDMINNFLGLAKTEFSSTVNKNTTIDSEKGKLIMLVNDFYYGKHEGDVQEEQKTHTTFKCFSCLKILKNNIRFMNHMKHHLELEKQSSESWENHTTCQHCYRQFPTPFQLQCHIESTHTPHEFSTICKICELSFETEHVLLQHMKDNHKPGEMPYVCQVCNYRSSSFSDVETHFRTSHENTKNLLCPFCLKVIKIATPYMHHYMKHQKKGIHRCTKCRLQFLTCKEKMDHKTQHHRTFIKPKQLEGLPPGTKVTIRASVGPLQSGASPTPSISASASTLQLSPPRTKNITAKNPAKSNTSKPNTIKSNASKPNTSKPNGSKSKYKPKISNMQKKQSTLASSNKKSKVNTALRNLRYRRGIHKCIECCSEIKDFANHFPTYVHCSFCRYNTSCSKAYVNHMMSFHSNRPSKRFCIFKKHSENLRGITLVCLNCDFLSDVSGLDNMATHLSQHKTHTCQVVMQKVSVCIPTSEHLSELKKEAPAKEQEPVSKEIARPNMAERETETSNSESKQDKAASSKEKNGCNANSFEGSSTTKSEESITVSDKENETCLADQETGSKNIVSCDSNIGADKVEKKKQIQHVCQEMELKMCQSSFSSKNIKDLRLASDNVSIDQFLRKRHEPESVSSDVSEQGSIHLEPLTPSEVLEYEATEILQKGSGDPSAKTDEVVSDQTDDIPGGNNPSTTEATVDLEDEKERS

SEQ ID NO: 861687 - protein, 176 aa, Homo sapiens; identical to SEQ ID NO: 861683

SEQ ID NO: 861688 - protein, 220 aa, Homo sapiens
MAERETETSNSESKQDKAASSKEKNGCNANSFEGSSTTKSEESITVSDKENETCLADQETGSKNIVSCDSNIGADKVEKKKQIQHVCQEMELKMCQSSENIILSDQIKDHNSSEARFSSKNIKDLRLASDNVSIDQFLRKRHEPESVSSDVSEQGSIHLEPLTPSEVLEYEATEILQKGSGDPSAKTDEVVSDQTDDIPGGNNPSTTEATVDLEDEKERS

SEQ ID NO: 861689 - protein, 941 aa, Homo sapiens
MVFLPLKWSLATMSFLLSSLLALLTVSTPSWCQSTEASPKRSDGTPFPWNKIRLPEYVIPVHYDLLIHANLTTLTFWGTTKVEITASQPTSTIILHSHHLQISRATLRKGAGERLSEEPLQVLEHPRQEQIALLAPEPLLVGLPYTVVIHYAGNLSETFHGFYKSTYRTKEGELRILASTQFEPTAARMAFPCFDEPAFKASFSIKIRREPRHLAISNMPLVKSVTVAEGLIEDHFDVTVKMSTYLVAFIISDFESVSKITKSGVKVSVYAVPDKINQADYALDAAVTLLEFYEDYFSIPYPLPKQDLAAIPDFQSGAMENWGLTTYRESALLFDAEKSSASSKLGITMTVAHELAHQWFGNLVTMEWWNDLWLNEGFAKFMEFVSVSVTHPELKVGDYFFGKCFDAMEVDALNSSHPVSTPVENPAQIREMFDDVSYDKGACILNMLREYLSADAFKSGIVQYLQKHSYKNTKNEDLWDSMASICPTDGVKGMDGFCSRSQHSSSSSHWHQEGVDVKTMMNTWTLQKGFPLITITVRGRNVHMKQEHYMKGSDGAPDTGYLWHVPLTFITSKSDMVHRFLLKTKTDVLILPEEVEWIKFNVGMNGYYIVHYEDDGWDSLTGLLKGTHTAVSSNDRASLINNAFQLVSIGKLSIEKALDLSLYLKHETEIMPVFQGLNELIPMYKLMEKRDMNEVETQFKAFLIRLLRDLIDKQTWTDEGSVSERMLRSQLLLLACVHNYQPCVQRAEGYFRKWKESNGNLSLPVDVTLAVFAVGAQSTEGWDFLYSKYQFSLSSTEKSQIEFALCRTQNKEKLQWLLDESFKGDKIKTQEFPQILTLIGRNPVGYPLAWQFLRKNWNKLVQKFELGSSSIAHMVMGTTNQFSTRTRLEEVKGFFSSLKENGSQLRCVQQTIETIEENIGWMDKNFDKIRVWLQSEKLERM

SEQ ID NO: 861690 - protein, 948 aa, Homo sapiens
MVFLPLKWSLATMSFLLSSLLALLTVSTPSWCQSTEASPKRSDGTPFPWNKIRLPEYVIPVHYDLLIHANLTTLTFWGTTKVEITASQPTSTIILHSHHLQISRATLRKGAGERLSEEPLQVLEHPRQEQIALLAPEPLLVGLPYTVVIHYAGNLSETFHGFYKSTYRTKEGELRILASTQFEPTAARMAFPCFDEPAFKASFSIKIRREPRHLAISNMPLVKSVTVAEGLIEDHFDVTVKMSTYLVAFIISDFESVSKITKSGVKVSVYAVPDKINQADYALDAAVTLLEFYEDYFSIPYPLPKQDLAAIPDFQSGAMENWGLTTYRESALLFDAEKSSASSKLGITMTVAHELAHQWFGNLVTMEWWNDLWLNEGFAKFMEFVSVSVTHPELKVGDYFFGKCFDAMEVDALNSSHPVSTPVENPAQIREMFDDVSYDKGACILNMLREYLSADAFKSGIVQYLQKHSYKNTKNEDLWDSMASICPTDGVKGMDGFCSRSQHSSSSSHWHQEGVDVKTMMNTWTLQKGFPLITITVRGRNVHMKQEHYMKGSDGAPDTGYLWHVPLTFITSKSDMVHRFLLKTKTDVLILPEEVEWIKFNVGMNGYYIVHYEDDGWDSLTGLLKGTHTAVSSNDRASLINNAFQLVSIGKLSIEKALDLSLYLKHETEIMPVFQGLNELIPMYKLMEKRDMNEVETQFKAFLIRLLRDLIDKQTWTDEGSVSERMLRSQLLLLACVHNYQPCVQRAEGYFRKWKESNGNLSLPVDVTLAVFAVGAQSTEGWDFLYSKYQFSLSSTEKSQIEFALCRTQNKEKLQWLLDESFKGDKIKTQEFPQILTLIGRNPVGYPLAWQFLRKNWNKLVQKFELGSSSIAHMVMGTTNQFSTRTRLEEVKGFFSSLKENGSQLRCVQQTIETIEENIGWMDKNFDKIRVWLQSEKLEHDPEADATG

SEQ ID NO: 861691 - protein, 948 aa, Homo sapiens; identical to SEQ ID NO: 861690

SEQ ID NO: 861692 - protein, 941 aa, Homo sapiens; identical to SEQ ID NO: 861689

SEQ ID NO: 861693 - protein, 941 aa, Homo sapiens; identical to SEQ ID NO: 861689

SEQ ID NO: 861694 - protein, 115 aa, Homo sapiens
MVFLPLKWSLATMSFLLSSLLALLTVSTPSWCQSTEASPKRSDGTPFPWNKIRLPEYVIPVHYDLLIHANLTTHAAVAYRTCLGDGARWPPQRITQAEQQPSSPLGCAAQSSKHA

SEQ ID NO: 861695 - protein, 941 aa, Homo sapiens; identical to SEQ ID NO: 861689

SEQ ID NO: 861696 - protein, 948 aa, Homo sapiens; identical to SEQ ID NO: 861690

SEQ ID NO: 861697 - protein, 111 aa, Homo sapiens
QVFPQLFCTFLSIDLECLWNTQSVPCVNHLPQDYQLQAMDHAPGFHLFLAPISVAHIIGPQQTGSHAGGSHMVKNCRWPLGDEGGLQSTASKKLKCSVLQPCVTEFCQQPE

SEQ ID NO: 861698 - protein, 249 aa, Homo sapiens
NSRIRVPWEENFFLAWAPCRSVCQPSSPAYQCRALPTPPPAPPVSAMAKAYDHLFKLLLIGDSGVGKTCLIIRFAEDNFNNTYISTIGIDFKIRTVDIEGKKIKLQVWDTAGQERFKTITTAYYRGAMGIILVYDITDEKSFENIQNWMKSIKENASAGVERLLLGNKCDMEAKRKVQKEQADKLAREHGIRFFETSAKSSMNVDEAFSSLARDILLKSGGRRSGNGNKPPSTDLKTCDKKNTNKCSLG

SEQ ID NO: 861699 - protein, 249 aa, Homo sapiens; identical to SEQ ID NO: 861698

SEQ ID NO: 861700 - protein, 249 aa, Homo sapiens; identical to SEQ ID NO: 861698

SEQ ID NO: 861701 - protein, 249 aa, Homo sapiens; identical to SEQ ID NO: 861698

SEQ ID NO: 861702 - protein, 249 aa, Homo sapiens; identical to SEQ ID NO: 861698

SEQ ID NO: 861703 - protein, 250 aa, Homo sapiens
LFPGAWAEREENFFLAWAPCRSVCQPSSPAYQCRALPTPPPAPPVSAMAKAYDHLFKLLLIGDSGVGKTCLIIRFAEDNFNNTYISTIGIDFKIRTVDIEGKKIKLQVWDTAGQERFKTITTAYYRGAMGIILVYDITDEKSFENIQNWMKSIKENASAGVERLLLGNKCDMEAKRKVQKEQADKLAREHGIRFFETSAKSSMNVDEAFSSLARDILLKSGGRRSGNGNKPPSTDLKTCDKKNTNKCSLG

SEQ ID NO: 861704 - protein, 249 aa, Homo sapiens; identical to SEQ ID NO: 861698

SEQ ID NO: 861705 - protein, 281 aa, Homo sapiens
NSRIRVPWEENFFLAWAPCRSVCQPSSPAYQCRALPTPPPAPPVSAMAKAYDHLFKLLLIGDSGVGKTCLIIRFAEDNFNNTYISTIGEPAGHVPDPDSPVTSFSGSRITSDPTFQSPERIDFKIRTVDIEGKKIKLQVWDTAGQERFKTITTAYYRGAMGIILVYDITDEKSFENIQNWMKSIKENASAGVERLLLGNKCDMEAKRKVQKEQADKLAREHGIRFFETSAKSSMNVDEAFSSLARDILLKSGGRRSGNGNKPPSTDLKTCDKKNTNKCSLG

SEQ ID NO: 861706 - protein, 119 aa, Homo sapiens
EFEDPGTMGGKLLPGLGSVPLCLPTVQSRLPRLLLGNKCDMEAKRKVQKEQADKLAREHGIRFFETSAKSSMNVDEAFSSLARDILLKSGGRRSGNGNKPPSTDLKTCDKKNTNKCSLG

SEQ ID NO: 861707 - protein, 230 aa, Homo sapiens
MASLGLQLVGYILGLLGLLGTLVAMLLPSWKTSSYVGASIVTAVGFSKGLWMECATHSTGITQCDIYSTLLGLPADIQAAQAMMVTSSAISSLACIISVVGMRCTVFCQESRAKDRVAVAGGVFFILGGLLGFIPVAWNLHGILRDFYSPLVPDSMKFEIGEALYLGIISSLFSLIAGIILCFSCSSQRNRSNYYDAYQAQPLATRSSPRPGQPPKVKSEFNSYSLTGYV

SEQ ID NO: 861708 - protein, 230 aa, Homo sapiens; identical to SEQ ID NO: 861707

SEQ ID NO: 861709 - protein, 129 aa, Homo sapiens
MFPLPWSGSEGSYTKGIFPHQSRHDWLLKNSSTPPRTSLSAERDFVQEEIRVSNEYLPITDPFPITQGPRLEQNGCITVLCTCQGMWVWVPCGWFTHMPTRYGVTVCVCMGCTSKCLPMCLSGQCVPSV

SEQ ID NO: 861710 - protein, 68 aa, Homo sapiens
GALRSWTQHGISMPTVLSLRSWTQHRGHGYAMLHCCLGLQLRWEWRMVPRKTVPPLRSENVPFTLEWE

SEQ ID NO: 861711 - protein, 104 aa, Homo sapiens
KQQHHQLLNCLIILFALSRLPQRLHNGLVRLDLQVLFAHHIAIGGVVPKCLGFLSQLPGVGVENGSQEDSSTSKVRKCSLYPGVGVRGHTPKVFSLTSLGMTGF

SEQ ID NO: 861712 - protein, 150 aa, Homo sapiens
MASLGLQLVGYILGLLGLLGTLVAMLLPSWKTSSYVGASIVTAVGFSKGLWMECATHSTGITQCDIYSTLLGLPADIQAAQAMMVTSSAISSLACIISVVGMRCTVFCQESRAKDRVAVAGGVFFILGGLLGFIPVAWNLHGILRDFYYA

SEQ ID NO: 861713 - protein, 209 aa, Homo sapiens
NQARYEAWWLIGRGVGASIVTAVGFSKGLWMECATHSTGITQCDIYSTLLGLPADIQAAQAMMVTSSAISSLACIISVVGMRCTVFCQESRAKDRVAVAGGVFFILGGLLGFIPVAWNLHGILRDFYSPLVPDSMKFEIGEALYLGIISSLFSLIAGIILCFSCSSQRNRSNYYDAYQAQPLATRSSPRPGQPPKVKSEFNSYSLTGYV

SEQ ID NO: 861714 - protein, 230 aa, Homo sapiens; identical to SEQ ID NO: 861707

SEQ ID NO: 861715 - protein, 202 aa, Homo sapiens
MASLGLQLVGYILGLLGLLGTLVAMLLPSWKTSSYVGASIVTAVGFSKGLWMECATHSTGITQCDIYSTLLGLPADIQAAQAMMVTSSAISSLACIISVVGMRCTVFCQESRAKDRVAVAGGVFFILGGLLGFIPVAWNLHGILRDFYSPLVPDSMKFEIGEALYLGIISSLFSLIVHPSPTPPSPNPQCINCFLMLSIHNF

SEQ ID NO: 861716 - protein, 35 aa, Homo sapiens
MASLGLQLVGYILGLLGLLGTLVAMLLPSWKTSSY

SEQ ID NO: 861717 - protein, 369 aa, Homo sapiens
MPRAPKRQRCMPEEDLQSQSETQGLEGAQAPLAVEEDASSSTSTSSSFPSSFPSSSSSSSSSCYPLIPSTPEEVSADDETPNPPQSAQIACSSPSVVASLPLDQSDEGSSSQKEESPSTLQVLPDSESLPRSEIDEKVTDLVQFLLFKYQMKEPITKAEILESVIKNYEDHFPLLFSEASECMLLVFGIDVKEVDPTGHSFVLVTSLGLTYDGMLSDVQSMPKTGILILILSIIFIEGYCTPEEVIWEALNMMGLYDGMEHLIYGEPRKLLTQDWVQENYLEYRQVPGSDPARYEFLWGPRAHAEIRKMSLLKFLAKVNGSDPRSFPLWYEEALKDEEERAQDRIATTDDTTAMASASSSATGSFSYPE

SEQ ID NO: 861718 - protein, 369 aa, Homo sapiens; identical to SEQ ID NO: 861717

SEQ ID NO: 861719 - protein, 215 aa, Homo sapiens
WEGGKWNNRACSTRSTSHVVSPSELALVPQNQVDSCYKITVTLNYSQGNAVHLYELLKKMTGKPEPKVVYFGDSMHSDIFPARHYSNWETVLILEELRGDEGTRSQRPEESEPLEKKGKYEGPKAKPLNTSSKKWGSFFIDSVLGLENTEDSLVYTWSCKRISTYSTIAIPSIEAIAELPLDYKFTRFSSSNSKTAGYYPNPPLVLSSDETLISK

SEQ ID NO: 861720 - protein, 455 aa, Homo sapiens
MAQHFSLAACDVVGFDLDHTLCRYNLPESAPLIYNSFAQFLVKEKGYDKELLNVTPEDWDFCCKGLALDLEDGNFLKLANNGTVLRASHGTKMMTPEVLAEAYGKKEWKHFLSDTGMACRSGKYYFYDNYFDLPGALLCARVVDYLTKLNNGQKTFDFWKDIVAAIQHNYKMSAFKENCGIYFPEIKRDPGRYLHSCPESVKKWLRQLKNAGKILLLITSSHSDYCRLLCEYILGNDFTDLFDIVITNALKPGFFSHLPSQRPFRTLENDEEQEALPSLDKPGWYSQGNAVHLYELLKKMTGKPEPKVVYFGDSMHSDIFPARHYSNWETVLILEELRGDEGTRSQRPEESEPLEKKGKYEGPKAKPLNTSSKKWGSFFIDSVLGLENTEDSLVYTWSCKRISTYSTIAIPSIEAIAELPLDYKFTRFSSSNSKTAGYYPNPPLVLSSDETLISK

SEQ ID NO: 861721 - protein, 476 aa, Homo sapiens
RPGPVPQRPASQLLAPFAAEALPGAPRAAMAQHFSLAACDVVGFDLDHTLCRYNLPESAPLIYNSFAQFLVKEKGYDKELLNVTPEDWDFCCKGLALDLEDGNFLKLANNGTVLRASHGTKMMTPEVLAEAYGKKEWKHFLSDTGMACRSGKYYFYDNYFDLPGALLCARVVDYLTKLNNGQKTFDFWKDIVAAIQHNYKMSAFKEIKRDPGRYLHSCPESVKKWLRQLKNAGKILLLITSSHSDYCRLLCEYILGNDFTDLFDIVITNALKPGFFSHLPSQRPFRTLENDEEQEALPSLDKPGWYSQGNAVHLYELLKKMTGKPEPKVVYFGDSMHSDIFPARHYSNWETVLILEELRGDEGTRSQRPEESEPLEKKGKYEGPKAKPLNTSSKKWGSFFIDSVLGLENTEDSLVYTWSCKRISTYSTIAIPSIEAIAELPLDYKFTRFSSSNSKTAGYYPNPPLVLSSDETLISK

SEQ ID NO: 861722 - protein, 455 aa, Homo sapiens; identical to SEQ ID NO: 861720

SEQ ID NO: 861723 - protein, 455 aa, Homo sapiens
  misc_feature (356)..(356): Xaa can be any naturally occurring amino acid
  misc_feature (359)..(359): Xaa can be any naturally occurring amino acid
  misc_feature (366)..(366): Xaa can be any naturally occurring amino acid
  misc_feature (369)..(370): Xaa can be any naturally occurring amino acid
  misc_feature (373)..(374): Xaa can be any naturally occurring amino acid
  misc_feature (387)..(387): Xaa can be any naturally occurring amino acid
  misc_feature (389)..(389): Xaa can be any naturally occurring amino acid
  misc_feature (391)..(391): Xaa can be any naturally occurring amino acid
  misc_feature (400)..(404): Xaa can be any naturally occurring amino acid
  misc_feature (407)..(407): Xaa can be any naturally occurring amino acid
  misc_feature (410)..(410): Xaa can be any naturally occurring amino acid
  misc_feature (413)..(413): Xaa can be any naturally occurring amino acid
  misc_feature (415)..(418): Xaa can be any naturally occurring amino acid
  misc_feature (423)..(423): Xaa can be any naturally occurring amino acid
  misc_feature (433)..(434): Xaa can be any naturally occurring amino acid
MAQHFSLAACDVVGFDLDHTLCRYNLPESAPLIYNSFAQFLVKEKGYDKELLNVTPEDWDFCCKGLALDLEDGNFLKLANNGTVLRASHGTKMMTPEVLAEAYGKKEWKHFLSDTGMACRSGKYYFYDNYFDLPGALLCARVVDYLTKLNNGQKTFDFWKDIVAAIQHNYKMSAFKENCGIYFPEIKRDPGRYLHSCPESVKKWLRQLKNAGKILLLITSSHSDYCRLLCEYILGNDFTDLFDIVITNALKPGFFSHLPSQRPFRTLENDEEQEALPSLDKPGWYSQGNAVHLYELLKKMTGKPEPKVVYFGDSMHSDIFPARHYSNWETVLILEELRGDEGTRSQRPEDPDPPEXSPXNEGPNPXPPXXPPXXWAPPPTHPPPPPXNXQXPPPQTRPPXXXXXHSXIAXPSXEXXXXWRLDXGFTRLASGGXXAAGYYPNPPLVLSSDETLISK

SEQ ID NO: 861724 - protein, 201 aa, Homo sapiens
RPGPVPQRPASQLLAPFAAEALPGAPRAAMAQHFSLAACDVVGFDLDHTLCRYNLPESAPLIYNSFAQFLVKEKGYDKELLNVTPEDWDFCCKGLALDLEDGNFLKLANNGTVLRASHGTKMMTPEVLAEAYGKKEWKHFLSDTGMACRSGKYYFYDNYFDLPGALLCARVVDYLTKLNNGQKTFLWAAVALTRFNPSSSR

SEQ ID NO: 861725 - protein, 345 aa, Homo sapiens
RPGPVPQRPASQLLAPFAAEALPGAPRAAMAQHFSLAACDVVGFDLDHTLCRYNLPESAPLIYNSFAQFLVKEKGYDKELLNVTPEDWDFCCKGLALDLEDGNFLKLANNGTVLRASHGTKMMTPEVLAEAYGKKEWKHFLSDTGMACRSGKYYFYDNYFDLPGALLCARVVDYLTKLNNGQKTFDFWKDIVAAIQHNYKMSAFKENCGIYFPEIKRDPGRYLHSCPESVKKWLRQLKNAGKILLLITSSHSDYCRLLCEYILGNDFTDLFDIVITNALKPGFFSHLPSQRPFRTLENDEEQEALPSLDKPGWYSQGNAVHLYELLKKMTGKPEPKKIFTRISVS

SEQ ID NO: 861726 - protein, 337 aa, Homo sapiens
RPGPVPQRPASQLLAPFAAEALPGAPRAAMAQHFSLAACDVVGFDLDHTLCRYNLPESAPLIYNSFAQFLVKEKGYDKELLNVTPEDWDFCCKGLALDLEDGNFLKLANNGTVLRASHGTKMMTPEVLAEAYGKKEWKHFLSDTGMACRSGKYYFYDNYFDLPGALLCARVVDYLTKLNNGQKTFDFWKDIVAAIQHNYKMSAFKEIKRDPGRYLHSCPESVKKWLRQLKNAGKILLLITSSHSDYCRLLCEYILGNDFTDLFDIVITNALKPGFFSHLPSQRPFRTLENDEEQEALPSLDKPGWYSQGNAVHLYELLKKMTGKPEPKKIFTRISVS

SEQ ID NO: 861727 - protein, 226 aa, Homo sapiens
RPGPVPQRPASQLLAPFAAEALPGAPRAAMAQHFSLAACDVVGFDLDHTLCRYNLPESAPLIYNSFAQFLVKEKGYDKELLNVTPEDWDFCCKGLALDLEDGNFLKLANNGTVLRASHGTKMMTPEVLAEAYGKKEWKHFLSDTGMACRSGKYYFYDNYFDLPGALLCARVVDYLTKLNNGQKTFDFWKDIVAAIQHNYKMSAFKGKYCEEGPSNTCLLSYVCLVN

SEQ ID NO: 861728 - protein, 122 aa, Homo sapiens
MTNKFLRMILSSFYGKMFPHSPQASKRSKFPLPDTTKRMFQTCSMKGKVQICDLNANIRKKFLRMLLSTFYIGIPISNEILKAIQISTCRFYKKIFSKLFYQKKGSTLLVGYTHNKQVSENA

SEQ ID NO: 861729 - protein, 645 aa, Homo sapiens
FHPGSRGCSAEARGWWVSPAIMTQAEKGDTENGKEKGGEKEKEQRGVKRPIVPALVPESLQEQIQSNFIIVIHPGSTTLRIGRATDTLPASIPHVIARRHKQQGQPLYKDSWLLREGLNKPESNEQRQNGLKMVDQAIWSKKMSNGTRRIPVSPEQARSYNKQMRPAILDHCSGNKWTNTSHHPEYLVGEEALYVNPLDCYNIHWPIRRGQLNIHPGPGGSLTAVLADIEVIWSHAIQKYLEIPLKDLKYYRCILLIPDIYNKQHVKELVNMILMKMGFSGIVVHQESVCATYGSGLSSTCIVDVGDQKTSVCCVEDGVSHRNTRLCLAYGGSDVSRCFYWLMQRAGFPYRECQLTNKMDCLLLQHLKETFCHLDQDISGLQDHEFQIRHPDSPALLYQFRLGDEKLQAPMALFYPATFGIVGQKMTTLQHRSQGDPEDPHDEHYLLATQSKQEQSAKATADRKSASKPIGFEGDLRGQSSDLPERLHSQEVDLGSAQGDGLMAGNDSEEALTALMSRKTAISLFEGKALGLDKAILHSIDCCSSDDTKKKMYSSILVVGGGLMFHKAQEFLQHRILNKMPPSFRRIIENVDVITRPKDMDPRLIAWKGGAVLACLDTTQELWIYQREWQRFGVRMLRERAAFVW

SEQ ID NO: 861730 - protein, 645 aa, Homo sapiens; identical to SEQ ID NO: 861729

SEQ ID NO: 861731 - protein, 560 aa, Homo sapiens
FHPGSRGCSAEARGWWVSPAIMTQAEKGDTENGKEKGGEKEKEQRGVKRPIVPALVPESLQEQIQSNFIIVIHPGSTTLRIGRATDTLPASIPHVIARRHKQQGQPLYKDSWLLREGLNKPESNEQRQNGLKMVDQAIWSKKMSNGTRRIPVSPEQARSYNKQMRPAILDHCSGNKWTNTSHHPEYLVGEEALYVNPLDCYNIHWPIRRGQLNIHPGPGGSLTAVLADIEVIWSHAIQKYLEIPLKDLKYYRCILLIPDIYNKQHVKELVNMILMKMGFSGIVVHQESVCATYGSGLSSTCIVDVGDQKTSVCCVEDGVSHRNTRLCLAYGGSDVSRCFYWLMQRAGFPYRECQLTNKMDCLLLQHLKETFCHLDQDISGLQDHEFQIRHPDSPALLYQFRLGDEKLQAPMALFYPATFGIVGQKMTTLQHRSQGDPEDPHDEHYLLATQSKQEQSAKATADRKSASKPIGFEGDLRGQSSDLPERLHSQEVDLGSAQGDGLMAGNDSEEALTALMSRKTAISLFEGKALGLDKAILHSIDCCCKHIWGDREIAVKQDSS

SEQ ID NO: 861732 - protein, 613 aa, Homo sapiens
RSDLPHAPPSGCVRSCPGSGLSFPDHKTTTQIQSNFIIVIHPGSTTLRIGRATDTLPASIPHVIARRHKQQGQPLYKDSWLLREGLNKPESNEQRQNGLKMVDQAIWSKKMSNGTRRIPVSPEQARSYNKQMRPAILDHCSGNKWTNTSHHPEYLVGEEALYVNPLDCYNIHWPIRRGQLNIHPGPGGSLTAVLADIEVIWSHAIQKYLEIPLKDLKYYRCILLIPDIYNKQHVKELVNMILMKMGFSGIVVHQESVCATYGSGLSSTCIVDVGDQKTSVCCVEDGVSHRNTRLCLAYGGSDVSRCFYWLMQRAGFPYRECQLTNKMDCLLLQHLKETFCHLDQDISGLQDHEFQIRHPDSPALLYQFRLGDEKLQAPMALFYPATFGIVGQKMTTLQHRSQGDPEDPHDEHYLLATQSKQEQSAKATADRKSASKPIGFEGDLRGQSSDLPERLHSQEVDLGSAQGDGLMAGNDSEEALTALMSRKTAISLFEGKALGLDKAILHSIDCCSSDDTKKKMYSSILVVGGGLMFHKAQEFLQHRILNKMPPSFRRIIENVDVITRPKDMDPRLIAWKGGAVLACLDTTQELWIYQREWQRFGVRMLRERAAFVW

SEQ ID NO: 861733 - protein, 606 aa, Homo sapiens
FHPGSRGCSAEARGWWVSPAIMTQAEKGDTENGKEKGGEKEKEQRGVKRPIVPALVPESLQEQIQSNFIIVIHPGSTTLRIGRATDTLPASIPHVIARRHKQQGQPLYKDSWLLREGLNKPESNEQRQNGLKMVDQAIWSKKMSNGTRRIPVSPEQARSYNKQMRPAILDHCSGNKWTNTSHHPEYLVGEEALYVNPLDCYNIHWPIRRGQLNIHPGPGGSLTAVLADIEVIWSHAIQKYLEIPLKDLKYYRCILLIPDIYNKQHVKELVNMILMKMGFSGIVVHQESVCATYGSGLSSTCIVDVGDQKTSVCCVEDGVSHRNTRLCLAYGGSDVSRCFYWLMQRAGFPYRECQLTNKMDCLLLQHLKETFCHLDQDISGLQDHEFQIRHPDSPALLYQFRLGDEKLQAPMALFYPATFGIVGQKMTTLQHRSQGDPEDPHDEHYLLATQSKQEQSAKATADRKSASKPIGFEGDLRGQSSDLPERLHSQEVDLGSAQGDGLMAGNDSEEALTALMSRKTAISLFEGKALGLDKAILHSIDCCSSDDTKKKMYSSILVVGGGLMFHKAQEFLQHRILNKMPPSFRRIIENVDVITRPKAEMPSSLL

SEQ ID NO: 861734 - protein, 179 aa, Homo sapiens
DAPESNGKGRSQHRAERATMGKIALQLKATLENITNLRPVGEDFRWYLKMKCGNCGEISDKWQYIRLMDSVALKGGRGSASMVQKCKLCARENSIEILSSTIKPYNAEDNENFKTIVEFECRGLEPVDFQPQAGFAAEGVESGTAFSDINLQEKDWTDYDEKAQESVGIYEVTHQFVKC

SEQ ID NO: 861735 - protein, 119 aa, Homo sapiens
MKCGNCGEISDKWQYIRLMDSVALKGGRGSASMVQKCKLCARENSIEILSSTIKPYNAEDNENFKTIVEFECRGLEPVDFQPQAGFAAEGVESGTAFSDINLQEKHARGPWGTLETFNL

SEQ ID NO: 861736 - protein, 179 aa, Homo sapiens; identical to SEQ ID NO: 861734

SEQ ID NO: 861737 - protein, 179 aa, Homo sapiens; identical to SEQ ID NO: 861734

SEQ ID NO: 861738 - protein, 130 aa, Homo sapiens
MKCGNCGEISDKWQYIRLMDSVALKGGRGSASMVQKCKLCARENSIEILSSTIKPYNAEDNENFKTIVEFECRGLEPVDFQPQAGFAAEGVESGTAFSDINLQEKDWTDYDEKAQESVGIYEVTHQFVKC

SEQ ID NO: 861739 - protein, 179 aa, Homo sapiens; identical to SEQ ID NO: 861734

SEQ ID NO: 861740 - protein, 132 aa, Homo sapiens
DAPESNGKGRSQHRAERATMGDSVALKGGRGSASMVQKCKLCARENSIEILSSTIKPYNAEDNENFKTIVEFECRGLEPVDFQPQAGFAAEGVESGTAFSDINLQEKDWTDYDEKAQESVGIYEVTHQFVKC

SEQ ID NO: 861741 - protein, 179 aa, Homo sapiens; identical to SEQ ID NO: 861734

SEQ ID NO: 861742 - protein, 179 aa, Homo sapiens; identical to SEQ ID NO: 861734

SEQ ID NO: 861743 - protein, 179 aa, Homo sapiens; identical to SEQ ID NO: 861734

SEQ ID NO: 861744 - protein, 90 aa, Homo sapiens
RRAGKQRQGPQPAPGGEGYHGENRAATQSHAGEHHQPPARGRGLPVVPEGAAGAGPGERRPVLISVLNRSLLSGSMRKYLTRHIKCSGFS

SEQ ID NO: 861745 - protein, 160 aa, Homo sapiens
DAPESNGKGRSQHRAERATMGKIALQLKATLENITNLRPVGEDFRWYLKDSVALKGGRGSASMVQKCKLCARENSIEILSSTIKPYNAEDNENFKTIVEFECRGLEPVDFQPQAGFAAEGVESGTAFSDINLQEKDWTDYDEKAQESVGIYEVTHQFVKC

SEQ ID NO: 861746 - protein, 91 aa, Homo sapiens
SRGSSINRLMRAPSSLTSAEDNENFKTIVEFECRGLEPVDFQPQAGFAAEGVESGTAFSDINLQEKDWTDYDEKAQESVGIYEVTHQFVKC

SEQ ID NO: 861747 - protein, 173 aa, Homo sapiens
MEPGAGHLDGHRAGSPSLRQALCDGSAVMFSSKERGRCTVINFVPLEAPLRSTPRSRQVTEACGGEGRAVPLGSEPEWSVGGMEATLEQHLEDTMKNPSIVGVLCTDSQGLNLGCRGTLSDEHAGVISVLAQQAAKLTSDPTDIPVVCLESDNGNIMIQKHDGITVAVHKMAS

SEQ ID NO: 861748 - protein, 173 aa, Homo sapiens; identical to SEQ ID NO: 861747

SEQ ID NO: 861749 - protein, 173 aa, Homo sapiens; identical to SEQ ID NO: 861747

SEQ ID NO: 861750 - protein, 104 aa, Homo sapiens
MEPGAGHLDGHRAGSPSLRQALCDGSAVMFSSKERGRCTVINFVPLEAPLRSTPRSRQVTEACGGEGRAVPLGSEPEWSVGGMEATLEQHLEDTIYVKFKTGKV

SEQ ID NO: 861751 - protein, 173 aa, Homo sapiens; identical to SEQ ID NO: 861747

SEQ ID NO: 861752 - protein, 173 aa, Homo sapiens; identical to SEQ ID NO: 861747

SEQ ID NO: 861753 - protein, 173 aa, Homo sapiens; identical to SEQ ID NO: 861747

SEQ ID NO: 861754 - protein, 173 aa, Homo sapiens; identical to SEQ ID NO: 861747

SEQ ID NO: 861755 - protein, 294 aa, Homo sapiens
MFLRRLGGWLPRPWGRRKPMRPDPPYPEPRRVDSSSENSGSDWDSAPETMEDVGHPKTKDSGALRVSRAASEPSKEEPQVEQLGSKRMDSLKWDQPISSTQESGRLEAGGASPKLRWDHVDSGGTRRPGVSPEGGLSVPGPGAPLEKPGRREKLLGWLRGEPGAPSRYLGGPEECLQISTNLTLHLLELLASALLALCSRPLRAALDTLGLRGPLGLWLHGLLSFLAALHGLHAVLSLLTAHPLHFACLFGLLQALVLAVSLREPNGDEAATDWESEGLEREGEEQRGDPGKGL

SEQ ID NO: 861756 - protein, 294 aa, Homo sapiens; identical to SEQ ID NO: 861755

SEQ ID NO: 861757 - protein, 294 aa, Homo sapiens; identical to SEQ ID NO: 861755

SEQ ID NO: 861758 - protein, 294 aa, Homo sapiens; identical to SEQ ID NO: 861755

SEQ ID NO: 861759 - protein, 294 aa, Homo sapiens; identical to SEQ ID NO: 861755

SEQ ID NO: 861760 - protein, 280 aa, Homo sapiens
FIYSLFEQLRIILLYNVGFPSLPDHVEAALKMLRREARLRREYLYRKAREEAQRSAQERKERLRRALEENRLIPTELRREALALQGSLEFDDAGGEGVTSHVDDEYRWAGVEDPKVMITTSRDPSSRLKMFAKELKLVFPGAQRMNRGRHEVGALVRACKANGVTDLLVVHEHRGTPVGLIVSHLPFGPTAYFTLCNVVMRHDIPDLGTMSEAKPHLITHGFSSRLGKRVSDILRYLFPVPKDDSHRVITFANQDDYISFRTMCIRRQTIATRSLQHGLS

SEQ ID NO: 861761 - protein, 291 aa, Homo sapiens
MLRREARLRREYLYRKAREEAQRSAQERKERLRRALEENRLIPTELRREALALQGSLEFDDAGGEGVTSHVDDEYRWAGVEDPKVMITTSRDPSSRLKMFAKELKLVFPGAQRMNRGRHEVGALVRACKANGVTDLLVVHEHRGTPVGLIVSHLPFGPTAYFTLCNVVMRHDIPDLGTMSEAKPHLITHGFSSRLGKRVSDILRYLFPVPKDDSHRVITFANQDDYISFRHHVYKKTDHRNVELTEVGPRFELKLYMIRLGTLEQEATADVEWRWHPYTNTARKRVFLSTE

SEQ ID NO: 861762 - protein, 291 aa, Homo sapiens; identical to SEQ ID NO: 861761

SEQ ID NO: 861763 - protein, 291 aa, Homo sapiens; identical to SEQ ID NO: 861761

SEQ ID NO: 861764 - protein, 206 aa, Homo sapiens
MITTSRDPSSRLKMFAKELKLVFPGAQRMNRGRHEVGALVRACKANGVTDLLVVHEHRGTPVGLIVSHLPFGPTAYFTLCNVVMRHDIPDLGTMSEAKPHLITHGFSSRLGKRVSDILRYLFPVPKDDSHRVITFANQDDYISFRHHVYKKTDHRNVELTEVGPRFELKLYMIRLGTLEQEATADVEWRWHPYTNTARKRVFLSTE

SEQ ID NO: 861765 - protein, 285 aa, Homo sapiens
MLRREARLRREYLYRKAREEAQRSAQERKERLRRALEENRLIPTELRREALALQGSLEFDDAGGEGVTSHVDDEYRWAGVEDPKVMITTSRDPSSRLKMFAKELKLVFPGAQRMNRGRHEVGALVRACKANGVTDLLVVHEHRGTPVGLIVSHLPFGPTAYFTLCNVVMRHDIPDLGTMSEAKPHLITHGFSSRLGKRVSDILRYLFPVPKDDSHRVITFANQDDYISFRHHVYKKTDHRNVELTEVGPRFELKLYMIRLGTLEQEATADVEWRWHPYTNTARNS

SEQ ID NO: 861766 - protein, 322 aa, Homo sapiens
FIYSLFEQLRIILLYNVGFPSLPDHVEAALKMLRREARLRREYLYRKAREEAQRSAQERKERLRRALEENRLIPTELRREALALQGSLEFDDAGGEGVTSHVDDEYRWAGVEDPKVMITTSRDPSSRLKMFAKELKLVFPGAQRMNRGRHEVGALVRACKANGVTDLLVVHEHRGTPVGLIVSHLPFGPTAYFTLCNVVMRHDIPDLGTMSEAKPHLITHGFSSRLGKRVSDILRYLFPVPKDDSHRVITFANQDDYISFRHHVYKKTDHRNVELTEVGPRFELKLYMIRLGTLEQEATADVEWRWHPYTNTARKRVFLSTE

SEQ ID NO: 861767 - protein, 281 aa, Homo sapiens
NRSRYELGLEAQRSAQERKERLRRALEENRLIPTELRREALALQGSLEFDDAGGEGVTSHVDDEYRWAGVEDPKVMITTSRDPSSRLKMFAKELKLVFPGAQRMNRGRHEVGALVRACKANGVTDLLVVHEHRGTPVGLIVSHLPFGPTAYFTLCNVVMRHDIPDLGTMSEAKPHLITHGFSSRLGKRVSDILRYLFPVPKDDSHRVITFANQDDYISFRHHVYKKTDHRNVELTEVGPRFELKLYMIRLGTLEQEATADVEWRWHPYTNTARKRVFLSTE

SEQ ID NO: 861768 - protein, 263 aa, Homo sapiens
MRAVRRALEENRLIPTELRREALALQGSLEFDDAGGEGVTSHVDDEYRWAGVEDPKVMITTSRDPSSRLKMFAKELKLVFPGAQRMNRGRHEVGALVRACKANGVTDLLVVHEHRGTPVGLIVSHLPFGPTAYFTLCNVVMRHDIPDLGTMSEAKPHLITHGFSSRLGKRVSDILRYLFPVPKDDSHRVITFANQDDYISFRHHVYKKTDHRNVELTEVGPRFELKLYMIRLGTLEQEATADVEWRWHPYTNTARKRVFLSTE

SEQ ID NO: 861769 - protein, 178 aa, Homo sapiens
MNRGRHEVGALVRACKANGVTDLLVVHEHRGTPVGLIVSHLPFGPTAYFTLCNVVMRHDIPDLGTMSEAKPHLITHGFSSRLGKRVSDILRYLFPVPKDDSHRVITFANQDDYISFRHHVYKKTDHRNVELTEVGPRFELKLYMIRLGTLEQEATADVEWRWHPYTNTARKRVFLSTE

SEQ ID NO: 861770 - protein, 117 aa, Homo sapiens
AFRLGLRARPGICHSVSLSFLVPQVSDILRYLFPVPKDDSHRVITFANQDDYISFRHHVYKKTDHRNVELTEVGPRFELKLYMIRLGTLEQEATADVEWRWHPYTNTARKRVFLSTE

SEQ ID NO: 861771 - protein, 249 aa, Homo sapiens
MLRREARLRREYLYRKAREEAQRSAQERKERLRRALEENRLIPTELRREALALQGSLEFDDAGGEGVTSHVDDEYRWAGVEDPKVMITTSRDPSSRLKMFAKELKLVFPGAQRMNRGRHEVGALVRACKANGVTDLLVVHEHRGTPVGLIVSHLPFGPTAYFTLCNVVMRHDIPDLGTMSEAKPHLITHGFSSRLGKRVSDILRYLFPVPKDDSHRVITFANQDDYISFRTMCIRRQTIATRSLQHGLS

SEQ ID NO: 861772 - protein, 92 aa, Homo sapiens
MNRGRHEVGALVRACKANGVTDLLVVHEHRGTPVGLIVSHLPFGPTAYFTLCNVVMRHDIPDLGTMSEAKPPHNLGFLRLGSGSDIPDTFRA

SEQ ID NO: 861773 - protein, 291 aa, Homo sapiens; identical to SEQ ID NO: 861761

SEQ ID NO: 861774 - protein, 291 aa, Homo sapiens; identical to SEQ ID NO: 861761

SEQ ID NO: 861775 - protein, 291 aa, Homo sapiens; identical to SEQ ID NO: 861761

SEQ ID NO: 861776 - protein, 291 aa, Homo sapiens; identical to SEQ ID NO: 861761

SEQ ID NO: 861777 - protein, 297 aa, Homo sapiens
MGLLFPQLRREARLRREYLYRKAREEAQRSAQERKERLRRALEENRLIPTELRREALALQGSLEFDDAGGEGVTSHVDDEYRWAGVEDPKVMITTSRDPSSRLKMFAKELKLVFPGAQRMNRGRHEVGALVRACKANGVTDLLVVHEHRGTPVGLIVSHLPFGPTAYFTLCNVVMRHDIPDLGTMSEAKPHLITHGFSSRLGKRVSDILRYLFPVPKDDSHRVITFANQDDYISFRHHVYKKTDHRNVELTEVGPRFELKLYMIRLGTLEQEATADVEWRWHPYTNTARKRVFLSTE

SEQ ID NO: 861778 - protein, 321 aa, Homo sapiens
MLRREARLRREYLYRKAREEAQRSAQERKERLRRALEENRLIPTELRREALALQGSLEFDDAGGEGVTSHVDDEYRWAGVEDPKVMITTSRDPSSRLKMFAKELKLVFPGAQRMNRGRHEVGALVRACKANGVTDLLVVHEHRGTPVGLIVSHLPFGPTAYFTLCNVVMRHDIPDLGTMSEAKPHLITHGFSSRLGKRVSDILRYLFPVPKDDSHRVITFANQDDYISFRWVHGPCPRKGIPTLCTSCCLPLTHSCSLQAHHVYKKTDHRNVELTEVGPRFELKLYMIRLGTLEQEATADVEWRWHPYTNTARKRVFLSTE

SEQ ID NO: 861779 - protein, 279 aa, Homo sapiens
SKCLPAVFLAHWVLLLVLRVFLPCDENRLIPTELRREALALQGSLEFDDAGGEGVTSHVDDEYRWAGVEDPKVMITTSRDPSSRLKMFAKELKLVFPGAQRMNRGRHEVGALVRACKANGVTDLLVVHEHRGTPVGLIVSHLPFGPTAYFTLCNVVMRHDIPDLGTMSEAKPHLITHGFSSRLGKRVSDILRYLFPVPKDDSHRVITFANQDDYISFRHHVYKKTDHRNVELTEVGPRFELKLYMIRLGTLEQEATADVEWRWHPYTNTARKRVFLSTE

SEQ ID NO: 861780 - protein, 327 aa, Homo sapiens
MGLLFPQLRREARLRREYLYRKAREEAQRSAQERKERLRRALEENRLIPTELRREALALQGSLEFDDAGGEGVTSHVDDEYRWAGVEDPKVMITTSRDPSSRLKMFAKELKLVFPGAQRMNRGRHEVGALVRACKANGVTDLLVVHEHRGTPVGLIVSHLPFGPTAYFTLCNVVMRHDIPDLGTMSEAKPHLITHGFSSRLGKRVSDILRYLFPVPKDDSHRVITFANQDDYISFRWVHGPCPRKGIPTLCTSCCLPLTHSCSLQAHHVYKKTDHRNVELTEVGPRFELKLYMIRLGTLEQEATADVEWRWHPYTNTARKRVFLSTE

SEQ ID NO: 861781 - protein, 345 aa, Homo sapiens
MLRREARLRREYLYRKAREEAQRSAQERKERLRRALEENRLIPTELRREALALQGSLEFDDAGGEGVTSHVDDEYRWAGVEDPKVMITTSRDPSSRLKMFAKELKLVFPGAQRMNRGRHEVGALVRACKANGVTDLLVVHEHRGTPVGLIVSHLPFGPTAYFTLCNVVMRHDIPDLGTMSEAKPHLITHGFSSRLGKRVSDILRYLFPVPKDDSHRVITFANQDDYISFRWVHGPAPGKHPPPVYLVLLAVDPQLFPPRRTMCIRRQTTATWSSLSVHDPSGHAGAGGHSRRGVALAPLHQYRTQESLPEHRVSTLTTQSGHGLGTQDGAVIDRPTSRNCHRMAC

SEQ ID NO: 861782 - protein, 226 aa, Homo sapiens
MLRREARLRREYLYRKAREEAQRSAQERKERLRRALEENRLIPTELRREALALQGSLEFDDAGGEGVTSHVDDEYRWAGVEDPKVMITTSRDPSSRLKMFAKELKLVFPGAQRMNRGRHEVGALVRACKANGVTDLLVVHEHRGTPVGLIVSHLPFGPTAYFTLCNVVMRHDIPDLGTMSEAKPHLITHGFSSRLGKRVSDILRYLFPVPKDDSHRVITRVFLSTE

SEQ ID NO: 861783 - protein, 381 aa, Homo sapiens
MGDRERNKKRLLELLRAPDTGNAHCADCGAADPDWASYKLGIFICLNCCGVHRNFPDISRVKSVRLDFWDDSIVEFMIHNGNLRVKAKFEARVPAFYYIPQANDCLVLKEQWIRAKYERREFMADGETISLPGNREGFLWKRGRDNSQFLRRKFVLLAREGLLKYFTKEQGKSPKAVISIKDLNATFQTEKIGHPHGLQITYRRDGHTRNLFVYHESGKEIVDWFNALRAARLQYLKMAFPELPESELVPFLTRNYLKQGFMEKTGPKQKEPFKKRWFALDCHERRLLYYKNPLDAFEQGQVFLGNKEQGYEAYEDLPKGIRGNRWKAGLTIVTPERRFVLTCPSEKEQQEWLESLRGVLSSPLTPLNRLTASTESGRSSR

SEQ ID NO: 861784 - protein, 102 aa, Homo sapiens
STGQHWHGHLPQPSSFPLQLHQQRVAAAAGDPLTEELAATEHLELLVGRSLHLGPGCPPSVPRSQQPFLAVNSARTEAVALSISSLGLPRNPPRGSEDLVHR

SEQ ID NO: 861785 - protein, 33 aa, Homo sapiens
MLHVESNVVFAKHRLCLFLWADLPACSTGRRFL

SEQ ID NO: 861786 - protein, 47 aa, Homo sapiens
MDRCKHVGRLRLAQDHSILNPQKWCCLECATTESVWACLKCSHVACG

SEQ ID NO: 861787 - protein, 212 aa, Homo sapiens
MGVTCVSQMPVAEGKSVQQTVELLTRKLEMLGAEKQGTFCVDCETYHTAASTLGSQGQTGKLMYVMHNSEYPLSCFALFENGPCLIADTNFDVLMVKLKGFFQSAKASKIETRGTRYQYCDFLVKVGTVTMGPSARGISVEVEYGPCVVASDCWSLLLEFLQSFLGSHTPGAPAVFGNRHDAVYGPADTMVQYMELFNKIRKQQQVPVAGIR

SEQ ID NO: 861788 - protein, 116 aa, Homo sapiens
MMRSTAQQIPWSSTWNSSTRSASSSRCRWLGFVSDEQLPAELCHQGYSTGGAGADFQVPGPQKPRVDMDSTLLLWFSAVAFVLGLSPLPNPLTLTHSPPSAVLLRALLDLACPQEW

SEQ ID NO: 861789 - protein, 212 aa, Homo sapiens; identical to SEQ ID NO: 861787

SEQ ID NO: 861790 - protein, 212 aa, Homo sapiens; identical to SEQ ID NO: 861787

SEQ ID NO: 861791 - protein, 212 aa, Homo sapiens; identical to SEQ ID NO: 861787

SEQ ID NO: 861792 - protein, 191 aa, Homo sapiens
  misc_feature (16)..(16): Xaa can be any naturally occurring amino acid
SNHPTPPHNYVLVEPXVIQSEGETYHVAAVYPWQQGQTGKLMYVMHNSEYPLSCFALFENGPCLIADTNFDVLMVKLKGFFQSAKASKIETRGTRYQYCDFLVKVGTVTMGPSARGISVEVEYGPCVVASDCWSLLLEFLQSFLGSHTPGAPAVFGNRHDAVYGPADTMVQYMELFNKIRKQQQVPVAGIR

SEQ ID NO: 861793 - protein, 212 aa, Homo sapiens; identical to SEQ ID NO: 861787

SEQ ID NO: 861794 - protein, 47 aa, Homo sapiens; identical to SEQ ID NO: 861786

SEQ ID NO: 861795 - protein, 52 aa, Homo sapiens
MSLPGTGGGNSPYPQLLRICPRPMVNMLHFMFGLCCNKSLFLPSEDVAGLLS

SEQ ID NO: 861796 - protein, 68 aa, Homo sapiens
FVDKVLTISQYRSPTTDQTPVQAATSWPGLAASFSGFQGPGTGGLGHQEALLGCPCSHSHPTGPLPPI

SEQ ID NO: 861797 - protein, 68 aa, Homo sapiens; identical to SEQ ID NO: 861796

SEQ ID NO: 861798 - protein, 115 aa, Homo sapiens
AVPSSCLLTLAELTTRFQTSAGAAASYWLSGSKTQKEAGWQADLSQLPAPSPLRLAWDRWGSSLQEGFPGLLFSPTSLWRTVHPSRYAPVMSEGMPQSGETQRQQNLLRDKRTCC

SEQ ID NO: 861799 - protein, 115 aa, Homo sapiens; identical to SEQ ID NO: 861798

SEQ ID NO: 861800 - protein, 68 aa, Homo sapiens; identical to SEQ ID NO: 861796

SEQ ID NO: 861801 - protein, 68 aa, Homo sapiens; identical to SEQ ID NO: 861796

SEQ ID NO: 861802 - protein, 105 aa, Homo sapiens
MSHPIQNINKEIEIVEKNQIEILELKSIITKTENSLEVFSSRLEKSEERINRLQDRSIKIIQSEEQKGKRMKKNEQSIKDLWDSIKHTSICMRGVPEGEEREKGT

SEQ ID NO: 861803 - protein, 105 aa, Homo sapiens; identical to SEQ ID NO: 861802

SEQ ID NO: 861804 - protein, 313 aa, Homo sapiens
MPKVKSGAIGRRRGRQEQRRELKSAGGLMFNTGIGQHILKNPLIINSIIDKAALRPTDVVLEVGPGTGNMTVKLLEKAKKVVACELDPRLVAELHKRVQGTPVASKLQVLVGDVLKTDLPFFDTCVANLPYQISSPFVFKLLLHRPFFRCAILMFQREFALRLVAKPGDKLYCRLSINTQLLARVDHLMKVGKNNFRPPPKVESSVVRIEPKNPPPPINFQEWDGLVRITFVRKNKTLSAAFKSSAVQQLLEKNYRIHCSVHNIIIPEDFSIADKIQQILTSTGFSDKRARSMDIDDFIRLLHGFNAEGIHFS

SEQ ID NO: 861805 - protein, 275 aa, Homo sapiens
MPKVKSGAIGRRRGRQEQRRELKSAGGLMFNTGIGQHILKNPLIINSIIDKAALRPTDVVLEVGPGTGNMTVKLLEKAKKVVACELDPRLVAELHKRVQGTPVASKLQVLVGDVLKTDLPFFDTCVANLPYQISSPFVFKLLLHRPFFRCAILMFQREFALRLVAKPGDKLYCRLSINTQLLARVDHLMKVGKNNFRPPPKVESSVVRIEPKNPPPPINFQEWDGLVRITFVRKNKTLSAAFKSSAVQQLLEKNYRIHCSVHNIVSAAVYPVKQI

SEQ ID NO: 861806 - protein, 284 aa, Homo sapiens
MPKVKSGAIGRRRGRQEQRRELKSAGGLMFNTGIGQHILKNPLIINSIIDKVVACELDPRLVAELHKRVQGTPVASKLQVLVGDVLKTDLPFFDTCVANLPYQISSPFVFKLLLHRPFFRCAILMFQREFALRLVAKPGDKLYCRLSINTQLLARVDHLMKVGKNNFRPPPKVESSVVRIEPKNPPPPINFQEWDGLVRITFVRKNKTLSAAFKSSAVQQLLEKNYRIHCSVHNIIIPEDFSIADKIQQILTSTGFSDKRARSMDIDDFIRLLHGFNAEGIHFS

SEQ ID NO: 861807 - protein, 154 aa, Homo sapiens
MPKVKSGAIGRRRGRQEQRRELKSAGGLMFNTGIGQHILKNPLIINSIIDKAALRPTDVVLEVGPGTGNMTVKLLEKAKKVVACELDPRLVAELHKRVQGTPVASKLQVLVGDVLKTDLPFFDTCVANLPYQISSPFVFKLLLHRPFFRFVTKD

SEQ ID NO: 861808 - protein, 313 aa, Homo sapiens; identical to SEQ ID NO: 861804

SEQ ID NO: 861809 - protein, 313 aa, Homo sapiens; identical to SEQ ID NO: 861804

SEQ ID NO: 861810 - protein, 102 aa, Homo sapiens
MPKVKSGAIGRRRGRQEQRRELKSAGGLMFNTGIGQHILKNPLIINSIIDKAALRPTDVVLEVGPGTGNMTVKLLEKAKKEKGDLMFGITNDYVSKLSWFTI

SEQ ID NO: 861811 - protein, 313 aa, Homo sapiens; identical to SEQ ID NO: 861804

SEQ ID NO: 861812 - protein, 313 aa, Homo sapiens; identical to SEQ ID NO: 861804

SEQ ID NO: 861813 - protein, 181 aa, Homo sapiens
MPKVKSGAIGRRRGRQEQRRELKSAGGLMFNTGIGQHILKNPLIINSIIDKAALRPTDVVLEVGPGTGNMTVKLLEKAKKVVACELDPRLVAELHKRVQGTPVASKLQVLVGDVLKTDLPFFDTCVANLPYQISSPFVFKLLLHRPFFRCAILMFQREFALRLVAKPGDKLYCRLSISGKE

SEQ ID NO: 861814 - protein, 102 aa, Homo sapiens; identical to SEQ ID NO: 861810

SEQ ID NO: 861815 - protein, 269 aa, Homo sapiens [sequence omitted]

SEQ ID NO: 861816 - protein, 273 aa, Homo sapiens
MEANMPKRKEPGRSLRIKVISMGNAEVGKSCIIKRYCEKRFVSKYLATIGIDYGVTKVHVRDREIKVNIFDMAGHPFFYEVRNEFYKDTQGVILVYDVGQKDSFDALDAWLAEMKQELGPHGNMENIIFVVCANKIDCTKHRCVDESEGRLWAESKGFLYFETSAQTGEGINEMFQTFYISIVDLCENGGKRPTTNSSASFTKEQADAIRRIRNSKDSWDMLGVKPGASRDEVNKAYRKLAVLLHPDKCVAPGSEDAFKAVVNARTALLKNIK

SEQ ID NO: 861817 - protein, 93 aa, Homo sapiens
KLMHAAAGMEANMPKRKEPGRSLRIKVISMGNAEVGKSCIIKRYCEKRFVSKYLATIGIDYGVTKVHVRDREIKVNIFDMAGHPFFYEVRKPF

SEQ ID NO: 861818 - protein, 72 aa, Homo sapiens
LSFYLKVRNEFYKDTQGVILVYDVGQKDSFDALDAWLAEMKQELGPHGNMENIIFVVCANKVTPLEMVCSDF

SEQ ID NO: 861819 - protein, 132 aa, Homo sapiens
MASSGGEAVTRAAAPPWTRRPEGRASGAQEETEAGGPERARAMEANMPKRKEPGRSLRIKVISMGNAEVGKSCIIKRYCEKRFVSKYLATIGIDYGVTKVHVRDREIKVNIFDMAGHPFFYEMRKLRRREVK

SEQ ID NO: 861820 - protein, 922 aa, Homo sapiens
MFRKARRVNVRKRNDSEEEERERDEEQEPPPLLPPPGTGEEAGPGGGDRAPGGESLLGPGPSPPSALTPGLGAEAGGGFPGGAEPGNGLKPRKRPRENKEVPRASLLSFQDEEEENEEVFKVKKSSYSKKIVKLLKKEYKEDLEKSKIKTELNSSAESEQPLDKTGHVKDTNQEDGVIISEHGEDEMDMESEKEEEKPKTGGAFSNALSSLNVLRPGEIPDAAFIHAARKKRQMARELGDFTPHDNEPGKGRLVREDENDASDDEDDDEKRRIVFSVKEKSQRQKIAEEIGIEGSDDDALVTGEQDEELSRWEQEQIRKGINIPQVQASQPAEVNMYYQNTYQTMPYGSSYGIPYSYTAYGSSDAKSQKTDNTVPFKTPSNEMTPVTIDLVKKQLKDRLDSMKELHKTNRQQHEKHLQSRVDSTRAIERLEGSSGGIGERYKFLQEMRGYVQDLLECFSEKVPLINELESAIHQLYKQRASRLVQRRQDDIKDESSEFSSHSSQSSEDKALMAPNLDSFGRDRALYQEHAKRRIAEREARRTRRRQAREQTGKMADHLEGLSSDDEETSTDITNFNLEKDRISKESGKVFEDVLESFYSIDCIKSQFEAWRSKYYTSYKDAYIGLCLPKLFNPLIRLQLLTWTPLEAKCRDFENMLWFESLLFYGCEEREQEKDDVDVALLPTIVEKVILPKLTVIAENMWDPFSTTQTSRMVGITLKLINGYPSVVNAENKNTQVYLKALLLRMRRTLDDDVFMPLYPKNVLENKNSGPYLFFQRQFWSSVKLLGNFLQWYGIFSNKTLQELSIDGLLNRYILMAFQNSEYGDDSIKKAQNVINCFPKQWFMNLKGERTISQLENFCRYLVHLADTIYRNSIGCSDVEKRNARENIKQIVKLLASVRALDHAMSVASDHNVKEFKSLIEGK

SEQ ID NO: 861821 - protein, 529 aa, Homo sapiens
GVMAGSYPEGAPAVLADKRQQFGSRFLRDPARVFHHNAWDNVEWSEEQAAAAERKVQENSIQRVCQENKVPLINELESAIHQLYKQRASRLVQRRQDDIKDESSEFSSLKQSSEDKALMAPNLDSFGRDRALYQEHAKRRIAEREARRTRRRQAREQTGKMADHLEGLSSDDEETSTDITNFNLEKDRISKESGKVFEDVLESFYSIDCIKSQFEAWRSKYYTSYKDAYIGLCLPKLFNPLIRLQLLTWTPLEAKCRDFENMLWFESLLFYGCEEREQEKDDVDVALLPTIVEKVILPKLTVIAENMWDPFSTTQTSRMVGITLKLINGYPSVVNAENKNTQVYLKALLLRMRRTLDDDVFMPLYPKNVLENKNSGPYLFFQRQFWSSVKLLGNFLQWYGIFSNKTLQELSIDGLLNRYILMAFQNSEYGDDSIKKAQNVINCFPKQWFMNLKGERTISQLENFCRYLVHLADTIYRNSIGCSDVEKRNARENIKQIVKLLASVRALDHAMSVASDHNVKEFKSLIEGK

SEQ ID NO: 861822 - protein, 426 aa, Homo sapiens
MAFNFNCCCFADKALMAPNLDSFGRDRALYQEHAKRRIAEREARRTRRRQAREQTGKMADHLEGLSSDDEETSTDITNFNLEKDRISKESGKVFEDVLESFYSIDCIKSQFEAWRSKYYTSYKDAYIGLCLPKLFNPLIRLQLLTWTPLEAKCRDFENMLWFESLLFYGCEEREQEKDDVDVALLPTIVEKVILPKLTVIAENMWDPFSTTQTSRMVGITLKLINGYPSVVNAENKNTQVYLKALLLRMRRTLDDDVFMPLYPKNVLENKNSGPYLFFQRQFWSSVKLLGNFLQWYGIFSNKTLQELSIDGLLNRYILMAFQNSEYGDDSIKKAQNVINCFPKQWFMNLKGERTISQLENFCRYLVHLADTIYRNSIGCSDVEKRNARENIKQIVKLLASVRALDHAMSVASDHNVKEFKSLIEGK

SEQ ID NO: 861823 - protein, 820 aa, Homo sapiens
MFRKARRVNVRKRNDSEEEERERDEEQEPPPLLPPPGTGEEAGPGGGDRAPGGESLLGPGPSPPSALTPGLGAEAGGGFPGGAEPGNGLKPRKRPRENKEVPRASLLSFQDEEEENEEVFKVKKSSYSKKIVKLLKKEYKEDLEKSKIKTELNSSAESEQPLDKTGHVKDTNQEDGVIISEHGEDEMDMESEKEEEKPKTGGAFSNALSSLNVLRPGEIPDAAFIHAARKKRQMARELGDFTPHDNEPGKGRLVREDENDASDDEDDDEKRRIVFSVKEKSQRQKIAEEIGIEGSDDDALVTGEQDEELSRWEQEQIRKGINIPQVQASQPAEVNMYYQNTYQTMPYGSSYGIPYSYTAYGSSDAKSQKTDNTVPFKTPSNEMTPVTIDLVKKQLKDRLDSMKELHKTNRQQHEKHLQSRVDSTRAIERLEGSSGGIGERYKFLQEMRGYVQDLLECFSEKVPLINELESAIHQLYKQRASRLVQRRQDDIKDESSEFSSHSSQSSEDKALMAPNLDSFGRDRALYQEHAKRRIAEREARRTRRRQAREQTGKMADHLEGLSSDDEETSTDITNFNLEKDRISKESGKVFEDVLESFYSIDCIKSQFEAWRSKYYTSYKDAYIGLCLPKLFNPLIRLQLLTWTPLEAKCRDFENMLWFESLLFYGCEEREQEKDDVDVALLPTIVEKVILPKLTVIAENMWDPFSTTQTSRMVGITLKLINGYPSVVNAENKNTQVYLKALLLRMRRTLDDDVFMPLYPKNVLENKNSGPYLFFQRQFWSSVKVIKPPFQRGSCPIPRRKECCSERPRRIWTDRPCVVFS

SEQ ID NO: 861824 - protein, 922 aa, Homo sapiens; identical to SEQ ID NO: 861820

SEQ ID NO: 861825 - protein, 883 aa, Homo sapiens
MFRKARRVNVRKRNDSEEEERERDEEQEPPPLLPPPGTGEEAGPGGGDRAPGGESLLGPGPSPPSALTPGLGAEAGGGFPGGAEPGNGLKPRKRPRENKEVPRASLLSFQDEEEENEEVFKVKKSSYSKKIVKLLKKEYKEDLEKSKIKTELNSSAESEQPLDKTGHVKDTNQEDGVIISEHGEDEMDMESEKEEEKPKTGGAFSNALSSLNVLRPGEIPDAAFIHAARKKRQMARELGDFTPHDNEPGKGRLVREDENDASDDEDDDEKRRIVFSVKEKSQRQKIAEEIGIEGSDDDALVTGEQDEELSRWEQEQIRKGINIPQVQASQPAEVNMYYQNTYQTMPYGSSYGIPYSYTAYGSSDAKSQKTDNTVPFKTPSNEMTPVTIDLVKKQLKDRLDSMKELHKTNRQQHEKHLQSRVDSTRAIERLEGSSGGIGERYKFLQEMRGYVQDLLECFSEKVPLINELESAIHQLYKQRASRLVQRRQDDIKDESSEFSSHSSQSSEDKALMAPNLDSFGRDRALYQEHAKRRIAEREARRSNFKRIRQSFEDVLESFYSIDCIKSQFEAWRSKYYTSYKDAYIGLCLPKLFNPLIRLQLLTWTPLEAKCRDFENMLWFESLLFYGCEEREQEKDDVDVALLPTIVEKVILPKLTVIAENMWDPFSTTQTSRMVGITLKLINGYPSVVNAENKNTQVYLKALLLRMRRTLDDDVFMPLYPKNVLENKNSGPYLFFQRQFWSSVKLLGNFLQWYGIFSNKTLQELSIDGLLNRYILMAFQNSEYGDDSIKKAQNVINCFPKQWFMNLKGERTISQLENFCRYLVHLADTIYRNSIGCSDVEKRNARENIKQIVKLLASVRALDHAMSVASDHNVKEFKSLIEGK

SEQ ID NO: 861826 - protein, 922 aa, Homo sapiens; identical to SEQ ID NO: 861820

SEQ ID NO: 861827 - protein, 834 aa, Homo sapiens
MFRKARRVNVRKRNDSEEEERERDEEQEPPPLLPPPGTGEEAGPGGGDRAPGGESLLGPGPSPPSALTPGLGAEAGGGFPGGAEPGNGLKPRKRPRENKEVPRASLLSFQDEEEENEEVFKVKKSSYSKKIVKLLKKEYKEDLEKSKIKTELNSSAESEQPLDKTGHVKDTNQEDGVIISEHGEDEMDMESEKEEEKPKTGGAFSNALSSLNVLRPGEIPDAAFIHAARKKRQMARELGDFTPHDNEPGKGRLVREDENDASDDEDDDEKRRIVFSVKEKSQRQKIAEEIGIEGSDDDALVTGEQDEELSRWEQEQIRKGINIPQVQASQPAEVNMYYQNTYQTMPYGSSYGIPYSYTAYGSSDAKSQKTDNTVPFKTPSNEMTPVTIDLVKKQLKDRLDSMKELHKTNRQQHEKHLQSRVDSTRAIERLEGSSGGIGERYKFLQEMRGYVQDLLECFSEKVPLINELESAIHQLYKQRASRLVQRRQDDIKDESSEFSSHSSQSSEDKALMAPNLDSFGRDRALYQEHAKRRIAEREARRTRRRQAREQTGKMADHLEGLSSDDEETSTDITNFNLEKDRISKESGKVFEDVLESFYSIDCIKSQFEAWRSKYYTSYKDAYIGLCLPKLFNPLIRLQLLTWTPLEAKCRDFENMLWFESLLFYGCEEREQEKDDVDVALLPTIVEKVILPKLTVIAENMWDPFSTTQTSRMVGITLKLINGYPSVVNAENKNTQVYLKALLLRMRRTLDDDVFMPLYPKNVLENKNSGPYLFFQRQFWSSVKLLGNFLQWYGIFSNKTLQELSIDGLLNRYILMAFQNSEYGDDSIKKAQNVS

SEQ ID NO: 861828 - protein, 232 aa, Homo sapiens
AAARADMGEKLELRLKSPVGAEPAVYPWPLPVYDKHHDAAHEIIETIRWVCEEIPDLKLAMENYVLIDYDTKSFESMQRLCDKYNRAIDSIHQLWKGTTQPMKLNTRPSTGLLRHILQQVYNHSVTDPEKLNNYEPFSPEVYGETSFDLVAQMIDEIKMTDDDLFVDLGSGVGQVVLQVAAATNCKHHYGVEKADIPAKYAETMDREFRKWMKWYGKKHAEYTVSAIAPPRL

SEQ ID NO: 861829 - protein, 1708 aa, Homo sapiens
AAARADMGEKLELRLKSPVGAEPAVYPWPLPVYDKHHDAAHEIIETIRWVCEEIPDLKLAMENYVLIDYDTKSFESMQRLCDKYNRAIDSIHQLWKGTTQPMKLNTRPSTGLLRHILQQVYNHSVTDPEKLNNYEPFSPEVYGETSFDLVAQMIDEIKMTDDDLFVDLGSGVGQVVLQVAAATNCKHHYGVEKADIPAKYAETMDREFRKWMKWYGKKHAEYTLERGDFLSEEWRERIANTSVIFVNNFAFGPEVDHQLKERFANMKEGGRIVSSKPFAPLNFRINSRNLSDIGTIMRVVELSPLKGSVSWTGKPVSYYLHTIDRTILENYFSSLKNPKLREEQEAARRRQQRESKSNAAAPTKGPEGKVAGPADAPMDSGAEEEKAGAATVKKPSPSKARKKKLNKKGRKMAGRKRGRPKKMNTANPERKPKKNQMQRHSPNPLLVAPTPPALQKLLESFKIQYLQFLAYTKTPQYKASLQELLGQEKEKNAQLLGAAQQLLSHCQAQKEEIRRLFQQKLDELGVKALTYNDLIQAQKEISAHNQQLREQSEQLEQDNRALRGQSLQLLKARCEELQLDWATLSLEKLLKEKQALKSQISEKQRHCLELQISIVELEKSQRQQELLQLKSCVPPDDALSLHLRGKGALGRELEPDASRLHLELDCTKFSLPHLSSMSPELSMNGQAAGYELCGVLSRPSSKQNTPQYLASPLDQEVVPCTPSHVGRPRLEKLSGLAAPDYTRLSPAKIVLRRHLSQDHTVPGRPAASELHSRAEHTKENGLPYQSPSVPGSMKLSPQDPRPLSPGALQLAGEKSSEKGLRERAYGSSGELITSLPISIPLSTVQPNKLPVSIPLASVVLPSRAERARSTPSPVLQPRDPSSTLEKQIGANAHGAGSRSLALAPAGFSYAGSVAISGALAGSPASLTPGAEPATLDESSSSGSLFATVGSRSSTPQHPLLLAQPRNSLPASPAHQLSSSPRLGGAAQGPLPEASKGDLPSDSGFSDPESEAKRRIVFTITTGAGSAKQSPSSKHSPLTASARGDCVPSHGQDSRRRGRRKRASAGTPSLSAGVSPKRRALPSVAGLFTQPSGSPLNLNSMVSNINQPLEITAISSPETSLKSSPVPYQDHDQPPVLKKERPLSQTNGAHYSPLTSDEEPGSEDEPSSARIERKIATISLESKSPPKTLENGGGLAGRKPAPAGEPVNSSKWKSTFSPISDIGLAKSADSPLQASSALSQNSLFTFRPALEEPSADAKLAAHPRKGFPGSLSGADGLSPGTNPANGCTFGGGLAADLSLHSFSDGASLPHKGPEAAGLSSPLSFPSQRGKEGSDANPFLSKRQLDGLAGLKGEGSRGKEAGEGGLPLCGPTDKTPLLSGKAAKARDREVDLKNGHNLFISAAAVPPGSLLSGPGLAPAASSAGGAASSAQTHRSFLGPFPPGPQFALGPMSLQANLGSVAGSSVLQSLFSSVPAAAGLVHVSSAATRLTNSHAMGSFSGVAGGTVGGVFNHAVPSASAHPFGARVGRGAACGSATLGPSPLQAAASASASSFQAPASVETRPPPPPPPPPPPLPPPAHLGRSPAGPPVLHAPPPPNAALPPPPTLLASNPEPALLQSLASLPPNQAFLPPTSAASLPPANASLSIKLTSLPHKGARPSFTVHHQPLPRLALAQAAPGIPQASATGPSAVWVSLGMPPPYAAHLSGVKPR

SEQ ID NO: 861830 - protein, 1543 aa, Homo sapiens
AAARADMGEKLELRLKSPVGAEPAVYPWPLPVYDKHHDAAHEIIETIRWVCEEIPDLKLAMENYVLIDYDTKSFESMQRLCDKYNRAIDSIHQLWKGTTQPMKLNTRPSTGLLRHILQQVYNHSVTDPEKLNNYEPFSPEVYGETSFDLVAQMIDEIKMTDDDLFVDLGSGVGQVVLQVAAATNCKHHYGVEKADIPAKYAETMDREFRKWMKWYGKKHAEYTLERGDFLSEEWRERIANTSVIFVNNFAFGPEVDHQLKERFANMKEGGRIVSSKPFAPLNFRINSRNLSDIGTIMRVVELSPLKGSVSWTGKPVSYYLHTIDRTILENYFSSLKNPKLREEQEAARRRQQRESKSNAAAPTKGPEGKVAGPADAPMDSGAEEEKAGAATVKKPSPSKARKKKLNKKGRKMAGRKRGRPKKMNTANPERKPKKNQTALDALHAQTVSQTAASSPQDAYRSPHSPFYQLPPSVQRHSPNPLLVAPTPPALQKLLESFKIQYLQFLAYTKTPQYKASLQELLGQEKEKNAQLLGAAQQLLSHCQAQKEEIRRLFQQKLDELGVKALTYNDLIQAQKEISAHNQQLREQSEQLEQDNRALRGQSLQLLKARCEELQLDWATLSLEKLLKEKQALKSQISEKQRHCLELQISIVELEKSQRQQELLQLKSCVPPDDALSLHLRGKGALGRELEPDASRLHLELDCTKFSLPHLSSMSPELSMNGQAAGYELCGVLSRPSSKQNTPQYLASPLDQEVVPCTPSHVGRPRLEKLSGLAAPDYTRLSPAKIVLRRHLSQDHTVPGRPAASELHSRAEHTKENGLPYQSPSVPGSMKLSPQDPRPLSPGALQLAGEKSSEKGLRERAYGSSGELITSLPISIPLSTVQPNKLPVSIPLASVVLPSRAERARSTPSPVLQPRDPSSTLEKQIGANAHGAGSRSLALAPAGFSYAGSVAISGALAGSPASLTPGAEPATLDESSSSGSLFATVGSRSSTPQHPLLLAQPRNSLPASPAHQLSSSPRLGGAAQGPLPEASKGDLPSDSGFSDPESEAKRRIVFTITTGAGSAKQSPSSKHSPLTASARGDCVPSHGQDSRRRGRRKRASAGTPSLSAGVSPKRRALPSVAGLFTQPSGSPLNLNSMVSNINQPLEITAISSPETSLKSSPVPYQDHDQPPVLKKERPLSQTNGAHYSPLTSDEEPGSEDEPSSARIERKIATISLESKSPPKTLENGGGLAGRKPAPAGEPVNSSKWKSTFSPISDIGLAKSADSPLQASSALSQNSLFTFRPALEEPSADAKLAAHPRKGFPGSLSGADGLSPGTNPANGCTFGGGLAADLSLHSFSDGASLPHKGPEAAGLSSPLSFPSQRGKEGSDANPFLSKRQLDGLAGLKGEGSRGKEAGEGGLPLCGPTDKTPLLSGKAAKARDREVDLKNGHNLFISAAAVPPGSLLSGPGLAPAASSAGGAASSAQTHRSFLGPFPPGPQFALGPMSLQANLGSVAGSSVLQSLFSSVPAAAGLVHVSSAATRLTNSHAMGSFSGVAGGTVGGN

SEQ ID NO: 861831 - protein, 1708 aa, Homo sapiens; identical to SEQ ID NO: 861829

SEQ ID NO: 861832 - protein, 1684 aa, Homo sapiens
AAARADMGEKLELRLKSPVGAEPAVYPWPLPVYDKHHDAAHEIIETIRWVCEEIPDLKLAMENYVLIDYDTKSFESMQRLCDKYNRAIDSIHQLQVYNHSVTDPEKLNNYEPFSPEVYGETSFDLVAQMIDEIKMTDDDLFVDLGSGVGQVVLQVAAATNCKHHYGVEKADIPAKYAETMDREFRKWMKWYGKKHAEYTLERGDFLSEEWRERIANTSVIFVNNFAFGPEVDHQLKERFANMKEGGRIVSSKPFAPLNFRINSRNLSDIGTIMRVVELSPLKGSVSWTGKPVSYYLHTIDRTILENYFSSLKNPKLREEQEAARRRQQRESKSNAAAPTKGPEGKVAGPADAPMDSGAEEEKAGAATVKKPSPSKARKKKLNKKGRKMAGRKRGRPKKMNTANPERKPKKNQMQRHSPNPLLVAPTPPALQKLLESFKIQYLQFLAYTKTPQYKASLQELLGQEKEKNAQLLGAAQQLLSHCQAQKEEIRRLFQQKLDELGVKALTYNDLIQAQKEISAHNQQLREQSEQLEQDNRALRGQSLQLLKARCEELQLDWATLSLEKLLKEKQALKSQISEKQRHCLELQISIVELEKSQRQQELLQLKSCVPPDDALSLHLRGKGALGRELEPDASRLHLELDCTKFSLPHLSSMSPELSMNGQAAGYELCGVLSRPSSKQNTPQYLASPLDQEVVPCTPSHVGRPRLEKLSGLAAPDYTRLSPAKIVLRRHLSQDHTVPGRPAASELHSRAEHTKENGLPYQSPSVPGSMKLSPQDPRPLSPGALQLAGEKSSEKGLRERAYGSSGELITSLPISIPLSTVQPNKLPVSIPLASVVLPSRAERARSTPSPVLQPRDPSSTLEKQIGANAHGAGSRSLALAPAGFSYAGSVAISGALAGSPASLTPGAEPATLDESSSSGSLFATVGSRSSTPQHPLLLAQPRNSLPASPAHQLSSSPRLGGAAQGPLPEASKGDLPSDSGFSDPESEAKRRIVFTITTGAGSAKQSPSSKHSPLTASARGDCVPSHGQDSRRRGRRKRASAGTPSLSAGVSPKRRALPSVAGLFTQPSGSPLNLNSMVSNINQPLEITAISSPETSLKSSPVPYQDHDQPPVLKKERPLSQTNGAHYSPLTSDEEPGSEDEPSSARIERKIATISLESKSPPKTLENGGGLAGRKPAPAGEPVNSSKWKSTFSPISDIGLAKSADSPLQASSALSQNSLFTFRPALEEPSADAKLAAHPRKGFPGSLSGADGLSPGTNPANGCTFGGGLAADLSLHSFSDGASLPHKGPEAAGLSSPLSFPSQRGKEGSDANPFLSKRQLDGLAGLKGEGSRGKEAGEGGLPLCGPTDKTPLLSGKAAKARDREVDLKNGHNLFISAAAVPPGSLLSGPGLAPAASSAGGAASSAQTHRSFLGPFPPGPQFALGPMSLQANLGSVAGSSVLQSLFSSVPAAAGLVHVSSAATRLTNSHAMGSFSGVAGGTVGGVFNHAVPSASAHPFGARVGRGAACGSATLGPSPLQAAASASASSFQAPASVETRPPPPPPPPPPPLPPPAHLGRSPAGPPVLHAPPPPNAALPPPPTLLASNPEPALLQSLASLPPNQAFLPPTSAASLPPANASLSIKLTSLPHKGARPSFTVHHQPLPRLALAQAAPGIPQASATGPSAVWVSLGMPPPYAAHLSGVKPR

SEQ ID NO: 861833 - protein, 1146 aa, Homo sapiens
AAARADMGEKLELRLKSPVGAEPAVYPWPLPVYDKHHDAAHEIIETIRWVCEEIPDLKLAMENYVLIDYDTKSFESMQRLCDKYNRAIDSIHQLWKGTTQPMKLNTRPSTGLLRHILQQVYNHSVTDPEKLNNYEPFSPEVYGETSFDLVAQMIDEIKMTDDDLFVDLGSGVGQVVLQVAAATNCKHHYGVEKADIPAKYAETMDREFRKWMKWYGKKHAEYTLERGDFLSEEWRERIANTSVIFVNNFAFGPEVDHQLKERFANMKEGGRIVSSKPFAPLNFRINSRNLSDIGTIMRVVELSPLKGSVSWTGKPVSYYLHTIDRTILENYFSSLKNPKLREEQEAARRRQQRESKSNAAAPTKGPEGKVAGPADAPMDSGAEEEKAGAATVKKPSPSKARKKKLNKKGRKMAGRKRGRPKKMNTANPERKPKKNQMQRHSPNPLLVAPTPPALQKLLESFKIQYLQFLAYTKTPQYKASLQELLGQEKEKNAQLLGAAQQLLSHCQAQKEEIRRLFQQKLDELGVKALTYNDLIQAQKEISAHNQQLREQSEQLEQDNRALRGQSLQLLKARCEELQLDWATLSLEKLLKEKQALKSQISEKQRHCLELQISIVELEKSQRQQELLQLKSCVPPDDALSLHLRGKGALGRELEPDASRLHLELDCTKFSLPHLSSMSPELSMNGQAAGYELCGVLSRPSSKQNTPQYLASPLDQEVVPCTPSHVGRPRLEKLSGLAAPDYTRLSPAKIVLRRHLSQDHTVPGRPAASELHSRAEHTKENGLPYQSPSVPGSMKLSPQDPRPLSPGALQLAGEKSSEKGLRERAYGSSGELITSLPISIPLSTVQPNKLPVSIPLASVVLPSRAERARSTPSPVLQPRDPSSTLEKQIGANAHGAGSRSLALAPAGFSYAGSVAISGALAGSPASLTPGAEPATLDESSSSGSLFATVGSRSSTPQHPLLLAQPRNSLPASPAHQLSSSPRLGGAAQGPLPEASKGDLPSDSGFSDPESEAKRRIVFTITTGAGSAKQSPSSKHSPLTASARGDCVPSHGQDSRRRGRRKRASAGTPSLSAGVSPVLKKERPLSQTNGAHYSPLNSMVSNINQPLEITAISSPETSLKSSPVPYQDHCESAARAAGGWDWSSLYCR

SEQ ID NO: 861834 - protein, 751 aa, Homo sapiens
LVPLRRRRPAASELHSRAEHTKENGLPYQSPSVPGSMKLSPQDPRPLSPGALQLAGEKSSEKGLRERAYGSSGELITSLPISIPLSTVQPNKLPVSIPLASVVLPSRAERARSTPSPVLQPRDPSSTLEKQIGANAHGAGSRSLALAPAGFSYAGSVAISGALAGSPASLTPGAEPATLDESSSSGSLFATVGSRSSTPQHPLLLAQPRNSLPASPAHQLSSSPRLGGAAQGPLPEASKGDLPSDSGFSDPESEAKRRIVFTITTGAGSAKQSPSSKHSPLTASARGDCVPSHGQDSRRRGRRKRASAGTPSLSAGVSPKRRALPSVAGLFTQPSGSPLNLNSMVSNINQPLEITAISSPETSLKSSPVPYQDHDQPPVLKKERPLSQTNGAHYSPLTSDEEPGSEDEPSSARIERKIATISLESKSPPKTLENGGGLAGRKPAPAGEPVNSSKWKSTFSPISDIGLAKSADSPLQASSALSQNSLFTFRPALEEPSADAKLAAHPRKGFPGSLSGADGLSPGTNPANGCTFGGGLAADLSLHSFSDGASLPHKGPEAAGLSSPLSFPSQRGKEGSDANPFLSKRQLDGLAGLKGEGSRGKEAGEGGLPLCGPTDKTPLLSGKAAKARDREVDLKNGHNLFISAAAVPPGSLLSGPGLAPAASSAGGAASSAQTHRSFLGPFPPGPQFALGPMSLQANLGSVAGSSVLQSLFSSVPAAAGLVHVSSAATRLTNSHAMGSFSGVAGGTVGGN

SEQ ID NO: 861835 - protein, 486 aa, Homo sapiens
FPQTQHTPPHTPTPHTPNTTPTQRLGARLGVGRRRGRRKRASAGTPSLSAGVSPKRRALPSVAGLFTQPSGSPLNLNSMVSNINQPLEITAISSPETSLKSSPVPYQDHDQPPVLKKERPLSQTNGAHYSPLTSDEEPGSEDEPSSARIERKIATISLESKSPPKTLENGGGLAGRKPAPAGEPVNSSKWKSTFSPISDIGLAKSADSPLQASSALSQNSLFTFRPALEEPSADAKLAAHPRKGFPGSLSGADGLSPGTNPANGCTFGGGLAADLSLHSFSDGASLPHKGPEAAGLSSPLSFPSQRGKEGSDANPFLSKRQLDGLAGLKGEGSRGKEAGEGGLPLCGPTDKTPLLSGKAAKARDREVDLKNGHNLFISAAAVPPGSLLSGPGLAPAASSAGGAASSAQTHRSFLGPFPPGPQFALGPMSLQANLGSVAGSSVLQSLFSSVPAAAGLVHVSSAATRLTNSHAMGSFSGVAGGTVGGN

SEQ ID NO: 861836 - protein, 1708 aa, Homo sapiens; identical to SEQ ID NO: 861829

SEQ ID NO: 861837 - protein, 1708 aa, Homo sapiens; identical to SEQ ID NO: 861829

SEQ ID NO: 861838 - protein, 1146 aa, Homo sapiens; identical to SEQ ID NO: 861833

SEQ ID NO: 861839 - protein, 880 aa, Homo sapiens
AAARADMGEKLELRLKSPVGAEPAVYPWPLPVYDKHHDAAHEIIETIRWVCEEIPDLKLAMENYVLIDYDTKSFESMQRLCDKYNRAIDSIHQLWKGTTQPMKLNTRPSTGLLRHILQQVYNHSVTDPEKLNNYEPFSPEVYGETSFDLVAQMIDEIKMTDDDLFVDLGSGVGQVVLQVAAATNCKHHYGVEKADIPAKYAETMDREFRKWMKWYGKKHAEYTLERGDFLSEEWRERIANTSVIFVNNFAFGPEVDHQLKERFANMKEGGRIVSSKPFAPLNFRINSRNLSDIGTIMRVVELSPLKGSVSWTGKPVSYYLHTIDRTILENYFSSLKNPKLREEQEAARRRQQRESKSNAAAPTKGPEGKVAGPADAPMDSGAEEEKAGAATVKKPSPSKARKKKLNKKGRKMAGRKRGRPKKMNTANPERKPKKNQMQRHSPNPLLVAPTPPALQKLLESFKIQYLQFLAYTKTPQYKASLQELLGQEKEKNAQLLGAAQQLLSHCQAQKEEIRRLFQQKLDELGVKALTYNDLIQAQKEISAHNQQLREQSEQLEQDNRALRGQSLQLLKARCEELQLDWATLSLEKLLKEKQALKSQISEKQRHCLELQISIVELEKSQRQQELLQLKSCVPPDDALSLHLRGKGALGRELEPDASRLHLELDCTKFSLPHLSSMSPELSMNGQAAGYELCGVLSRPSSKQNTPQYLASPLDQEVVPCTPSHVGRPRLEKLSGLAAPDYTRLSPAKIVLRRHLSQDHTVPGRPAASELHSRAEHTKENGLPYQSPSVPGSMKLSPQDPRPLSPGALQLAGEKSSEKGLRERAYILGAFCVENTFCDAYWRLCFDTPSWADQVEEEGEDDKCVTSELLTGIPLATGDTS

SEQ ID NO: 861840 - protein, 63 aa, Homo sapiens
PLKFPRCPLPTRYWTVTPAASPSQLQASTLTVSSWVLGLLGHLLPLTHRVFSLQRSTPSPVLQ

SEQ ID NO: 861841 - protein, 79 aa, Homo sapiens
AAARADMGEKLELRLKSPVGAEPAVYPWPLPVYDKHHDAAHEIIETIRWVCEEIPDLKLAMENYVLIDYDTKSCWLRKT

SEQ ID NO: 861842 - protein, 1507 aa, Homo sapiens
AAARADMGEKLELRLKSPVGAEPAVYPWPLPVYDKHHDAAHEIIETIRWVCEEIPDLKLAMENYVLIDYDTKSFESMQRLCDKYNRAIDSIHQLWKGTTQPMKLNTRPSTGLLRHILQQVYNHSVTDPEKLNNYEPFSPEVYGETSFDLVAQMIDEIKMTDDDLFVDLGSGVGQVVLQVAAATNCKHHYGVEKADIPAKYAETMDREFRKWMKWYGKKHAEYTLERGDFLSEEWRERIANTSVIFVNNFAFGPEVDHQLKERFANMKEGGRIVSSKPFAPLNFRINSRNLSDIGTIMRVVELSPLKGSVSWTGKPVSYYLHTIDRTILENYFSSLKNPKLREEQEAARRRQQRESKSNAAAPTKGPEGKVAGPADAPMDSGAEEEKAGAATVKKPSPSKARKKKLNKKGRKMAGRKRGRPKKMNTANPERKPKKNQMQRHSPNPLLVAPTPPALQKLLESFKIQYLQFLAYTKTPQYKASLQELLGQEKEKNAQLLGAAQQLLSHCQAQKEEIRRLFQQKLDELGVKALTYNDLIQAQKEISAHNQQLREQSEQLEQDNRALRGQSLQLLKARCEELQLDWATLSLEKLLKEKQALKSQISEKQRHCLELQISIVELEKSQRQQELLQLKSCVPPDDALSLHLRGKGALGRELEPDASRLHLELDCTKFSLPHLSSMSPELSMNGQAAGYELCGVLSRPSSKQNTPQYLASPLDQEVVPCTPSHVGRPRLEKLSGLAAPDYTRLSPAKIVLRRHLSQDHTVPGRPAASELHSRAEHTKENGLPYQSPSVPGSMKLSPQDPRPLSPGALQLAGEKSSEKGLRERAYGSSGELITSLPISIPLSTVQPNKLPVSIPLASVVLPSRAERARSTPSPVLQPRDPSSTLEKQIGANAHGAGSRSLALAPAGFSYAGSVAISGALAGSPASLTPGAEPATLDESSSSGSLFATVGSRSSTPQHPLLLAQPRNSLPASPAHQLSSSPRLGGAAQGPLPEASKGDLPSDSGFSDPESEAKRRIVFTITTGAGSAKQSPSSKHSPLTASARGDCVPSHGQDSRRRGRRKRASAGTPSLSAGVSPKRRALPSVAGLFTQPSGSPLNLNSMVSNINQPLEITAISSPETSLKSSPVPYQDHDQPPVLKKERPLSQTNGAHYSPLTSDEEPGSEDEPSSARIERKIATISLESKSPPKTLENGGGLAGRKPAPAGEPVNSSKWKSTFSPISDIGLAKSADSPLQASSALSQNSLFTFRPALEEPSADAKLAAHPRKGFPGSLSGADGLSPGTNPANGCTFGGGLAADLSLHSFSDGASLPHKGPEAAGLSSPLSFPSQRGKEGSDANPFLSKRQLDGLAGLKGEGSRGKEAGEGGLPLCGPTDKTPLLSGKAAKARDREVDLKNGHNLFISAAAVPPGSLLSGPGLAPAASSAGGAASSAQTHRSFLGPFPPGPQFALGPMSLQANLGSVAGSSVLQSLFSSVPAAAGLVHVSSAATRLTNSHAMGSFSGVAGGTVGGN

SEQ ID NO: 861843 - protein, 1708 aa, Homo sapiens; identical to SEQ ID NO: 861829

SEQ ID NO: 861844 - protein, 972 aa, Homo sapiens
KACRARHSRQAWAPRLDGFSAALGVMEPHSGRLELKARCEELQLDWATLSLEKLLKEKQALKSQISEKQRHCLELQISIVELEKSQRQQELLQLKSCVPPDDALSLHLRGKGALGRELEPDASRLHLELDCTKFSLPHLSSMSPELSMNGQAAGYELCGVLSRPSSKQNTPQYLASPLDQEVVPCTPSHVGRPRLEKLSGLAAPDYTRLSPAKIVLRRHLSQDHTVPGRPAASELHSRAEHTKENGLPYQSPSVPGSMKLSPQDPRPLSPGALQLAGEKSSEKGLRERAYGSSGELITSLPISIPLSTVQPNKLPVSIPLASVVLPSRAERARSTPSPVLQPRDPSSTLEKQIGANAHGAGSRSLALAPAGFSYAGSVAISGALAGSPASLTPGAEPATLDESSSSGSLFATVGSRSSTPQHPLLLAQPRNSLPASPAHQLSSSPRLGGAAQGPLPEASKGDLPSDSGFSDPESEAKRRIVFTITTGAGSAKQSPSSKHSPLTASARGDCVPSHGQDSRRRGRRKRASAGTPSLSAGVSPKRRALPSVAGLFTQPSGSPLNLNSMVSNINQPLEITAISSPETSLKSSPVPYQDHDQPPVLKKERPLSQTNGAHYSPLTSDEEPGSEDEPSSARIERKIATISLESKSPPKTLENGGGLAGRKPAPAGEPVNSSKWKSTFSPISDIGLAKSADSPLQASSALSQNSLFTFRPALEEPSADAKLAAHPRKGFPGSLSGADGLSPGTNPANGCTFGGGLAADLSLHSFSDGASLPHKGPEAAGLSSPLSFPSQRGKEGSDANPFLSKRQLDGLAGLKGEGSRGKEAGEGGLPLCGPTDKTPLLSGKAAKARDREVDLKNGHNLFISAAAVPPGSLLSGPGLAPAASSAGGAASSAQTHRSFLGPFPPGPQFALGPMSLQANLGSVAGSSVLQSLFSSVPAAAGLVHVSSAATRLTNSHAMGSFSGVAGGTVGGN

SEQ ID NO: 861845 - protein, 1507 aa, Homo sapiens; identical to SEQ ID NO: 861842

SEQ ID NO: 861846 - protein, 1507 aa, Homo sapiens; identical to SEQ ID NO: 861842

SEQ ID NO: 861847 - protein, 1146 aa, Homo sapiens; identical to SEQ ID NO: 861833

SEQ ID NO: 861848 - protein, 644 aa, Homo sapiens
AAARADMGEKLELRLKSPVGAEPAVYPWPLPVYDKHHDAAHEIIETIRWVCEEIPDLKLAMENYVLIDYDTKSFESMQRLCDKYNRAIDSIHQLWKGTTQPMKLNTRPSTGLLRHILQQVYNHSVTDPEKLNNYEPFSPEVYGETSFDLVAQMIDEIKMTDDDLFVDLGSGVGQVVLQVAAATNCKHHYGVEKADIPAKYAETMDREFRKWMKWYGKKHAEYTLERGDFLSEEWRERIANTSVIFVNNFAFGPEVDHQLKERFANMKEGGRIVSSKPFAPLNFRINSRNLSDIGTIMRVVELSPLKGSVSWTGKPVSYYLHTIDRTILENYFSSLKNPKLREEQEAARRRQQRESKSNAGTPTKGPEGKVAGPADAPMDSGAEEEKAGAATVKKPSPSKARKKKLNKKGRKMAGRKRGRPKKMNTANPERKPKKNQMQRHSPNPLLVAPTPPALQKLLESFKIQYLQFLAYTKTPQYKASLQELLGQEKEKNAQLLGAAQQLLSHCQAQKEEIRRLFQQKLDELGVKALTYNDLIQAQKEISAHNQQLREQSEQLEQDNRALRGQSLQLLKARCEELQLDWATLSLEKLLKEKQALKSQISEKQRHCLELQVGCARGCTPWCPSLSHQPPCDVVEPRVVAVAAA

SEQ ID NO: 861849 - protein, 313 aa, Homo sapiens
MRVVTIVILLCFCKAAELRKASPGSVRSRVNHGRAGGGRRGSNPVKRYAPGLPCDVYTYLHEKYLDCQERKLVYVLPGWPQDLLHMLLARNKIRTLKNNMFSKFKKLKSLDLQQNEISKIESEAFFGLNKLTTLLLQHNQIKVLTEEVFIYTPLLSYLRLYDNPWHCTCEIETLISMLQIPRNRNLGNYAKCESPQEQKNKKLRQIKSEQLCNEEEKEQLDPKPQVSGRPPVIKPEVDSTFCHNYVFPIQTLDCKRKELKKVPNNIPPDIVKLDLSYNKINQLRPKEFEDVHELKKLNLSSNGIEFIDPGSLR

SEQ ID NO: 861850 - protein, 441 aa, Homo sapiens
MRVVTIVILLCFCKAAELRKASPGSVRSRVNHGRAGGGRRGSNPVKRYAPGLPCDVYTYLHEKYLDCQERKLVYVLPGWPQDLLHMLLARNKIRTLKNNMFSKFKKLKSLDLQQNEISKIESEAFFGLNKLTTLLLQHNQIKVLTEEVFIYTPLLSYLRLYDNPWHCTCEIETLISMLQIPRNRNLGNYAKCESPQEQKNKKLRQIKSEQLCNEEEKEQLDPKPQVSGRPPVIKPEVDSTFCHNYVFPIQTLDCKRKELKKVPNNIPPDIVKLDLSYNKINQLRPKEFEDVHELKKLNLSSNGIEFIDPAAFLGLTHLEELDLSNNSLQNFDYGVLEDLYFLKLLWLRDNPWRCDYNIHYLYYWLKHHYNVHFNGLECKTPEEYKGWSVGKYIRSYYEECPKDKLPAYPESFDQDTEDDEWEKKHRDHTAKKQSVIITIVG

SEQ ID NO: 861851 - protein, 393 aa, Homo sapiens
MSGLPCDVYTYLHEKYLDCQERKLVYVLPGWPQDLLHMLLARNKIRTLKNNMFSKFKKLKSLDLQQNEISKIESEAFFGLNKLTTLLLQHNQIKVLTEEVFIYTPLLSYLRLYDNPWHCTCEIETLISMLQIPRNRNLGNYAKCESPQEQKNKKLRQIKSEQLCNEEEKEQLDPKPQVSGRPPVIKPEVDSTFCHNYVFPIQTLDCKRKELKKVPNNIPPDIVKLDLSYNKINQLRPKEFEDVHELKKLNLSSNGIEFIDPAAFLGLTHLEELDLSNNSLQNFDYGVLEDLYFLKLLWLRDNPWRCDYNIHYLYYWLKHHYNVHFNGLECKTPEEYKGWSVGKYIRSYYEECPKDKLPAYPESFDQDTEDDEWEKKHRDHTAKKQSVIITIVG

SEQ ID NO: 861852 - protein, 313 aa, Homo sapiens; identical to SEQ ID NO: 861849

SEQ ID NO: 861853 - protein, 313 aa, Homo sapiens; identical to SEQ ID NO: 861849

SEQ ID NO: 861854 - protein, 300 aa, Homo sapiens [sequence omitted]

SEQ ID NO: 861855 - protein, 132 aa, Homo sapiens
QEVSTAWNSPPTGKLDNKQYMIMIPRKRETNTIHPLPFQLHLYFHPLFLNLLNIQNQSKCPSINEWIKKMWYIYTMEYYSATKRNKIMAFAATWMELETIIVHSSLKTFSIAACWAVFSSNFIDDAIIPSST

SEQ ID NO: 861856 - protein, 154 aa, Homo sapiens
RKQKSVKEISSYTPKDCTSRNGPERGCDRGIIVSTRLLTDSSTDALEKVSTSNEDFSLKDDALAKTSKRKTKVQKDEICAKLSHVIKKQHRKSTLVDNTINLDENLTVSNIESFYSRKDTGVQKGDGFIHNLSLDPSGVLDDKNGEQKSQNNVL

SEQ ID NO: 861857 - protein, 132 aa, Homo sapiens
MTVTGLGWRDVLEAIKATRPIANPNPGFRQQLEEFGWASSQKLRRQLEERFGESPFRDEEELRALLPLCKRCRQGSATSASSAGPHSAASEGTVQRLVPRTPREAHRPLPLLARVKQTFSCLPRCLSRKGGK

SEQ ID NO: 861858 - protein, 291 aa, Homo sapiens
LGSLRGCFSILSRLCLSLPFCLPSPRISIPAPCKSTSLLSSPPKTCLPPLPSHTQAGLPWFPLVLPGLYLGNFIDAKDLDQLGRNKITHIISIHESPQPLLQDITYLRIPVADTPEVPIKKHFKECINFIHCCRLNGGNCLVHCFAGISRSTTIVTAYVMTVTGLGWRDVLEAIKATRPIANPNPGFRQQLEEFGWASSQKLRRQLEERFGESPFRDEEELRALLPLCKRCRQGSATSASSAGPHSAASEGTVQRLVPRTPREAHRPLPLLARVKQTFSCLPRCLSRKGGK

SEQ ID NO: 861859 - protein, 235 aa, Homo sapiens
MGNGMTKVLPGLYLGNFIDAKDLDQLGRNKITHIISIHESPQPLLQDITYLRIPVADTPEVPIKKHFKECINFIHCCRLNGGNCLVHCFAGISRSTTIVTAYVMTVTGLGWRDVLEAIKATRPIANPNPGFRQQLEEFGWASSQKLRRQLEERFGESPFRDEEELRALLPLCKRCRQGSATSASSAGPHSAASEGTVQRLVPRTPREAHRPLPLLARVKQTFSCLPRCLSRKGGK

SEQ ID NO: 861860 - protein, 129 aa, Homo sapiens
MGNGMTKVLPGLYLGNFIDAKDLDQLGRNKITHIISIHESPQPLLQDITYLRIPVADTPEVPMCSDCRPQRSGTPVFPPPISLKGHNKPNMKTGSTGGVLLPRCKKHFKECINFIHCCRLNGGNCLVHW

SEQ ID NO: 861861 - protein, 517 aa, Homo sapiens
MPSSTSPDQGDDLENCILRFSDLDLKDMSLINPSSSLKAELDGSTKKKYSFAKKKAFALFVKTKEVPTKRSFECKEKLWKCCQQLFTDQTSIHRHVATQHADEIYHQTASILKQLAVTLSTSKSLSSADEKNPLKECLPHSHDVSAWLPDISCFNPDELISGQGSEEGEVLLYYCYHDLEDPQWICAWQTALCQHLHLTGKIRIAAEGINGTVGGSKLATRLYVEVMLSFPLFKDDLCKDDFKTSKGGAHCFPELRVGVFEEIVPMGISPKKISYKKPGIHLSPGEFHKEVEKFLSQANQEQSDTILLDCRNFYESKIVDDSKAASAPDIRKFSYFPSYVDKNLELFREKRVLMYCTGGIRCERGSAYLKAKGVCKEVFQLKGGIHKYLEEFPDGFYKGKLFVFDERYALSYNSDVVSECSYCGARWDQYKLCSTPQCRQLVLTCPACQGQGFTACCVTCQDKGSRKVSGPMQDSFKEECECTARRPRIPRELLQHVRQPVSPEPGPDADEDGPVLM

SEQ ID NO: 861862 - protein, 385 aa, Homo sapiens
MPSSTSPDQGDDLENCILRFSDLDLKDMSLINPSSSLKAELDGSTKKKYSFAKKKAFALFVKTKEVPTKRSFECKEKLWKCCQQLFTDQTSIHRHVATQHADEIYHQTASILKQLAVTLSTSKSLSSADEKNPLKECLPHSHDVSAWLPDISCFNPDELISGQGSEEGEVLLYYCYHDLEDPQWICAWQTALCQHLHLTGKIRIAAEGINGTVGGSKLATRLYVEVMLSFPLFKDDLCKDDFKTSKGGAHCFPELRVGVFEEIVPMGISPKKISYKKPGIHLSPGEFHKEVEKFLSQANQEQSDTILLDCRNFYESKIVMARLQKQRNRELQFWPLPPWQPSTLHSGRGGVTLSTTYLRHSDLDDARAQKIGELHGIPKLLRDRA

SEQ ID NO: 861863 - protein, 508 aa, Homo sapiens
MPSSTSPDQGDDLENCILRFSDLDLKDMSLINPSSSLKAELDGSTKKKYSFAKKKKFQQKGVLNVKKNCGNAVSSYSQTKPASIDMWQHNMLMKFITRQLLILKQLAVTLSTSKSLSSADEKNPLKECLPHSHDVSAWLPDISCFNPDELISGQGSEEGEVLLYYCYHDLEDPQWICAWQTALCQHLHLTGKIRIAAEGINGTVGGSKLATRLYVEVMLSFPLFKDDLCKDDFKTSKGGAHCFPELRVGVFEEIVPMGISPKKISYKKPGIHLSPGEFHKEVEKFLSQANQEQSDTILLDCRNFYESKIVDDSKAASAPDIRKFSYFPSYVDKNLELFREKRVLMYCTGGIRCERGSAYLKAKGVCKEVFQLKGGIHKYLEEFPDGFYKGKLFVFDERYALSYNSDVVSECSYCGARWDQYKLCSTPQCRQLVLTCPACQGQGFTACCVTCQDKGSRKVSGPMQDSFKEECECTARRPRIPRELLQHVRQPVSPEPGPDADEDGPVLM

SEQ ID NO: 861864 - protein, 298 aa, Homo sapiens [sequence omitted]

SEQ ID NO: 861865 - protein, 517 aa, Homo sapiens; identical to SEQ ID NO: 861861

SEQ ID NO: 861866 - protein, 291 aa, Homo sapiens
MLSFPLFKDDLCKDDFKTSKGGAHCFPELRVGVFEEIVPMGISPKKISYKKPGIHLSPGEFHKEVEKFLSQANQEQSDTILLDCRNFYESKIVDDSKAASAPDIRKFSYFPSYVDKNLELFREKRVLMYCTGGIRCERGSAYLKAKGVCKEVFQLKGGIHKYLEEFPDGFYKGKLFVFDERYALSYNSDVVSECSYCGARWDQYKLCSTPQCRQLVLTCPACQGQGFTACCVTCQDKGSRKVSGPMQDSFKEECECTARRPRIPRELLQHVRQPVSPEPGPDADEDGPVLM

SEQ ID NO: 861867 - protein, 106 aa, Homo sapiens
MAFPSSPECSYCGARWDQYKLCSTPQCRQLVLTCPACQGQGFTACCVTCQDKGSRKVSGPMQDSFKEECECTARRPRIPRELLQHVRQPVSPEPGPDADEDGPVLM

SEQ ID NO: 861868 - protein, 271 aa, Homo sapiens
MPSSTSPDQGDDLENCILRFSDLDLKDMSLINPSSSLKAELDGSTKKKYSFAKKKAFALFVKTKEVPTKRSFECKEKLWKCCQQLFTDQTSIHRHVATQHADEIYHQTASILKQLAVTLSTSKSLSSADEKNPLKECLPHSHDVSAWLPDISCFNPDELISGQGSEEGEVLLYYCYHDLEDPQWICAWQTALCQHLHLTGKIRIAAEGINGTVGGSKLATRLYVEVMLSFPLFKDDLCKDDFKVTRQYNRRSMLVPILSLSHHMILDQLVL

SEQ ID NO: 861869 - protein, 492 aa, Homo sapiens
MSSLGCWCGVEDEAAPSKQSIYIQRETQVRTPVTGVSPKKAHPCEMCGPILGDILHVADHQGTHHKQKLHRCEAWGNKLYDSGNFHQHQNEHIGEKPYRGSVEEALFVKRCKLHVSGESSVFSESGKDFLPRSGLLQQEASHTGEKSNSKTECVSPFQCGGAHYSHGDSMKHFSTKHILSQHQRLLPREECYVCCECGKSFSKYVSFSNHQRVHSGKRPYECGECEKSFSQKSSLIQHQQFHTGGKPYGCEECGKYFSLEGYLRRHQKVHAGKGPYECGECGKSFSSNVNLKSHQRIHTGERPYKCGECEKSFSRKPSLSYHQRIHTEVRPYKCGECGKSYISKGHLRIHQRMHTGERPYKCGDCGKSFNEKGHLRSHQRVHTTERPYKCGECGKCFSHKGNLILHQHGHTRKRPYMCWECGKLFKKKSHLLVHQRIHSGEKPYACEACQKFFRHKCHLTAHQRVHTGERPYECSDCGKSFTHSCAFIVHKR

SEQ ID NO: 861870 - protein, 206 aa, Homo sapiens
HLRVHTGERPYECVECGKSFRRSSSLLQHQRVHTRERPYECSECGKSFSLRSHLTEHQRLHTGERPYNCRECGKLFNRKYHLLVHERVHTGERPYACEVCGKLFGNKHSVTIHQRIHTGERPYECSECGKSFLSSSALHVHKRVHSGQKPYKCSECGKSFSECSSLIKHRRIHTGERPYECTKCGKTFQRSSTLLHHQSSHRRKAL

SEQ ID NO: 861871 - protein, 575 aa, Homo sapiens
MAAAVPRRPTQQGTVTFEDVAVNFSQEEWCLLSEAQRCLYRDVMLENLALISSLGCWCGSKDEEAPCKQRISVQRESQSRTPRAGVSPKKAHPCEMCGLILEDVFHFADHQETHHKQKLNRSGACGKNLDDTAYLHQHQKQHIGEKFYRKSVREASFVKKRKLRVSQEPFVFREFGKDVLPSSGLCQEEAAVEKTDSETMHGPPFQEGKTNYSCGKRTKAFSTKHSVIPHQKLFTRDGCYVCSDCGKSFSRYVSFSNHQRDHTAKGPYDCGECGKSYSRKSSLIQHQRVHTGQTAYPCEECGKSFSQKGSLISHQLVHTGEGPYECRECGKSFGQKGNLIQHQQGHTGERAYHCGECGKSFRQKFCFINHQRVHTGERPYKCGECGKSFGQKGNLVHHQRGHTGERPYECKECGKSFRYRSHLTEHQRLHTGERPYNCRECGKLFNRKYHLLVHERVHTGERPYACEVCGKLFGNKHSVTIHQRIHTGERPYECSECGKSFLSSSALHVHKRVHSGQKPYKCSECGKSFSECSSLIKHRRIHTGERPYECTKCGKTFQRSSTLLHHQSSHRRKAL

SEQ ID NO: 861872 - protein, 532 aa, Homo sapiens
MLENLALISSLGCWCGSKDEEAPCKQRISVQRESQSRTPRAGVSPKKAHPCEMCGLILEDVFHFADHQETHHKQKLNRSGACGKNLDDTAYLHQHQKQHIGEKFYRKSVREASFVKKRKLRVSQEPFVFREFGKDVLPSSGLCQEEAAVEKTDSETMHGPPFQEGKTNYSCGKRTKAFSTKHSVIPHQKLFTRDGCYVCSDCGKSFSRYVSFSNHQRDHTAKGPYDCGECGKSYSRKSSLIQHQRVHTGQTAYPCEECGKSFSQKGSLISHQLVHTGEGPYECRECGKSFGQKGNLIQHQQGHTGERAYHCGECGKSFRQKFCFINHQRVHTGERPYKCGECGKSFGQKGNLVHHQRGHTGERPYECKECGKSFRYRSHLTEHQRLHTGERPYNCRECGKLFNRKYHLLVHERVHTGERPYACEVCGKLFGNKHSVTIHQRIHTGERPYECSECGKSFLSSSALHVHKRVHSGQKPYKCSECGKSFSECSSLIKHRRIHTGERPYECTKCGKTFQRSSTLLHHQSSHRRKAL

SEQ ID NO: 861873 - protein, 532 aa, Homo sapiens; identical to SEQ ID NO: 861872

SEQ ID NO: 861874 - protein, 532 aa, Homo sapiens; identical to SEQ ID NO: 861872

SEQ ID NO: 861875 - protein, 532 aa, Homo sapiens; identical to SEQ ID NO: 861872

SEQ ID NO: 861876 - protein, 121 aa, Homo sapiens
MTTHLYDAPTVKFLTPCYHPNVDTQGNICLDILKEKWSAPYDIRTILLSIQCLLGQLNIDSPLNTHATKLWENPIALRSTCKGQAQWLTPVIPALWEAEASRSQGQEFETSLANMVKPHLY

SEQ ID NO: 861877 - protein, 575 aa, Homo sapiens; identical to SEQ ID NO: 861871

SEQ ID NO: 861878 - protein, 532 aa, Homo sapiens; identical to SEQ ID NO: 861872

SEQ ID NO: 861879 - protein, 532 aa, Homo sapiens; identical to SEQ ID NO: 861872

SEQ ID NO: 861880 - protein, 532 aa, Homo sapiens; identical to SEQ ID NO: 861872

SEQ ID NO: 861881 - protein, 284 aa, Homo sapiens
MLENLALISSLGCWCGSKDEEAPCKQRISVQRESQSRTPRAGVSPKKAHPCEMCGLILEDVFHFADHQETHHKQKLNRSGACGKNLDDTAYLHQHQKQHIGEKFYRKSVREASFVKKRKLRVSQEPFVFREFGKDVLPSSGLCQEEAAVEKTDSETMHGPPFQEGKTNYSCGKRTKAFSTKHSVIPHQKLFTRDGCYVCSDCGKSFSRYVSFSNHQRDHTAKGPYDCGECGKSYSRKSSLIQHQRVHTGQTAYPCEECGKSFSQKGSLISHPVWPCWCRMRLPL

SEQ ID NO: 861882 - protein, 240 aa, Homo sapiens
ELNGNYNSREAVRPKTHENYGGERLAQPTAALVRLGLPLALPIRDVAAFRHSPTTDQRGAGLGGGGLIRIRRQRQARGFSRGEGVRAAAAAEAAMDDEEETYRLWKIRKTIMQLCHDRGYLVTQDELDQTLEEFKAQFGDKPSEGRPRRTDLTVLVAHNDDPTDQMFVFFPEEPKVGIKTIKVYCQRMQEENITRALIVVQQGMTPSAKQSLVDMAPKYILEQFLQQELRHQHHGARASP

SEQ ID NO: 861883 - protein, 146 aa, Homo sapiens
MDDEEETYRLWKIRKTIMQLCHDRGYLVTQDELDQTLEEFKAQFGDKPSEGRPRRTDLTVLVAHNDDPTDQMFVFFPEEPKVGIKTIKVYCQRMQEENITRALIVVQQGMTPSAKQSLVDMAPKYILEQFLQQELRHQHHGARASP

SEQ ID NO: 861884 - protein, 146 aa, Homo sapiens; identical to SEQ ID NO: 861883

SEQ ID NO: 861885 - protein, 240 aa, Homo sapiens; identical to SEQ ID NO: 861882

SEQ ID NO: 861886 - protein, 146 aa, Homo sapiens; identical to SEQ ID NO: 861883

SEQ ID NO: 861887 - protein, 146 aa, Homo sapiens; identical to SEQ ID NO: 861883

SEQ ID NO: 861888 - protein, 240 aa, Homo sapiens; identical to SEQ ID NO: 861882

SEQ ID NO: 861889 - protein, 240 aa, Homo sapiens; identical to SEQ ID NO: 861882

SEQ ID NO: 861890 - protein, 240 aa, Homo sapiens; identical to SEQ ID NO: 861882

SEQ ID NO: 861891 - protein, 155 aa, Homo sapiens
VRIASVREAESCEEETYRLWKIRKTIMQLCHDRGYLVTQDELDQTLEEFKAQFGDKPSEGRPRRTDLTVLVAHNDDPTDQMFVFFPEEPKVGIKTIKVYCQRMQEENITRALIVVQQGMTPSAKQSLVDMAPKYILEQFLQQELRHQHHGARASP

SEQ ID NO: 861892 - protein, 106 aa, Homo sapiens [sequence omitted]

SEQ ID NO: 861893 - protein, 240 aa, Homo sapiens; identical to SEQ ID NO: 861882

SEQ ID NO: 861894 - protein, 118 aa, Homo sapiens
MDDEEETYRLWKIRKTIMQVSRAWYLVTQVASTHVLPSWGEASCGPARPIHLWICARCSLRRNKAPRGRSPGGSWCRVFTQTTLGPLCWGFGVRVSHQPLLPPGPSAFHPSSSLPRGP

SEQ ID NO: 861895 - protein, 226 aa, Homo sapiens
ELNGNYNSREAVRPKTHENYGGERLAQPTAALVRLGLPLALPIRDVAAFRHSPTTDQRGAGLGGGGLIRIRRQRQARGFSRGEGVRAAAAAEAAMDDEEETYRLWKIRKTIMQLCHDRGYLVTQDELDQTLEEFKAQFGDKPSEGRPRRTDLTVLVAHNDDPTDQMFVFFPEEPKVGIKTIKVYCQRMQEENITRALIVVQQEFSREQQEFSREQQEFSREQEFSR

SEQ ID NO: 861896 - protein, 181 aa, Homo sapiens
ELNGNYNSREAVRPKTHENYGGERLAQPTAALVRLGLPLALPIRDVAAFRHSPTTDQRGAGLGGGGLIRIRRQRQARGFSRGEGVRAAAAAEAAMDDEEETYRLWKIRKTIMQLCHDRGYLVTQDELDQTLEEFKAQFGDKPSEGRPRRTDLTVLVAHNDDPTDQMFVFFPGEQRVPGEFR

SEQ ID NO: 861897 - protein, 240 aa, Homo sapiens; identical to SEQ ID NO: 861882

SEQ ID NO: 861898 - protein, 240 aa, Homo sapiens; identical to SEQ ID NO: 861882

SEQ ID NO: 861899 - protein, 240 aa, Homo sapiens; identical to SEQ ID NO: 861882

SEQ ID NO: 861900 - protein, 240 aa, Homo sapiens; identical to SEQ ID NO: 861882

SEQ ID NO: 861901 - protein, 106 aa, Homo sapiens [sequence omitted]

SEQ ID NO: 861902 - protein, 277 aa, Homo sapiens
ELNGNYNSREAVRPKTHENYGGERLAQPTAALVRLGLPLALPIRDVAAFRHSPTTDQRGAGLGGGGLIRIRRQRQARGFSRGEGVRAAAAAEAAMDDEEETYRLWKIRKTIMQLCHDRGYLVTQDELDQTLEEFKAQFGDKPSEGRPRRTDLTVLVAHNDDPTDQMFVFFPEEPKVGIKTIKVYCQRMQEENITRALIVVQQGMTPSAKQLVPEHVVMTKEEVTELLARYKLRENQLPRIQAGDPVARYFGIKRGQVVKIIRPSETAGRYITYRLVQ

SEQ ID NO: 861903 - protein, 277 aa, Homo sapiens; identical to SEQ ID NO: 861902

SEQ ID NO: 861904 - protein, 240 aa, Homo sapiens; identical to SEQ ID NO: 861882

SEQ ID NO: 861905 - protein, 665 aa, Homo sapiens
GCGRQSGSGGARGAPKMAAGGAEGGSGPGAAMGDCAEIKSQFRTREGFYKLLPGDGAARRSGPASAQTPVPPQPPQPPPGPASASGPGAAGPASSPPPAGPGPGPALPAVRLSLVRLGEPDSAGAGEPPATPAGLGSGGDRVCFNLGRELYFYPGCCRRGSQRSIDLNKPIDKRIYKGTQPTCHDFNQFTAATETISLLVGFSAGQVQYLDLIKKDTSKLFNEERLIDKTKVTYLKWLPESESLFLASHASGHLYLYNVSHPCASAPPQYSLLKQGEGFSVYAAKSKAPRNPLAKWAVGEGPLNEFAFSPDGRHLACVSQDGCLRVFHFDSMLLRGLMKSYFGGLLCVCWSPDGRYVVTGGEDDLVTVWSFTEGRVVARGHGHKSWVNAVAFDPYTTRAEEAATAAGADGERSGEEEEEEPEAAGTGSAGGAPLSPLPKAGSITYRFGSAGQDTQFCLWDLTEDVLYPHPPLARTRTLPGTPGTTPPAASSSRGGEPGPGPLPRSLSRSNSLPHPAGGGKAGGPGVAAEPGTPFSIGRFATLTLQERRDRGAEKEHKRYHSLGNISRGGSGGSGSGGEKPSGPVPRSRLDPAKVLGTALCPRIHEVPLLEPLVCKKIAQERLTVLLFLEDCIITACQEGLICTWARPGKAGISSQPGNSPSGTVV

SEQ ID NO: 861906 - protein, 628 aa, Homo sapiens
GCGRQSGSGGARGAPKMAAGGAEGGSGPGAAMGDCAEIKSQFRTREGFYKLLPGDGAARRSGPASAQTPVPPQPPQPPPGPASASGPGAAGPASSPPPAGPGPGPALPAVRLSLVRLGEPDSAGAGEPPATPAGLGSGGDRVCFNLGRELYFYPGCCRRGSQRSIDLNKPIDKRIYKGTQPTCHDFNQFTAATETISLLVGFSAGQVQYLDLIKKDTSKLFNEERLIDKTKVTYLKWLPESESLFLASHASGHLYLYNVSHPCASAPPQYSLLKQGEGFSVYAAKSKAPRNPLAKWAVGEGPLNEFAFSPDGRHLACVSQDGCLRVFHFDSMLLRGLMKSYFGGLLCVCWSPDGRYVVTGGEDDLVTVWSFTEGRVVARGHGHKSWVNAVAFDPYTTRAEEAATAAGADGERSGEEEEEEPEAAGTGSAGGAPLSPLPKAGSITYRFGSAGQDTQFCLWDLTEDVLYPHPPLARTRTLPGTPGTTPPAASSSRGGEPGPGPLPRSLSRSNSLPHPAGGGKAGGPGVAAEPGTPFSIGRFATLTLQERRDRGAEKEHKRYHSLGNISRGGSGGSGSGGEKPSGPVPRSRLDPAKSPRSAVCPSVEWAGPGVVQPSPGPHPSCPCYCLCF

SEQ ID NO: 861907 - protein, 625 aa, Homo sapiens [sequence omitted]

SEQ ID NO: 861908 - protein, 625 aa, Homo sapiens [sequence omitted]

SEQ ID NO: 861909 - protein, 625 aa, Homo sapiens [sequence omitted]

SEQ ID NO: 861910 - protein, 625 aa, Homo sapiens [sequence omitted]

SEQ ID NO: 861911 - protein, 690 aa, Homo sapiens
GCGRQSGSGGARGAPKMAAGGAEGGSGPGAAMGDCAEIKSQFRTREGFYKLLPGDGAARRSGPASAQTPVPPQPPQPPPGPASASGPGAAGPASSPPPAGPGPGPALPAVRLSLVRLGEPDSAGAGEPPATPAGLGSGGDRVCFNLGRELYFYPGCCRRGSQRSIDLNKPIDKRIYKGTQPTCHDFNQFTAATETISLLVGFSAGQVQYLDLIKKDTSKLFNEERLIDKTKVTYLKWLPESESLFLASHASGHLYLYNVSHPCASAPPQYSLLKQGEGFSVYAAKSKAPRNPLAKWAVGEGPLNEFAFSPDGRHLACVSQDGCLRVFHFDSMLLRGLMKSYFGGLLCVCWSPDGRYVVTGGEDDLVTVWSFTEGRVVARGHGHKSWVNAVAFDPYTTRAEEAATAAGADGERSGEEEEEEPEAAGTGSAGGAPLSPLPKAGSITYRFGSAGQDTQFCLWDLTEDVLYPHPPLARTRTLPGTPGTTPPAASSSRGGEPGPGPLPRSLSRSNSLPHPAGGGKAGGPGVAAEPGTPFSIGRFATLTLQERRDRGAEKEHKRYHSLGNISRGGSGGSGSGGEKPSGPVPRSRLDPAKVLGTALCPRIHEVPLLEPLVCKKIAQERLTVLLFLEDCIITACQEGLICTWARPGKAFTDEETEAQTGEGSWPRSPSKSVVEGISSQPGNSPSGTVV

SEQ ID NO: 861912 - protein, 690 aa, Homo sapiens; identical to SEQ ID NO: 861911

SEQ ID NO: 861913 - protein, 634 aa, Homo sapiens
MRSGRIRVGGGKATGRGFGVRPIGGRAGHPEAPPPPSCGPAVPPSVEKRGLGWQRARPSSFHCACARHAHPLLGRKLEKSCCKLSSPFPAPPPGQTRPPCGAGNSEGRSAGRDGECGGLQRTLETEACRSSVSGRRLRALSPPGRPVTFCVVPDGETEALSQKHTLGGGRKRGQRRRENKGRITDRREGDGHTQGDRDPSGELDLAFPAWGAGSARKKIEKSGEWGRKGGTGGGGGWGKPEGGREGGRNFPKLQNMATLPLKPETAISVPEGGLPVAPSPALPEAHALGTLSAQQPPPAAATTSSTSLPFSPDSPGLLPNFPAPPPEGLMLSPAAVPVWSAGLELSAGTEGLLEAEKGLGTQAPHTMLRLPDPDPEGLLLGATAGGEVDEGLEAEAKVLTQLQSVPVEEPLELLTQCGPVASPDIGAEDAGTGMGGGSPRNAVAEDPSHHILLPGWPLQALVVLGVVSPATSCPGLHPPLDGRPLCYSPPHAVPCHIRGGLRVLTQGPCPLHLVLAVSGTPCPRAGLPAPRALSLSLPETLLIALPIAGVVTTAWNPKVEDRQPRAPETGDPPQCGISCQGRGVGQLWGDGGLPSPAPLDSSPCPHYPAQTKDSLIPGGSPAAVSPLYPKSLFF

SEQ ID NO: 861914 - protein, 634 aa, Homo sapiens
MGGHFWPPEPYTVFMWGSPWEADSPRVKLRGREKGRQTEGGAFPLVSSALSGDPRFFSPTTPPAEPIVVRLKEVRLQRDDFEILKVIGRGAFSEVAVVKMKQTGQVYAMKIMNKWDMLKRGEVSCFREERDVLVNGDRRWITQLHFAFQDENYLYLVMEYYVGGDLLTLLSKFGERIPAEMARFYLAEIVMAIDSVHRLGYVHRDIKPDNILLDRCGHIRLADFGSCLKLRADGTVRSLVAVGTPDYLSPEILQAVGGGPGTGSYGPECDWWALGVFAYEMFYGQTPFYADSTAETYGKIVHYKEHLSLPLVDEGVPEEARDFIQRLLCPPETRLGRGGAGDFRTHPFFFGLDWDGLRDSVPPFTPDFEGATDTCNFDLVEDGLTAMETLSDIREGAPLGVHLPFVGYSYSCMALRDSEVPGPTPMELEAEQLLEPHVQAPSLEPSVSPQDETAEVAVPAAVPAAEAEAEVTLRELQEALEEEVLTRQSLSREMEAIRTDNQNFASQLREAEARNRDLEAHVRQLQERMELLQAEGATAVTGVPSPRATDPPSHLDGPPAVAVGQCPLVGPGPMHRRHLLLPARVPRPGLSEALSLLLFAVVLSRAAALGCIGLVAHAGQLTAVWRRPGAARAP

SEQ ID NO: 861915 - protein, 690 aa, Homo sapiens; identical to SEQ ID NO: 861911

SEQ ID NO: 861916 - protein, 690 aa, Homo sapiens; identical to SEQ ID NO: 861911

SEQ ID NO: 861917 - protein, 690 aa, Homo sapiens; identical to SEQ ID NO: 861911

SEQ ID NO: 861918 - protein, 669 aa, Homo sapiens
MDSTVSAVCVVGRRLRSGPIRRRVEAAEGLGGASGMRSGRIRVGGGKATGRGFGVRPIGGRAGHPEAPPPPSCGPAVPPSVEKRGLGWQRARPSSFHCACARHAHPLLGRKLEKSCCKLSSPFPAPPPGQTRPPCGAGNSEGRSAGRDGECGGLQRTLETEACRSSVSGRRLRALSPPGRPVTFCVVPDGETEALSQKHTLGGGRKRGQRRRENKGRITDRREGDGHTQGDRDPSGELDLAFPAWGAGSARKKIEKSGEWGRKGGTGGGGGWGKPEGGREGGRNFPKLQNMATLPLKPETAISVPEGGLPVAPSPALPEAHALGTLSAQQPPPAAATTSSTSLPFSPDSPGLLPNFPAPPPEGLMLSPAAVPVWSAGLELSAGTEGLLEAEKGLGTQAPHTMLRLPDPDPEGLLLGATAGGEVDEGLEAEAKVLTQLQSVPVEEPLELLTQCGPVASPDIGAEDAGTGMGGGSPRNAVAEDPSHHILLPGWPLQALVVLGVVSPATSCPGLHPPLDGRPLCYSPPHAVPCHIRGGLRVLTQGPCPLHLVLAVSGTPCPRAGLPAPRALSLSLPETLLIALPIAGVVTTAWNPKVEDRQPRAPETGDPPQCGISCQGRGVGQLWGDGGLPSPAPLDSSPCPHYPAQTKDSLIPGGSPAAVSPLYPKSLFF

SEQ ID NO: 861919 - protein, 634 aa, Homo sapiens; identical to SEQ ID NO: 861913

SEQ ID NO: 861920 - protein, 62 aa, Homo sapiens
AYEMFYGQTPFYADSTAETYGKIVHYKVSTAAGRPGLSRRRSQAIASSPSEQEHLSLPLVDE

SEQ ID NO: 861921 - protein, 625 aa, Homo sapiens [sequence omitted]

SEQ ID NO: 861922 - protein, 625 aa, Homo sapiens [sequence omitted]

SEQ ID NO: 861923 - protein, 1220 aa, Homo sapiens
EKARALLEQAAEWTHSNMGNLKSVAQEPGPPCGLGLGLGLGLCGKQGPATPAPEPSRAPASLLPPAPEHSPPSSPLTQPPEGPKFPRVKNWEVGSITYDTLSAQAQQDGPCTPRRCLGSLVFPRKLQGRPSPGPPAPEQLLSQARDFINQYYSSIKRSGSQAHEQRLQEVEAEVAATGTYQLRESELVFGAKQAWRNAPRCVGRIQWGKLQVFDARDCRSAQEMFTYICNHIKYATNRGNLRSAITVFPQRCPGRGDFRIWNSQLVRYAGYRQQDGSVRGDPANVEITELCIQHGWTPGNGRFDVLPLLLQAPDEPPELFLLPPELVLEVPLEHPTLEWFAALGLRWYALPAVSNMLLEIGGLEFPAAPFSGWYMSTEIGTRNLCDPHRYNILEDVAVCMDLDTRTTSSLWKDKAAVEINVAVLHSYQLAKVTIVDHHAATASFMKHLENEQKARGGCPADWAWIVPPISGSLTPVFHQEMVNYFLSPAFRYQPDPWKGSAAKGTGITRKKTFKEVANAVKISASLMGTVMAKRVKATILYGSETGRAQSYAQQLGRLFRKAFDPRVLCMDEYDVVSLEHETLVLVVTSTFGNGDPPENGESFAAALMEMSGPYNSSPRPEQHKSYKIRFNSISCSDPLVSSWRRKRKESSNTDSAGALGTLRFCVFGLGSRAYPHFCAFARAVDTRLEELGGERLLQLGQGDELCGQEEAFRGWAQAAFQAACETFCVGEDAKAAARDIFSPKRSWKRQRYRLSAQAEGLQLLPGLIHVHRRKMFQATIRSVENLQSSKSTRATILVRLDTGGQEGLQYQPGDHIGVCPPNRPGLVEALLSRVEDPPAPTEPVAVEQLEKGSPGGPPPGWVRDPRLPPCTLRQALTFFLDITSPPSPQLLRLLSTLAEEPREQQELEALSQDPRRYEEWKWFRCPTLLEVLEQFPSVALPAPLLLTQLPLLQPRYYSVSSAPSTHPGEIHLTVAVLAYRTQDGLGPLHYGVCSTWLSQLKPGDPVPCFIRGAPSFRLPPDPSLPCILVGPGTGIAPFRGFWQERLHDIESKGLQPTPMTLVFGCRCSQLDHLYRDEVQNAQQRGVFGRVLTAFSREPDNPKTYVQDILRTELAAEVHRVLCLERGHMFVCGDVTMATNVLQTVQRILATEGDMELDEAGDVIGVLRDQQRYHEDIFGLTLRTQEVTSRIRTQSFSLQERQLRGAVPWAFDPPGSDTNSP

SEQ ID NO: 861924 - protein, 121 aa, Homo sapiens
MVNTYVQDILRTELAAEVHRVLCLERGHMFVCGDVTMATNVLQTVQRILATEGDMELDEAGDVIGVLRDQQRYHEDIFGLTLRTQEVTSRIRTQSFSLQERQLRGAVPWAFDPPGSDTNSP

SEQ ID NO: 861925 - protein, 115 aa, Homo sapiens
MATNVLQTVQRILATEGDMELDEAGDVIGVLRVRRGGPGLSVRGFLLRSPSRVLIHCALFRQDQQRYHEDIFGLTLRTQEVTSRIRTQSFSLQERQLRGAVPWAFDPPGSDTNSP

SEQ ID NO: 861926 - protein, 121 aa, Homo sapiens
MVTTYVQDILRTELAAEVHRVLCLERGHMFVCGDVTMATNVLQTVQRILATEGDMELDEAGDVIGVLRDQQRYHEDIFGLTLRTQEVTSRIRTQSFSLQERQLRGAVPWAFDPPGSDTNSP

SEQ ID NO: 861927 - protein, 121 aa, Homo sapiens; identical to SEQ ID NO: 861924

SEQ ID NO: 861928 - protein, 1027 aa, Homo sapiens
EKARALLEQAAEWTHSNMGNLKSVAQEPGPPCGLGLGLGLGLCGKQGPATPAPEPSRAPASLLPPAPEHSPPSSPLTQPPEGPKFPRVKNWEVGSITYDTLSAQAQQDGPCTPRRCLGSLVFPRKLQGRPSPGPPAPEQLLSQARDFINQYYSSIKRSGSQAHEQRLQEVEAEVAATGTYQLRESELVFGAKQAWRNAPRCVGRIQWGKLQVFDARDCRSAQEMFTYICNHIKYATNRGNLRSAITVFPQRCPGRGDFRIWNSQLVRYAGYRQQDGSVRGDPANVEITELCIQHGWTPGNGRFDVLPLLLQAPDEPPELFLLPPELVLEVPLEHPTLEWFAALGLRWYALPAVSNMLLEIGGLEFPAAPFSGWYMSTEIGTRNLCDPHRYNILEDVAVCMDLDTRTTSSLWKDKAAVEINVAVLHSYQLAKVTIVDHHAATASFMKHLENEQKARGGCPADWAWIVPPISGSLTPVFHQEMVNYFLSPAFRYQPDPWKGSAAKGTGITRKKTFKEVANAVKISASLMGTVMAKRVKATILYGSETGRAQSYAQQLGRLFRKAFDPRVLCMDEYDVVSLEHETLVLVVTSTFGNGDPPENGESFAAALMEMSGPYNSSPRPEQHKSYKIRFNSISCSDPLVSSWRRKRKESSNTDSAGALGTLRFCVFGLGSRAYPHFCAFARAVDTRLEELGGERLLQLGQGDELCGQEEAFRGWAQAAFQAACETFCVGEDAKAAARDIFSPKRSWKRQRYRLSAQAEGLQLLPGLIHVHRRKMFQATIRSVENLQSSKSTRATILVRLDTGGQEGLQYQPGDHIGVCPPNRPGLVEALLSRVEDPPAPTEPVAVEQLEKGSPGGPPPGWVRDPRLPPCTLRQALTFFLDITSPPSPQLLRLLSTLAEEPREQQELEALSQDPRRYEEWKWFRCPTLLEVLEQFPSVALPAPLLLTQLPLLQPRYYSVSSAPSTHPGEIHLTVAVLAYRTQDGLGPLHYGVCSTWLSQLKPGDPVPCFIRGAPSFRHFTSNFLCLT

SEQ ID NO: 861929 - protein, 613 aa, Homo sapiens
EKARALLEQAAEWTHSNMGNLKSVAQEPGPPCGLGLGLGLGLCGKQGPATPAPEPSRAPASLLPPAPEHSPPSSPLTQPPEGPKFPRVKNWEVGSITYDTLSAQAQQDGPCTPRRCLGSLVFPRKLQGRPSPGPPAPEQLLSQARDFINQYYSSIKRSGSQAHEQRLQEVEAEVAATGTYQLRESELVFGAKQAWRNAPRCVGRIQWGKLQVFDARDCRSAQEMFTYICNHIKYATNRGNLRSAITVFPQRCPGRGDFRIWNSQLVRYAGYRQQDGSVRGDPANVEITELCIQHGWTPGNGRFDVLPLLLQAPDEPPELFLLPPELVLEVPLEHPTLEWFAALGLRWYALPAVSNMLLEIGGLEFPAAPFSGWYMSTEIGTRNLCDPHRYNILEDVAVCMDLDTRTTSSLWKDKAAVEINVAVLHSYQLAKVTIVDHHAATASFMKHLENEQKARGGCPADWAWIVPPISGSLTPVFHQEMVNYFLSPAFRYQPDPWKGSAAKGTGITRKKTFKEVANAVKISASLMGTVMAKRVKATILYGSETGRAQSYAQQLGRLFRKAFDPRVLCMDEYDVVSLEHETLVLVVTSTFGNGDPPENGESVSLPEVSVTTE

SEQ ID NO: 861930 - protein, 124 aa, Homo sapiens
PHTHPELFLAGASVAGRSALGVRPSRLRHQQPLRAAWLSLPVPGERLPDSGPPDQDQPRSSPLEVVPSHICPEAARIQHYSSRKEQNASFPSLGLLPRAWVRLNLEGPSQQRYPRAYCHPLPVS

SEQ ID NO: 861931 - protein, 43 aa, Homo sapiens
PTHCILPRQDPRRYEEWKWFRCPTLLEVLEQFPSVALPAPLLL

SEQ ID NO: 861932 - protein, 1220 aa, Homo sapiens; identical to SEQ ID NO: 861923

SEQ ID NO: 861933 - protein, 121 aa, Homo sapiens; identical to SEQ ID NO: 861924

SEQ ID NO: 861934 - protein, 613 aa, Homo sapiens
EKARALLEQAAEWTHSNMGNLKSVAQEPGPPCGLGLGLGLGLCGKQGPATPAPEPSRAPASLLPPAPEHSPPSSPLTQPPEGPKFPRVKNWEVGSITYDTLSAQAQQDGPCTPRRCLGSLVFPRKLQGRPSPGPPAPEQLLSQARDFINQYYSSIKRSGSQAHEQRLQEVEAEVAATGTYQLRESELVFGAKQAWRNAPRCVGRIQWGKLQVFDARDCRSAQEMFTYICNHIKYATNRGNLRSAITVFPQRCPGRGDFRIWNSQLVRYAGYRQQDGSVRGDPANVEITELCIQHGWTPGNGRFDVLPLLLQAPDEPPELFLLPPELVLEVPLEHPTLEWFAALGLRWYALPAVSNMLLEIGGLEFPAAPFSGWYMSTEIGTRNLCDPHRYNILEDVAVCMDLDTRTTSSLWKDKAAVEINVAVLHSYQLAKVTIVDHHAATASFMKHLENEQKARGGCPADWAWIVPPISGSLTPVFHQEMVNYFLSPAFRYQPDPWKGSAAKGTGITRKKTFKEVANAVKISASLMGTVMAKRVKATILYGSETGRAQSYAQQLGRLFRKAFDPRVLCMDEYDVVSLEHETLVLVVTSTFGNGDPPENGENLFTLPRLALNS

SEQ ID NO: 861935 - protein, 2350 aa, Homo sapiens
MAAVLQQVLERTELNKLPKSVQNKLEKFLADQQSEIDGLKGRHEKFKVESEQQYFEIEKRLSHSQERLVNETRECQSLRLELEKLNNQLKALTEKNKELEIAQDRNIAIQSQFTRTKEELEAEKRDLIRTNERLSQELEYLTEDVKRLNEKLKESNTTKGELQLKLDELQASDVSVKYREKRLEQEKELLHSQNTWLNTELKTKTDELLALGREKGNEILELKCNLENKKEEVSRLEEQMNGLKTSNEHLQKHVEDLLTKLKEAKEQQASMEEKFHNELNAHIKLSNLYKSAADDSEAKSNELTRAVEELHKLLKEAGEANKAIQDHLLEVEQSKDQMEKEMLEKIGRLEKELENANDLLSATKRKGAILSEEELAAMSPTAAAVAKIVKPGMKLTELYNAYVETQDQLLLEKLENKRINKYLDEIVKEVEAKAPILKRQREEYERAQKAVASLSVKLEQAMKEIQRLQEDTDKANKQSSVLERDNRRMEIQVKDLSQQIRVLLMELEEARGNHVIRDEEVSSADISSSSEVISQHLVSYRNIEELQQQNQRLLVALRELGETREREEQETTSSKITELQLKLESALTELEQLRKSRQHQMQLVDSIVRQRDMYRILLSQTTGVAIPLHASSLDDVSLASTPKRPSTSQTVSTPAPVPVIESTEAIEAKAALKQLQEIFENYKKEKAENEKIQNEQLEKLQEQVTDLRSQNTKISTQLDFASKRYEMLQDNVEGYRREITSLHERNQKLTATTQKQEQIINTMTQDLRGANEKLAVAEVRAENLKKEKEMLKLSEVRLSQQRESLLAEQRGQNLLLTNLQTIQGILERSETETKQRLSSQIEKLEHEISHLKKKLENEVEQRHTLTRNLDVQLLDTKRQLDTETNLHLNTKELLKNAQKEIATLKQHLSNMEVQVASQSSQRTGKGQPSNKEDVDDLVSQLRQTEEQVNDLKERLKTSTSNVEQYQAMVTSLEESLNKEKQVTEEVRKNIEVRLKESAEFQTQLEKKLMEVEKEKQELQDDKRRAIESMEQQLSELKKTLSSVQNEVQEALQRASTALSNEQQARRDCQEQAKIAVEAQNKYERELMLHAADVEALQAAKEQVSKMASVRQHLEETTQKAESQLLECKASWEERERMLKDEVSKCVCRCEDLEKQNRLLHDQIEKLSDKVVASVKEGVQGPLNVSLSEEGKSQEQILEILRFIRREKEIAETRFEVAQVESLRYRQRVELLERELQELQDSLNAEREKVQVTAKTMAQHEELMKKTETMNVVMETNKMLREEKERLEQDLQQMQAKVRKLELDILPLQEANAELSEKSGMLQAEKKLLEEDVKRWKARNQHLVSQQKDPDTEEYRKLLSEKEVHTKRIQQLTEEIGRLKAEIARSNASLTNNQNLIQSLKEDLNKVRTEKETIQKDLDAKIIDIQEKVKTITQVKKIGRRYKTQYEELKAQQDKVMETSAQSSGDHQEQHVSVQEMQELKETLNQAETKSKSLESQVENLQKTLSEKETEARNLQEQTVQLQSELSRLRQDLQDRTTQEEQLRQQITEKEEKTRKAIVAAKSKIAHLAGVKDQLTKENEELKQRNGALDQQKDELDVRITALKSQYEGRISRLERELREHQERHLEQRDEPQEPSNKVPEQQRQITLKTTPASGERGIASTSDPPTANIKPTPVVSTPSKVTAAAMAGNKSTPRASIRPMVTPATVTNPTTTPTATVMPTTQVESQEAMQSEGPVEHVPVFGSTSGSVRSTSPNVQPSISQPILTVQQQTQATAFVQPTQQSHPQIEPANQELSSNIVEVVQSSPVERPSTSTAVFGTVSATPSSSLPKRTREEEEDSTIEASDQVSDDTVEMPLPKKLKSVTPVGTEEEVMAEESTDGEVETQVYNQDSQDSIGEGVTQGDYTPMEDSEETSQSLQIDLGPLQSDQQTTTSSQDGQGKGDDVIVIDSDDDYEEDEEDDDDDEDDTGMGDEGEDSNEGTGSADGNDGYEADDAEGGDGTDPGTETEESMGGGEGNHRAADSQNSGEGNTGAAESSFSQEVSREQQPSSASERQAPRAPQSPRRPPHPLPPRLTIHAPPQELGPPVQRIQMTRRQSVGRGLQLTPGIGGMQQHFFDDEDRTVPSTPTLVVPHRTDGFAEAIHSPQVAGVPRFRFGPPEDMPQTSSSHSDLGQLASQGGLGMYETPLFLAHEEESGGRSVPTTPLQVAAPVTVFTESTTSDASEHASQSVPMVTTSTGTLSTTNETATGDDGDEVFVEAESEGISSEAGLEIDSQQEEEPVQASDESDLPSTSQDPPSSSSVDTSSSQPKPFRRVRLQTTLRQGVRGRQFNRQRGVSHAMGGRGGINRGNIN

SEQ ID NO: 861936 - protein, 2363 aa, Homo sapiens
MAAVLQQVLERTELNKLPKSVQNKLEKFLADQQSEIDGLKGRHEKFKVESEQQYFEIEKRLSHSQERLVNETRECQSLRLELEKLNNQLKALTEKNKELEIAQDRNIAIQSQFTRTKEELEAEKRDLIRTNERLSQELEYLTEDVKRLNEKLKESNTTKGELQLKLDELQASDVSVKYREKRLEQEKELLHSQNTWLNTELKTKTDELLALGREKGNEILELKCNLENKKEEVSRLEEQMNGLKTSNEHLQKHVEDLLTKLKEAKEQQASMEEKFHNELNAHIKLSNLYKSAADDSEAKSNELTRAVEELHKLLKEAGEANKAIQDHLLEVEQSKDQMEKEMLEKIGRLEKELENANDLLSATKRKGAILSEEELAAMSPTAAAVAKIVKPGMKLTELYNAYVETQDQLLLEKLENKRINKYLDEIVKEVEAKAPILKRQREEYERAQKAVASLSVKLEQAMKEIQRLQEDTDKANKQSSVLERDNRRMEIQVKDLSQQIRVLLMELEEARGNHVIRDEEVSSADISSSSEVISQHLVSYRNIEELQQQNQRLLVALRELGETREREEQETTSSKITELQLKLESALTELEQLRKSRQHQMQLVDSIVRQRDMYRILLSQTTGVAIPLHASSLDDVSLASTPKRPSTSQTVSTPAPVPVIESTEAIEAKAALKQLQEIFENYKKEKAENEKIQNEQLEKLQEQVTDLRSQNTKISTQLDFASKRYEMLQDNVEGYRREITSLHERNQKLTATTQKQEQIINTMTQDLRGANEKLAVAEVRAENLKKEKEMLKLSEVRLSQQRESLLAEQRGQNLLLTNLQTIQGILERSETETKQRLSSQIEKLEHEISHLKKKLENEVEQRHTLTRNLDVQLLDTKRQLDTETNLHLNTKELLKNAQKEIATLKQHLSNMEVQVASQSSQRTGKGQPSNKEDVDDLVSQLRQTEEQVNDLKERLKTSTSNVEQYQAMVTSLEESLNKEKQVTEEVRKNIEVRLKESAEFQTQLEKKLMEVEKEKQELQDDKRRAIESMEQQLSELKKTLSSVQNEVQEALQRASTALSNEQQARRDCQEQAKIAVEAQNKYERELMLHAADVEALQAAKEQVSKMASVRQHLEETTQKAESQLLECKASWEERERMLKDEVSKCVCRCEDLEKQNRLLHDQIEKLSDKVVASVKEGVQGPLNVSLSEEGKSQEQILEILRFIRREKEIAETRFEVAQVESLRYRQRVELLERELQELQDSLNAEREKVQVTAKTMAQHEELMKKTETMNVVMETNKMLREEKERLEQDLQQMQAKVRKLELDILPLQEANAELSEKSGMLQAEKKLLEEDVKRWKARNQHLVSQQKDPDTEEYRKLLSEKEVHTKRIQQLTEEIGRLKAEIARSNASLTNNQNLIQSLKEDLNKVRTEKETIQKDLDAKIIDIQEKVKTITQVKKIGRRYKTQYEELKAQQDKVMETSAQSSGDHQEQHVSVQEMQELKETLNQAETKSKSLESQVENLQKTLSEKETEARNLQEQTVQLQSELSRLRQDLQDRTTQEEQLRQQITEKEEKTRKAIVAAKSKIAHLAGVKDQLTKENEELKQRNGALDQQKDELDVRITALKSQYEGRISRLERELREHQERHLEQRDEPQEPSNKVPEQQRQITLKTTPASGERGIASTSDPPTANIKPTPVVSTPSKVTAAAMAGNKSTPRASIRPMVTPATVTNPTTTPTATVMPTTQVESQEAMQSEGPVEHVPVFGSTSGSVRSTSPNVQPSISQPILTVQQQTQATAFVQPTQQSHPQIEPANQELSSNIVEVVQSSPVERPSTSTAVFGTVSATPSSSLPKRTREEEEDSTIEASDQVSDDTVEMPLPKKLKSVTPVGTEEEVMAEESTDGEVETQVYNQDSQDSIGEGVTQGDYTPMEDSEETSQSLQIDLGPLQSDQQTTTSSQDGQGKGDDVIVIDSDDEEEDDDENDGEHEDYEEDEEDDDDDEDDTGMGDEGEDSNEGTGSADGNDGYEADDAEGGDGTDPGTETEESMGGGEGNHRAADSQNSGEGNTGAAESSFSQEVSREQQPSSASERQAPRAPQSPRRPPHPLPPRLTIHAPPQELGPPVQRIQMTRRQSVGRGLQLTPGIGGMQQHFFDDEDRTVPSTPTLVVPHRTDGFAEAIHSPQVAGVPRFRFGPPEDMPQTSSSHSDLGQLASQGGLGMYETPLFLAHEEESGGRSVPTTPLQVAAPVTVFTESTTSDASEHASQSVPMVTTSTGTLSTTNETATGDDGDEVFVEAESEGISSEAGLEIDSQQEEEPVQASDESDLPSTSQDPPSSSSVDTSSSQPKPFRRVRLQTTLRQGVRGRQFNRQRGVSHAMGGRGGINRGNIN

SEQ ID NO: 861937 - protein, 3021 aa, Homo sapiens
MAAVLQQVLERTELNKLPKSVQNKLEKFLADQQSEIDGLKGRHEKFKVESEQQYFEIEKRLSHSQERLVNETRECQSLRLELEKLNNQLKALTEKNKELEIAQDRNIAIQSQFTRTKEELEAEKRDLIRTNERLSQELEYLTEDVKRLNEKLKESNTTKGELQLKLDELQASDVSVKYREKRLEQEKELLHSQNTWLNTELKTKTDELLALGREKGNEILELKCNLENKKEEVSRLEEQMNGLKTSNEHLQKHVEDLLTKLKEAKEQQASMEEKFHNELNAHIKLSNLYKSAADDSEAKSNELTRAVEELHKLLKEAGEANKAIQDHLLEVEQSKDQMEKEMLEKIGRLEKELENANDLLSATKRKGAILSEEELAAMSPTAAAVAKIVKPGMKLTELYNAYVETQDQLLLEKLENKRINKYLDEIVKEVEAKAPILKRQREEYERAQKAVASLSVKLEQAMKEIQRLQEDTDKANKQSSVLERDNRRMEIQVKDLSQQIRVLLMELEEARGNHVIRDEEVSSADISSSSEVISQHLVSYRNIEELQQQNQRLLVALRELGETREREEQETTSSKITELQLKLESALTELEQLRKSRQHQMQLVDSIVRQRDMYRILLSQTTGVAIPLHASSLDDVSLASTPKRPSTSQTVSTPAPVPVIESTEAIEAKAALKQLQEIFENYKKEKAENEKIQNEQLEKLQEQVTDLRSQNTKISTQLDFASKRYLENYFFHTSYEMLQDNVEGYRREITSLHERNQKLTATTQKQEQIINTMTQDLRGANEKLAVAEVRAENLKKEKEMLKLSEVRLSQQRESLLAEQRGQNLLLTNLQTIQGILERSETETKQRLSSQIEKLEHEISHLKKKLENEVEQRHTLTRNLDVQLLDTKRQLDTETNLHLNTKELLKNAQKEIATLKQHLSNMEVQVASQSSQRTGKGQPSNKEDVDDLVSQLRQTEEQVNDLKERLKTSTSNVEQYQAMVTSLEESLNKEKQVTEEVRKNIEVRLKESAEFQTQLEKKLMEVEKEKQELQDDKRRAIESMEQQLSELKKTLSSVQNEVQEALQRASTALSNEQQARRDCQEQAKIAVEAQNKYERELMLHAADVEALQAAKEQVSKMASVRQHLEETTQKAESQLLECKASWEERERMLKDEVSKCVCRCEDLEKQNRLLHDQIEKLSDKVVASVKEGVQGPLNVSLSEEGKSQEQILEILRFIRREKEIAETRFEVAQVESLRYRQRVELLERELQELQDSLNAEREKVQVGILSFKKALVKSKEKHSFISLPFNVNVKFNYEVSILPKLVNFIKHLLNTEYSIVLKSKGSVTKLPGFRFYFIPLAVALGTLFNFPALSFFICNIWIIMRFNEFVHMKHLEACLVCSGCLINSSYLNLLKLWIIRVDSHSRIKDLNCYRISFSPKEQKVVKTNNQRKRSCGSEMDDNKTSLTPYPTLPPKAYLLSYFILRSYSNIPPPLEGRKLRSENIYLLLTDEYVKMTVEEETIEQGKVNNEFYGIYVFSKSYRFQNYILFNSNVSHHGNNRASSSIELILGGKGTESESLTKTAYCFSLFRFIFYSFGLQKVNTRKCPPTNEFIGGNQLLNTGRRESTSNIDYIKNNIMGRAWWLMPVIPALWEAEAGGSRGEEIETILANTVKPRLYQKYKKISWAWWWQAPVVPATREAEAGERREIREAELAVSRDHTTGLQSGRQSETPSQKKKKIIIVMECLSKHEQCSMATMKYAIALKTVGEESNTKCRRWIIITYEKEKILHRYFSKISHGQSDETMDQNERFLNKREKLRIRKHFRTNKFSAARKKRYRKVNERFGLMFLPNVNTLLVGFVASFHFCLCNSCICLKSAVRMPHRKVNVNFQNFSSQKLKLKSSLFCHEGGFELIGTGRLSTIVRCWYVYLFEMFEVTAKTMAQHEELMKKTETMNVVMETNKMLREEKERLEQDLQQMQAKVRKLELDILPLQEANAELSEKSGMLQAEKKLLEEDVKRWKARNQHLVSQQKDPDTEEYRKLLSEKEVHTKRIQQLTEEIGRLKAEIARSNASLTNNQNLIQSLKEDLNKVRTEKETIQKDLDAKIIDIQEKVKTITQVKKIGRRYKTQYEELKAQQDKVMETSAQSSGDHQEQHVSVQEMQELKETLNQAETKSKSLESQVENLQKTLSEKETEARNLQEQTVQLQSELSRLRQDLQDRTTQEEQLRQQITEKEEKTRKAIVAAKSKIAHLAGVKDQLTKENEELKQRNGALDQQKDELDVRITALKSQYEGRISRLERELREHQERHLEQRDEPQEPSNKVPEQQRQITLKTTPASGERGIASTSDPPTANIKPTPVVSTPSKVTAAAMAGNKSTPRASIRPMVTPATVTNPTTTPTATVMPTTQVESQEAMQSEGPVEHVPVFGSTSGSVRSTSPNVQPSISQPILTVQQQTQATAFVQPTQQSHPQIEPANQELSSNIVEVVQSSPVERPSTSTAVFGTVSATPSSSLPKRTREEEEDSTIEASDQVSDDTVEMPLPKKLKSVTPVGTEEEVMAEESTDGEVETQVYNQDSQDSIGEGVTQGDYTPMEDSEETSQSLQIDLGPLQSDQQTTTSSQDGQGKGDDVIVIDSDDEEEDDDENDGEHEDYEEDEEDDDDDEDDTGMGDEGEDSNEGTGSADGNDGYEADDAEGGDGTDPGTETEESMGGGEGNHRAADSQNSGEGNTGAAESSFSQEVSREQQPSSASERQAPRAPQSPRRPPHPLPPRLTIHAPPQELGPPVQRIQMTRRQSVGRGLQLTPGIGGMQQHFFDDEDRTVPSTPTLVVPHRTDGFAEAIHSPQVAGVPRFRFGPPEDMPQTSSSHSDLGQLASQGGLGMYETPLFLAHEEESGGRSVPTTPLQVAAPVTVFTESTTSDASEHASQSVPMVTTSTGTLSTTNETATGDDGDEVFVEAESEGISSEAGLEIDSQQEEEPVQASDESDLPSTSQDPPSSSSVDTSSSQPKPFRRVRLQTTLRQGVRGRQFNRQRGVSHAMGGRGGINRGNIN

SEQ ID NO: 861938 - protein, 2886 aa, Homo sapiens
MAAVLQQVLERTELNKLPKSVQNKLEKFLADQQSEIDGLKGRHEKFKVESEQQYFEIEKRLSHSQERLVNETRECQSLRLELEKLNNQLKALTEKNKELEIAQDRNIAIQSQFTRTKEELEAEKRDLIRTNERLSQELEYLTEDVKRLNEKLKESNTTKGELQLKLDELQASDVSVKYREKRLEQEKELLHSQNTWLNTELKTKTDELLALGREKGNEILELKCNLENKKEEVSRLEEQMNGLKTSNEHLQKHVEDLLTKLKEAKEQQASMEEKFHNELNAHIKLSNLYKSAADDSEAKSNELTRAVEELHKLLKEAGEANKAIQDHLLEVEQSKDQMEKEMLEKIGRLEKELENANDLLSATKRKGAILSEEELAAMSPTAAAVAKIVKPGMKLTELYNAYVETQDQLLLEKLENKRINKYLDEIVKEVEAKAPILKRQREEYERAQKAVASLSVKLEQAMKEIQRLQEDTDKANKQSSVLERDNRRMEIQVKDLSQQIRVLLMELEEARGNHVIRDEEVSSADISSSSEVISQHLVSYRNIEELQQQNQRLLVALRELGETREREEQETTSSKITELQLKLESALTELEQLRKSRQHQMQLVDSIVRQRDMYRILLSQTTGVAIPLHASSLDDVSLASTPKRPSTSQTVSTPAPVPVIESTEAIEAKAALKQLQEIFENYKKEKAENEKIQNEQLEKLQEQVTDLRSQNTKISTQLDFASKRYLENYFFHTSYEMLQDNVEGYRREITSLHERNQKLTATTQKQEQIINTMTQDLRGANEKLAVAEVRAENLKKEKEMLKLSEVRLSQQRESLLAEQRGQNLLLTNLQTIQGILERSETETKQRLSSQIEKLEHEISHLKKKLENEVEQRHTLTRNLDVQLLDTKRQLDTETNLHLNTKELLKNAQKEIATLKQHLSNMEVQVASQSSQRTGKGQPSNKEDVDDLVSQLRQTEEQVNDLKERLKTSTSNVEQYQAMVTSLEESLNKEKQVTEEVRKNIEVRLKESAEFQTQLEKKLMEVEKEKQELQDDKRRAIESMEQQLSELKKTLSSVQNEVQEALQRASTALSNEQQARRDCQEQAKIAVEAQNKYERELMLHAADVEALQAAKEQVSKMASVRQHLEETTQKAESQLLECKASWEERERMLKDEVSKCVCRCEDLEKQNRLLHDQIEKLSDKVVASVKEGVQGPLNVSLSEEGKSQEQILEILRFIRREKEIAETRFEVAQVESLRYRQRVELLERELQELQDSLNAEREKVQVGILSFKKALVKSKEKHSFISLPFNVNVKFNYEVSILPKLVNFIKHLLNTEYSIVLKSKGSVTKLPGFRFYFIPLAVALGTLFNFPALSFFICNIWIIMRFNEFVHMKHLEACLVCSGCLINSSYLNLLKLWIIRVDSHSRIKDLNCYRISFSPKEQKVVKTNNQRKRSCGSEMDDNKTSLTPYPTLPPKAYLLSYFILRSYSNIPPPLEGRKLRSENIYLLLTDEYVKMTVEEETIEQGKVNNEFYGIYVFSKSYRFQNYILFNSNVSHHGNNRASSSIELILGGKGTESESLTKTAYCFSLFRFIFYSFGLQKVNTRKCPPTNEFIGGNQLLNTGRRESTSNIDYIKNNIMGRAWWLMPVIPALWEAEAGGSRGEEIETILANTVKPRLYQKYKKISWAWWWQAPVVPATREAEAGERREIREAELAVSRDHTTGLQSGRQSETPSQKKKKIIIVMECLSKHEQCSMATMKYAIALKTVGEESNTKCRRWIIITYEKEKILHRYFSKISHGQSDETMDQNERFLNKREKLRIRKHFRTNKFSAARKKRYRKVNERFGLMFLPNVNTLLVGFVASFHFCLCNSCICLKSAVRMPHRKVNVNFQNFSSQKLKLKSSLFCHEGGFELIGTGRLSTIVRCWYVYLFEMFEVTAKTMAQHEELMKKTETMNVVMETNKMLREEKERLEQDLQQMQAKVRKLELDILPLQEANAELSEKSGMLQAEKKLLEEDVKRWKARNQHLVSQQKDPDTEEYRKLLSEKEVHTKRIQQLTEEIGRLKAEIARSNASLTNNQNLIQSLKEDLNKVRTEKETIQKDLDAKIIDIQEKVKTITQVKKIGRRYKTQYEELKAQQDKVMETSAQSSGDHQEQHVSVQEMQELKETLNQAETKSKSLESQVENLQKTLSEKETEARNLQEQTVQLQSELSRLRQDLQDRTTQEEQLRQQITEKEEKTRKAIVAAKSKIAHLAGVKDQLTKENEELKQRNGALDQQKDELDVRITALKSQYEGRISRLERELREHQERHLEQRDEPQEPSNKVPEQQRQITLKTTPASGERGIASTSDPPTANIKPTPVVSTPSKVTAAAMAGNKSTPRASIRPMVTPATVTNPTTTPTATVMPTTQVESQEAMQSEGPVEHVPVFGSTSGSVRSTSPNVQPSISQPILTVQQQTQATAFVQPTQQSHPQIEPANQELSSNIVEVVQSSPVERPSTSTAVFGTVSATPSSSLPKRTREEEEDSTIEASDQVSDDTVEMPLPKKLKSVTPVGTEEEVMAEESTDGEVETQVYNQDSQDSIGEGVTQGDYTPMEDSEETSQSLQIDLGPLQSDQQTTTSSQDGQGKGDDVIVIDSDDEEEDDDENDGEHEDYEEDEEDDDDDEDDTGMGDEGEDSNEGTGSADGNDGYEADDAEGGDGTDPGTETEESMGGGEGNHRAADSQNSGEGNTGAAESSFSQEVSREQQPSSASERQAPRAPQSPRRPPHPLPPRLTIHAPPQELGPPVQRIQMTRRQSVGRGLQLTPGIGGMQQHFFDDEDRTVPSTPTLVVPHRTDGFAEAIHSPQVAGVPRFRFGPPEDMPQTSSSHSDLGQLASQGGLGMYETPLFLAHEEESGGRSVPTTPLQVAAPVLVQKQA

SEQ ID NO: 861939 - protein, 1287 aa, Homo sapiens
MAAVLQQVLERTELNKLPKSVQNKLEKFLADQQSEIDGLKGRHEKFKVESEQQYFEIEKRLSHSQERLVNETRECQSLRLELEKLNNQLKALTEKNKELEIAQDRNIAIQSQFTRTKEELEAEKRDLIRTNERLSQELEYLTEDVKRLNEKLKESNTTKGELQLKLDELQASDVSVKYREKRLEQEKELLHSQNTWLNTELKTKTDELLALGREKGNEILELKCNLENKKEEVSRLEEQMNGLKTSNEHLQKHVEDLLTKLKEAKEQQASMEEKFHNELNAHIKLSNLYKSAADDSEAKSNELTRAVEELHKLLKEAGEANKAIQDHLLEVEQSKDQMEKEMLEKIGRLEKELENANDLLSATKRKGAILSEEELAAMSPTAAAVAKIVKPGMKLTELYNAYVETQDQLLLEKLENKRINKYLDEIVKEVEAKAPILKRQREEYERAQKAVASLSVKLEQAMKEIQRLQEDTDKANKQSSVLERDNRRMEIQVKDLSQQIRVLLMELEEARGNHVIRDEEVSSADISSSSEVISQHLVSYRNIEELQQQNQRLLVALRELGETREREEQETTSSKITELQLKLESALTELEQLRKSRQHQMQLVDSIVRQRDMYRILLSQTTGVAIPLHASSLDDVSLASTPKRPSTSQTVSTPAPVPVIESTEAIEAKAALKQLQEIFENYKKEKAENEKIQNEQLEKLQEQVTDLRSQNTKISTQLDFASKRYLENYFFHTSYEMLQDNVEGYRREITSLHERNQKLTATTQKQEQIINTMTQDLRGANEKLAVAEVRAENLKKEKEMLKLSEVRLSQQRESLLAEQRGQNLLLTNLQTIQGILERSETETKQRLSSQIEKLEHEISHLKKKLENEVEQRHTLTRNLDVQLLDTKRQLDTETNLHLNTKELLKNAQKEIATLKQHLSNMEVQVASQSSQRTGKGQPSNKEDVDDLVSQLRQTEEQVNDLKERLKTSTSNVEQYQAMVTSLEESLNKEKQVTEEVRKNIEVRLKESAEFQTQLEKKLMEVEKEKQELQDDKRRAIESMEQQLSELKKTLSSVQNEVQEALQRASTALSNEQQARRDCQEQAKIAVEAQNKYERELMLHAADVEALQAAKEQVSKMASVRQHLEETTQKAESQLLECKASWEERERMLKDEVSKCVCRCEDLEKQNRLLHDQIEKLSDKVVASVKEGVQGPLNVSLSEEGKSQEQILEILRFIRREKEIAETRFEVAQVESLRYRQRVELLERELQELQDSLNAEREKVQVGILSFKKALVKSKEKHSFISLPFNVM

SEQ ID NO: 861940 - protein, 1287 aa, Homo sapiens; identical to SEQ ID NO: 861939

SEQ ID NO: 861941 - protein, 1080 aa, Homo sapiens
MAAVLQQVLERTELNKLPKSVQNKLEKFLADQQSEIDGLKGRHEKFKVESEQQYFEIEKRLSHSQERLVNETRECQSLRLELEKLNNQLKALTEKNKELEIAQDRNIAIQSQFTRTKEELEAEKRDLIRTNERLSQELEYLTEDVKRLNEKLKESNTTKGELQLKLDELQASDVSVKYREKRLEQEKELLHSQNTWLNTELKTKTDELLALGREKGNEILELKCNLENKKEEVSRLEEQMNGLKTSNEHLQKHVEDLLTKLKEAKEQQASMEEKFHNELNAHIKLSNLYKSAADDSEAKSNELTRAVEELHKLLKEAGEANKAIQDHLLEVEQSKDQMEKEMLEKIGRLEKELENANDLLSATKRKGAILSEEELAAMSPTAAAVAKIVKPGMKLTELYNAYVETQDQLLLEKLENKRINKYLDEIVKEVEAKAPILKRQREEYERAQKAVASLSVKLEQAMKEIQRLQEDTDKANKQSSVLERDNRRMEIQVKDLSQQIRVLLMELEEARGNHVIRDEEVSSADISSSSEVISQHLVSYRNIEELQQQNQRLLVALRELGETREREEQETTSSKITELQLKLESALTELEQLRKSRQHQMQLVDSIVRQRDMYRILLSQTTGVAIPLHASSLDDVSLASTPKRPSTSQTVSTPAPVPVIESTEAIEAKAALKQLQEIFENYKKEKAENEKIQNEQLEKLQEQVTDLRSQNTKISTQLDFASKRYLENYFFHTSYEMLQDNVEGYRREITSLHERNQKLTATTQKQEQIINTMTQDLRGANEKLAVAEVRAENLKKEKEMLKLSEVRLSQQRESLLAEQRGQNLLLTNLQTIQGILERSETETKQRLSSQIEKLEHEISHLKKKLENEVEQRHTLTRNLDVQLLDTKRQLDTETNLHLNTKELLKNAQKEIATLKQHLSNMEVQVASQSSQRTGKGQPSNKEDVDDLVSQLRQTEEQVNDLKERLKTSTSNVEQYQAMVTSLEESLNKEKQVTEEVRKNIEVRLKESAEFQTQLEKKLMEVEKEKQELQDDKRRAIESMEQQLSFFHLDVSGSDATLGIILPFMYGQTSTSVTITCLYKN

SEQ ID NO: 861942 - protein, 232 aa, Homo sapiens
MQLVDSIVRQRDMYRILLSQTTGVAIPLHASSLDDVSLASTPKRPSTSQTVSTPAPVPVIESTEAIEAKAALKQLQEIFENYKKEKAENEKIQNEQLEKLQEQVTDLRSQNTKISTQLDFASKRYEMLQDNVEGYRREITSLHERNQKLTATTQKQEQIINTMTQDLRGANEKLAVAEVRAENLKKEKEMLKLSEVRLSQQRESLLAEQRGQNLLLTNLQTIQGNGNWVPSW

SEQ ID NO: 861943 - protein, 2350 aa, Homo sapiens; identical to SEQ ID NO: 861935

SEQ ID NO: 861944 - protein, 2423 aa, Homo sapiens [sequence omitted]

SEQ ID NO: 861945 - protein, 2398 aa, Homo sapiens
MYRILLSQTTGVAIPLHASSLDDVSLASTPKRPSTSQTVSTPAPVPVIESTEAIEAKAALKQLQEIFENYKKEKAENEKIQNEQLEKLQEQVTDLRSQNTKISTQLDFASKRYEMLQDNVEGYRREITSLHERNQKLTATTQKQEQIINTMTQDLRGANEKLAVAEVRAENLKKEKEMLKLSEVRLSQQRESLLAEQRGQNLLLTNLQTIQGILERSETETKQRLSSQIEKLEHEISHLKKKLENEVEQRHTLTRNLDVQLLDTKRQLDTETNLHLNTKELLKNAQKEIATLKQHLSNMEVQVASQSSQRTGKGQPSNKEDVDDLVSQLRQTEEQVNDLKERLKTSTSNVEQYQAMVTSLEESLNKEKQVTEEVRKNIEVRLKESAEFQTQLEKKLMEVEKEKQELQDDKRRAIESMEQQLSELKKTLSSVQNEVQEALQRASTALSNEQQARRDCQEQAKIAVEAQNKYERELMLHAADVEALQAAKEQVSKMASVRQHLEETTQKAESQLLECKASWEERERMLKDEVSKCVCRCEDLEKQNRLLHDQIEKLSDKVVASVKEGVQGPLNVSLSEEGKSQEQILEILRFIRREKEIAETRFEVAQVESLRYRQRVELLERELQELQDSLNAEREKVQVGILSFKKALVKSKEKHSFISLPFNCNVKFNYEVSILLNFKFIKHLLNTEYSIVLKSKGSVTKLPGFRFYFIPLAVALGTLFNFPALSFFICNIWIIMRFNEFVHMKHLEACLVCSGCLINSSYLNLLKLWIIRVDSHSRIKDLNCYRISFSPKEQKVVKTNNQRKRSCGSEMDDNKTSLTPYPTLPPKAYLLSYFILRSYSNIPPPLEGRKLRSENIYLLLTDESVKMTVEEETIEQGKVNNEFYGIYVFSKSYRFQNYILFNSNVSHHGNNRASSSIELILGGKGTESESLTKTAYCFSLFRFIFYSFGLYKVNTRKCPPTNEFIGGNQLLNTGRRESTSNIDYIKNNIMGRAWWLMPVIPALWEAEAGGSRGEEIETILANTVKPRLYQKYKKISWAWWWQAPVVPATREAEAGERREIREAELAVSRDHTTGLQSGRQSETPSQKKKKIIIVMECLSKHEQCSMATMKYAIALKTVGEESNTKCRRWIIITYEKEKILHRYFSKISHGQSDETMDQNERFLNKREKLRIRKHFRTNKFSAARKKRYRKVNERFGLMFLPNVNTLLVGFVASFHFCLCNSCICLKSAVRMPHRKVNVNFQNFSSQKLKLKSSLFCHKGGFELIGTGRLSTIVRCWYVYLFEMFEVTAKTMAQHEELMKKTETMNVVMETNKMLREEKERLEQDLQQMQAKVRKLELDILPLQEANAELSEKSGMLQAEKKLLEEDVKRWKARNQHLVSQQKDPDTEEYRKLLSEKEVHTKRIQQLTEEIGRLKAEIARSNASLTNNQNLIQSLKEDLNKVRTEKETIQKDLDAKIIDIQEKVKTITQVKKIGRRYKTQYEELKAQQDKVMETSAQSSGDHQEQHVSVQEMQELKETLNQAETKSKSLESQVENLQKTLSEKETEARNLQEQTVQLQSELSRLRQDLQDRTTQEEQLRQQITEKEEKTRKAIVAAKSKIAHLAGVKDQLTKENEELKQRNGALDQQKDELDVRITALKSQYEGRISRLERELREHQERHLEQRDEPQEPSNKVPEQQRQITLKTTPASGERGIASTSDPPTANIKPTPVVSTPSKVTAAAMAGNKSTPRASIRPMVTPATVTNPTTTPTATVMPTTQVESQEAMQSEGPVEHVPVFGSTSGSVRSTSPNVQPSISQPILTVQQQTQATAFVQPTQQSHPQIEPANQELSSNIVEVVQSSPVERPSTSTAVFGTVSATPSSSLPKRTREEEEDSTIEASDQVSDDTVEMPLPKKLKSVTPVGTEEEVMAEESTDGEVETQVYNQDSQDSIGEGVTQGDYTPMEDSEETSQSLQIDLGPLQSDQQTTTSSQDGQGKGDDVIVIDSDDEEEDDDENDGEHEDYEEDEEDDDDDEDDTGMGDEGEDSNEGTGSADGNDGYEADDAEGGDGTDPGTETEESMGGGEGNHRAADSQNSGEGNTGAAESSFSQEVSREQQPSSASERQAPRAPQSPRRPPHPLPPRLTIHAPPQELGPPVQRIQMTRRQSVGRGLQLTPGIGGMQQHFFDDEDRTVPSTPTLVVPHRTDGFAEAIHSPQVAGVPRFRFGPPEDMPQTSSSHSDLGQLASQGGLGMYETPLFLAHEEESGGRSVPTTPLQVAAPVTVFTESTTSDASEHASQSVPMVTTSTGTLSTTNETATGDDGDEVFVEAESEGISSEAGLEIDSQQEEEPVQASDESDLPSTSQDPPSSSSVDTSSSQPKPFRRVRLQTTLRQGVRGRQFNRQRGVSHAMGGRGGINRGNIN

SEQ ID NO: 861946 - protein, 1287 aa, Homo sapiens; identical to SEQ ID NO: 861939

SEQ ID NO: 861947 - protein, 1287 aa, Homo sapiens; identical to SEQ ID NO: 861939

SEQ ID NO: 861948 - protein, 1108 aa, Homo sapiens
MAQHEELMKKTETMNVVMETNKMLREEKERLEQDLQQMQAKVRKLELDILPLQEANAELSEKSGMLQAEKKLLEEDVKRWKARNQHLVSQQKDPDTEEYRKLLSEKEVHTKRIQQLTEEIGRLKAEIARSNASLTNNQNLIQSLKEDLNKVRTEKETIQKDLDAKIIDIQEKVKTITQVKKIGRRYKTQYEELKAQQDKVMETSAQSSGDHQEQHVSVQEMQELKETLNQAETKSKSLESQVENLQKTLSEKETEARNLQEQTVQLQSELSRLRQDLQDRTTQEEQLRQQITEKEEKTRKAIVAAKSKIAHLAGVKDQLTKENEELKQRNGALDQQKDELDVRITALKSQYEGRISRLERELREHQERHLEQRDEPQEPSNKVPEQQRQITLKTTPASGERGIASTSDPPTANIKPTPVVSTPSKVTAAAMAGNKSTPRASIRPMVTPATVTNPTTTPTATVMPTTQVESQEAMQSEGPVEHVPVFGSTSGSVRSTSPNVQPSISQPILTVQQQTQATAFVQPTQQSHPQIEPANQELSSNIVEVVQSSPVERPSTSTAVFGTVSATPSSSLPKRTREEEEDSTIEASDQVSDDTVEMPLPKKLKSVTPVGTEEEVMAEESTDGEVETQVYNQDSQDSIGEGVTQGDYTPMEDSEETSQSLQIDLGPLQSDQQTTTSSQDGQGKGDDVIVIDSDDEEEDDDENDGEHEDYEEDEEDDDDDEDDTGMGDEGEDSNEGTGSADGNDGYEADDAEGGDGTDPGTETEESMGGGEGNHRAADSQNSGEGNTGAAESSFSQEVSREQQPSSASERQAPRAPQSPRRPPHPLPPRLTIHAPPQELGPPVQRIQMTRRQSVGRGLQLTPGIGGMQQHFFDDEDRTVPSTPTLVVPHRTDGFAEAIHSPQVAGVPRFRFGPPEDMPQTSSSHSDLGQLASQGGLGMYETPLFLAHEEESGGRSVPTTPLQVAAPVTVFTESTTSDASEHASQSVPMVTTSTGTLSTTNETATGDDGDEVFVEAESEGISSEAGLEIDSQQEEEPVQASDESDLPSTSQDPPSSSSVDTSSSQPKPFRRVRLQTTLRQGVRGRQFNRQRGVSHAMGGRGGINRGNIN

SEQ ID NO: 861949 - protein, 261 aa, Homo sapiens
MTRRQSVGRGLQLTPGIGGMQQHFFDDEDRTVPSTPTLVVPHRTDGFAEAIHSPQVAGVPRFRFGPPEDMPQTSSSHSDLGQLASQGGLGMYETPLFLAHEEESGGRSVPTTPLQVAAPVTVFTESTTSDASEHASQSVPMVTTSTGTLSTTNETATGDDGDEVFVEAESEGISSEAGLEIDSQQEEEPVQASDESDLPSTSQDPPSSSSVDTSSSQPKPFRRVRLQTTLRQGVRGRQFNRQRGVSHAMGGRGGINRGNIN

SEQ ID NO: 861950 - protein, 832 aa, Homo sapiens
MAAVLQQVLERTELNKLPKSVQNKLEKFLADQQSEIDGLKGRHEKFKVESEQQYFEIEKRLSHSQERLVNETRECQSLRLELEKLNNQLKALTEKNKELEIAQDRNIAIQSQFTRTKEELEAEKRDLIRTNERLSQELEYLTEDVKRLNEKLKESNTTKGELQLKLDELQASDVSVKYREKRLEQEKELLHSQNTWLNTELKTKTDELLALGREKGNEILELKCNLENKKEEVSRLEEQMNGLKTSNEHLQKHVEDLLTKLKEAKEQQASMEEKFHNELNAHIKLSNLYKSAADDSEAKSNELTRAVEELHKLLKEAGEANKAIQDHLLEVEQSKDQMEKEMLEKIGRLEKELENANDLLSATKRKGAILSEEELAAMSPTAAAVAKIVKPGMKLTELYNAYVETQDQLLLEKLENKRINKYLDEIVKEVEAKAPILKRQREEYERAQKAVASLSVKLEQAMKEIQRLQEDTDKANKQSSVLERDNRRMEIQVKDLSQQIRVLLMELEEARGNHVIRDEEVSSADISSSSEVISQHLVSYRNIEELQQQNQRLLVALRELGETREREEQETTSSKITELQLKLESALTELEQLRKSRQHQMQLVDSIVRQRDMYRILLSQTTGVAIPLHASSLDDVSLASTPKRPSTSQTVSTPAPVPVIESTEAIEAKAALKQLQEIFENYKKEKAENEKIQNEQLEKLQEQVTDLRSQNTKISTQLDFASKRYEMLQDNVEGYRREITSLHERNQKLTATTQKQEQIINTMTQDLRGANEKLAVAEVRAENLKKEKEMLKLSEVRLSQQRESLLAEQRGQNLLLTNLQTIQGNGNWVPSW

SEQ ID NO: 861951 - protein, 149 aa, Homo sapiens
VGERELLGCRRALQDPAAREGSPGGTQLQGQGAMTFRSGGGDALGKAACLVPAASRPQSPILQMTSREVTPQVGNRAGFGIRVCLFPPRDPESWQPVSKLLYVHHTSGFRFIGVFLKLRLVSVQLLLVRHLSYTRHCPWCWRHSNEEDR

SEQ ID NO: 861952 - protein, 477 aa, Homo sapiens
MSWVQATLLARGLCRAWGGTCGAALTGTSISQVPRRLPRGLHCSAAAHSSEQSLVPSPPEPRQRPTKALVPFEDLFGQAPGGERDKASFLQTVQKFAEHSVRKRGHIDFIYLALRKMREYGVERDLAVYNQLLNIFPKEVFRPRNIIQRIFVHYPRQQECGIAVLEQMENHGVMPNKETEFLLIQIFGRKSYPMLKLVRLKLWFPRFMNVNPFPVPRDLPQDPVELAMFGLRHMEPDLSARVTIYQVPLPKDSTGAADPPQPHIVGIQSPDQQAALARHNPARPVFVEGPFSLWLRNKCVYYHILRADLLPPEERVRAESKACVGAGEWAGTTLRVHGRGWRRETERALASDPACTPHLGEEVEETPEEWNLYYPMQLDLEYVRSGWDNYEFDINEVEEGPVFAMCMAGAHDQATMAKWIQGLQETNPTLAQIPVVFRLAGSTRELQTSSAGLEEPPLPEDHQEEDDNLQRQQQGQS

SEQ ID NO: 861953 - protein, 300 aa, Homo sapiens
MSWVQATLLARGLCRAWGGTCGAALTGTSISQVPRRLPRGLHCSAAAHSSEQSLVPSPPEPRQRPTKALVPFEDLFGQAPGGERDKASFLQTVQKFAEHSVRKRGHIDFIYLALRKMREYGVERDLAVYNQLLNIFPKEVFRPRNIIQRIFVHYPRQQECGIAVLEQMENHGVMPNKETEFLLIQIFGRKSYPMLKLVRLKLWFPRFMNVNPFPVPRDLPQDPVELAMFGLRHMEPDLSARVTIYQVPLPKDSTGAADPPQPHIVGIQSPDQQAALARHNPARPVFVEGPFSLWLRNKCV

SEQ ID NO: 861954 - protein, 279 aa, Homo sapiens
MSWVQATLLARGLCRAWGGTCGAALTGTSISQVPRRLPRGLHCSAAAHSSEQSLVPSPPEPRQRPTKALVPFEDLFGQAPGGERDKASFLQTVQKFAEHSVRKRGHIDFIYLALRKMREYGVERDLAVYNQLLNIFPKEVFRPRNIIQRIFVHYPRQQECGIAVLEQMENHGVMPNKETEFLLIQIFGRKSYPMLKLVRLKLWFPRFMNVNPFPVPRDLPQDPVELAMFGLRHMEPDLSARVTIYQAPCAAPDAARLPPQRFLCPKTQQVQQIPPSPTS

SEQ ID NO: 861955 - protein, 315 aa, Homo sapiens
MREYGVERDLAVYNQLLNIFPKEVFRPRNIIQRIFVHYPRQQECGIAVLEQMENHGVMPNKETEFLLIQIFGRKSYPMLKLVRLKLWFPRFMNVNPFPVPRDLPQDPVELAMFGLRHMEPDLSARVTIYQVPLPKDSTGAADPPQPHIVGIQSPDQQAALARHNPARPVFVEGPFSLWLRNKCVYYHILRADLLPPEEREVEETPEEWNLYYPMQLDLEYVRSGWDNYEFDINEVEEGPVFAMCMAGAHDQATMAKWIQGLQETNPTLAQIPVVFRLAGSTRELQTSSAGLEEPPLPEDHQEEDDNLQRQQQGQS

SEQ ID NO: 861956 - protein, 431 aa, Homo sapiens
MSWVQATLLARGLCRAWGGTCGAALTGTSISQVPRRLPRGLHCSAAAHSSEQSLVPSPPEPRQRPTKALVPFEDLFGQAPGGERDKASFLQTVQKFAEHSVRKRGHIDFIYLALRKMREYGVERDLAVYNQLLNIFPKEVFRPRNIIQRIFVHYPRQQECGIAVLEQMENHGVMPNKETEFLLIQIFGRKSYPMLKLVRLKLWFPRFMNVNPFPVPRDLPQDPVELAMFGLRHMEPDLSARVTIYQVPLPKDSTGAADPPQPHIVGIQSPDQQAALARHNPARPVFVEGPFSLWLRNKCVYYHILRADLLPPEEREVEETPEEWNLYYPMQLDLEYVRSGWDNYEFDINEVEEGPVFAMCMAGAHDQATMAKWIQGLQETNPTLAQIPVVFRLAGSTRELQTSSAGLEEPPLPEDHQEEDDNLQRQQQGQS

SEQ ID NO: 861957 - protein, 431 aa, Homo sapiens; identical to SEQ ID NO: 861956

SEQ ID NO: 861958 - protein, 362 aa, Homo sapiens
MREYGVERDLAVYNQLLNIFPKEVFRPRNIIQRIFVHYPRQQECGIAVLEQMENHGVMPNKETEFLLIQIFGRKSYPMLKLVRLKLWFPRFMNVNPFPVPRDLPQDPVELAMFGLRHMEPDLSARVTIYQVPLPKDSTGAADPPQPHIVGKSESMGAAKSLTLPRPCQVLAGPEAGLPGPLGRVPCRAQGMYVSTPGIQSPDQQAALARHNPARPVFVEGPFSLWLRNKCVYYHILRADLLPPEEREVEETPEEWNLYYPMQLDLEYVRSGWDNYEFDINEVEEGPVFAMCMAGAHDQATMAKWIQGLQETNPTLAQIPVVFRLAGSTRELQTSSAGLEEPPLPEDHQEEDDNLQRQQQGQS

SEQ ID NO: 861959 - protein, 172 aa, Homo sapiens [sequence omitted]

SEQ ID NO: 861960 - protein, 217 aa, Homo sapiens
MSWVQATLLARGLCRAWGGTCGAALTGTSISQVPLPKDSTGAADPPQPHIVGIQSPDQQAALARHNPARPVFVEGPFSLWLRNKCVYYHILRADLLPPEEREVEETPEEWNLYYPMQLDLEYVRSGWDNYEFDINEVEEGPVFAMCMAGAHDQATMAKWIQGLQETNPTLAQIPVVFRLAGSTRELQTSSAGLEEPPLPEDHQEEDDNLQRQQQGQS

SEQ ID NO: 861961 - protein, 102 aa, Homo sapiens
MQLDLEYVRSGWDNYEFDINEVEEGPVFAMCMAGAHDQATMAKWIQGLQETNPTLAQIPVVFRLAGSTRELQTSSAGLEEPPLPEDHQEEDDNLQRQQQGQS

SEQ ID NO: 861962 - protein, 398 aa, Homo sapiens
MPFECTANQCFPAWGFLPSFHDQATMAKWIQGLQETNPTLAQIPVVFRLAGSTRELQNLQAPLVLRIQIKRGGSAVGCAQKKKKKNKKKQKKKNKKKNKKEQNNKKEERETTQQQKKTHIKKDQHKTKTKHTTKRIKKRKKTRKEEERREFSIKRGKEGKDQDTKKNEDSGQQKRDTGESNGRKKRSITASRGELKHKRGEHTQTTTETSALKQKPTKEEEKSNSTKEAKNVTKGMNKQNKTVEKIGADRRKNRNRGVIKRRESSGDGERRTGVRAAAGRKSGEKRGEVGEGEGKAGAGATGRRKREEVRSRGGRGERWRDRRQQDDERHRKDGDSKSNAKYRRAEKEEESDTRLQSKTDRREKQGKRTARGRQWHKTSGEDERKRDEDPRGHQRARN

SEQ ID NO: 861963 - protein, 431 aa, Homo sapiens; identical to SEQ ID NO: 861956

SEQ ID NO: 861964 - protein, 296 aa, Homo sapiens
MSWVQATLLARGLCRAWGGTCGAALTGTSISQVPRRLPRGLHCSAAAHSSEQSLVPSPPEPRQRPTKALVPFEDLFGQAPGGERDKASFLQTVQKFAEHSVRKRGHIDFIYLALRKMREYGVERDLAVYNQLLNIFPKEVFRPRNIIQRIFVHYPRQQECGIAVLEQMENHGVMPNKETEFLLIQIFGRKSYPMLKLVRLKLWFPRFMNVNPFPVPRDLPQDPVELAMFGLRHMEPDLSARVTIYQVPLPKDSTGAADPPQPHIVGSGRDAGGVEPLLPDAAGPGVCEEWLGQLRV

SEQ ID NO: 861965 - protein, 478 aa, Homo sapiens
MSWVQATLLARGLCRAWGGTCGAALTGTSISQVPRRLPRGLHCSAAAHSSEQSLVPSPPEPRQRPTKALVPFEDLFGQAPGGERDKASFLQTVQKFAEHSVRKRGHIDFIYLALRKMREYGVERDLAVYNQLLNIFPKEVFRPRNIIQRIFVHYPRQQECGIAVLEQMENHGVMPNKETEFLLIQIFGRKSYPMLKLVRLKLWFPRFMNVNPFPVPRDLPQDPVELAMFGLRHMEPDLSARVTIYQVPLPKDSTGAADPPQPHIVGKSESMGAAKSLTLPRPCQVLAGPEAGLPGPLGRVPCRAQGMYVSTPGIQSPDQQAALARHNPARPVFVEGPFSLWLRNKCVYYHILRADLLPPEEREVEETPEEWNLYYPMQLDLEYVRSGWDNYEFDINEVEEGPVFAMCMAGAHDQATMAKWIQGLQETNPTLAQIPVVFRLAGSTRELQTSSAGLEEPPLPEDHQEEDDNLQRQQQGQS

SEQ ID NO: 861966 - protein, 361 aa, Homo sapiens
MSWVQATLLARGLCRAWGGTCGAALTGTSISQVPRRLPRGLHCSAAAHSSEQSLVPSPPEPRQRPTKALVPFEDLFGQAPGGERDKASFLQTVQKFAEHSVRKRGHIDFIYLALRKMREYGVERDLAVYNQLLNIFPKEVFRPRNIIQRIFVHYPRQQECGIAVLEQMENHGVMPNKETEFLLIQIFGRKSYPMLKLVRLKLWFPRFMNVNPFPVPRDLPQDPVELAMFGLRHMEPDLSARVTIYQVPLPKDSTGAADPPQPHIVGIQSPDQQAALARHNPARPVFVEGPFSLWLRNKCVYYHILRADLLPPEEREVEETPEEWNLYYPMQLDLEYVRSGWDNYEFDINEAWSCPIHGSLL

SEQ ID NO: 861967 - protein, 431 aa, Homo sapiens; identical to SEQ ID NO: 861956

SEQ ID NO: 861968 - protein, 500 aa, Homo sapiens
VGERELLGCRRALQDPAAREGSPGGTQLQGQGAMTFRSGGGDALGKAACLVPAASRPQSPIFADDLARGHAASRQPGRIWNPRLPFSPKRPRILAAGFKAVVPRRLPRGLHCSAAAHSSEQSLVPSPPEPRQRPTKALVPFEDLFGQAPGGERDKASFLQTVQKFAEHSVRKRGHIDFIYLALRKMREYGVERDLAVYNQLLNIFPKEVFRPRNIIQRIFVHYPRQQECGIAVLEQMENHGVMPNKETEFLLIQIFGRKSYPMLKLVRLKLWFPRFMNVNPFPVPRDLPQDPVELAMFGLRHMEPDLSARVTIYQVPLPKDSTGAADPPQPHIVGIQSPDQQAALARHNPARPVFVEGPFSLWLRNKCVYYHILRADLLPPEEREVEETPEEWNLYYPMQLDLEYVRSGWDNYEFDINEVEEGPVFAMCMAGAHDQATMAKWIQGLQETNPTLAQIPVVFRLAGSTRELQTSSAGLEEPPLPEDHQEEDDNLQRQQQGQS

SEQ ID NO: 861969 - protein, 315 aa, Homo sapiens; identical to SEQ ID NO: 861955

SEQ ID NO: 861970 - protein, 237 aa, Homo sapiens
MVSSGTWLCTTSCSTSSPRRSSGLATSSSASSSTTLGSRSVGLLSWSRWRTTVPLPKDSTGAADPPQPHIVGIQSPDQQAALARHNPARPVFVEGPFSLWLRNKCVYYHILRADLLPPEEREVEETPEEWNLYYPMQLDLEYVRSGWDNYEFDINEVEEGPVFAMCMAGAHDQATMAKWIQGLQETNPTLAQIPVVFRLAGSTRELQTSSAGLEEPPLPEDHQEEDDNLQRQQQGQS

SEQ ID NO: 861971 - protein, 102 aa, Homo sapiens; identical to SEQ ID NO: 861961

SEQ ID NO: 861972 - protein, 109 aa, Homo sapiens
MRPPQMFSATFRKWNGGSLSIAAHRPPGSGNRIPACPFLTTLQIPLQPLPQTRCRNERSRIITSHRHSSSPRCPSGKRLEMRRMGVPSVRGLGGMCTCLSSPSGQGARG

SEQ ID NO: 861973 - protein, 167 aa, Homo sapiens
MPKRKKQNHHQPPTQQQPPLPEREETGDEEDGSPIALHRGPPGSRGPLIPPLLSLPPPPWGRGPIRRGLGPRSSPYGRGWWGVNAEPPFPGPGHGGPTRGSFHKEQRNPRRLKSWSLIKNTCPPKDDPQVMEDKSDRPVCRHFAKKGHCRYEDLCAFYHPGVNGPPL

SEQ ID NO: 861974 - protein, 167 aa, Homo sapiens; identical to SEQ ID NO: 861973

SEQ ID NO: 861975 - protein, 121 aa, Homo sapiens
MRPPQMFSATFRKWNGGSLSIAAHRPPGSGNRIPACPFLTTLQIPLQPLPQTRCRNERSRIITSHRHSSSPRCPSGKRLEMRRMGVPSDHPAFWALPPWPMENLATLSQPQTGYHPHVHHQ

SEQ ID NO: 861976 - protein, 121 aa, Homo sapiens; identical to SEQ ID NO: 861975

SEQ ID NO: 861977 - protein, 104 aa, Homo sapiens
MPKRKKQNHHQPPTQQQPPLPEREETGDEEDGSPIGPPSLLGPPPMANGKPGDPKSGEEEGALILVLGRREDSKGGDKTQEGLKNKRSGIPSLNEWREVVYLLI

SEQ ID NO: 861978 - protein, 121 aa, Homo sapiens; identical to SEQ ID NO: 861975

SEQ ID NO: 861979 - protein, 188 aa, Homo sapiens
MPKRKKQNHHQPPTQQQPPLPEREETGDEEDGSPIGPPSLLGPPPMANGKPGDPKSALHRGPPGSRGPLIPPLLSLPPPPWGRGPIRRGLGPRSSPYGRGWWGVNAEPPFPGPGHGGPTRGSFHKEQRNPRRLKSWSLIKNTCPPKDDPQVMEDKSDRPVCRHFAKKGHCRYEDLCAFYHPGVNGPPL

SEQ ID NO: 861980 - protein, 167 aa, Homo sapiens; identical to SEQ ID NO: 861973

SEQ ID NO: 861981 - protein, 107 aa, Homo sapiens [sequence omitted]

SEQ ID NO: 861982 - protein, 143 aa, Homo sapiens
MANGKPGDPKSALHRGPPGSRGPLIPPLLSLPPPPWGRGPIRRGLGPRSSPYGRGWWGVNAEPPFPGPGHGGPTRGSFHKEQRNPRRLKSWSLIKNTCPPKDDPQVMEDKSDRPVCRHFAKKGHCRYEDLCAFYHPGVNGPPL

SEQ ID NO: 861983 - protein, 154 aa, Homo sapiens
GGAYYLGERGLDTLRLYYKAPGLTLVESRDCVQVAGLHRGHGQRSLGEGGGLRVLGADLLGPKFLVGTMIRSRFTDHKCKSGREGKPKRDKDFWGEVKGHEVVPAAVTIVTEDRMWRSYGATVLFSGPLAREPVDSVTHSEELVVVFSSEGRKE

SEQ ID NO: 861984 - protein, 1305 aa, Homo sapiens
NSRARRPVDELEGRRARGRAPGPHPSQHPAPRALPAGSSRSHGAGAAVSTMELAALCRWGLLLALLPPGAASTQVCTGTDMKLRLPASPETHLDMLRHLYQGCQVVQGNLELTYLPTNASLSFLQDIQEVQGYVLIAHNQVRQVPLQRLRIVRGTQLFEDNYALAVLDNGDPLNNTTPVTGASPGGLRELQLRSLTEILKGGVLIQRNPQLCYQDTILWKDIFHKNNQLALTLIDTNRSRACHPCSPMCKGSRCWGESSEDCQSLTRTVCAGGCARCKGPLPTDCCHEQCAAGCTGPKHSDCLACLHFNHSGICELHCPALVTYNTDTFESMPNPEGRYTFGASCVTACPYNYLSTDVGSCTLVCPLHNQEVTAEDGTQRCEKCSKPCARVCYGLGMEHLREVRAVTSANIQEFAGCKKIFGSLAFLPESFDGDPASNTAPLQPEQLQVFETLEEITGYLYISAWPDSLPDLSVFQNLQVIRGRILHNGAYSLTLQGLGISWLGLRSLRELGSGLALIHHNTHLCFVHTVPWDQLFRNPHQALLHTANRPEDECVGEGLACHQLCARGHCWGPGPTQCVNCSQFLRGQECVEECRVLQGLPREYVNARHCLPCHPECQPQNGSVTCFGPEADQCVACAHYKDPPFCVARCPSGVKPDLSYMPIWKFPDEEGACQPCPINCTHSCVDLDDKGCPAEQRASPLTSIISAVVGILLVVVLGVVFGILIKRRQQKIRKYTMRRLLQETELVEPLTPSGAMPNQAQMRILKETELRKVKVLGSGAFGTVYKGIWIPDGENVKIPVAIKVLRENTSPKANKEILDEAYVMAGVGSPYVSRLLGICLTSTVQLVTQLMPYGCLLDHVRENRGRLGSQDLLNWCMQIAKGMSYLEDVRLVHRDLAARNVLVKSPNHVKITDFGLARLLDIDETEYHADGGKVPIKWMALESILRRRFTHQSDVWSYGVTVWELMTFGAKPYDGIPAREIPDLLEKGERLPQPPICTIDVYMIMVKCWMIDSECRPRFRELVSEFSRMARDPQRFVVIQNEDLGPASPLDSTFYRSLLEDDDMGDLVDAEEYLVPQQGFFCPDPAPGAGGMVHHRHRSSSTRSGGGDLTLGLEPSEEEAPRSPLAPSEGAGSDVFDGDLGMGAAKGLQSLPTHDPSPLQRYSEDPTVPLPSETDGYVAPLTCSPQPEYVNQPDVRPQPPSPREGPLPAARPAGATLERPKTLSPGKNGVVKDVFAFGGAVENPEYLTPQGGAAPQPHPPPAFSPAFDNLYYWDQDPPERGAPPSTFKGTPTAENPEYLGLDVPV

SEQ ID NO: 861985 - protein, 112 aa, Homo sapiens
MWLGALPKISKYWGTPGRPWGVAVFLFQPHSASPSQDIQEVQGYVLIAHNQVRQVPLQRLRIVRGTQLFEDNYALAVLDNGDQERPEGRGGRERQEQAVGKKEDRNNRFQRC

SEQ ID NO: 861986 - protein, 1255 aa, Homo sapiens [sequence omitted]

SEQ ID NO: 861987 - protein, 1255 aa, Homo sapiens [sequence omitted]

SEQ ID NO: 861988 - protein, 1396 aa, Homo sapiens
NSRARRPVDELEGRRARGRAPGPHPSQHPAPRALPAGSSRSHGAGAAVSTMELAALCRWGLLLALLPPGAASTQVCTGTDMKLRLPASPETHLDMLRHLYQGCQVVQGNLELTYLPTNASLSFLQDIQEVQGYVLIAHNQVRQVPLQRLRIVRGTQLFEDNYALAVLDNGDPLNNTTPVTGASPGGLRELQLRSLTEILKGGVLIQRNPQLCYQDTILWKDIFHKNNQLALTLIDTNRSRACHPCSPMCKGSRCWGESSEDCQSLTRTVCAGGCARCKGPLPTDCCHEQCAAGCTGPKHSDCLACLHFNHSGICELHCPALVTYNTDTFESMPNPEGRYTFGASCVTACPYNYLSTDVGSCTLVCPLHNQEVTAEDGTQRCEKCSKPCARGTHSLPPRPAAVPVPLRMQPGPAHPVLSFLRPSWDLVSAFYSLPLAPLSPTSVPISPVSVGRGPDPDAHVAVDLSRYEAETAPSPPTPTSSVCYGLGMEHLREVRAVTSANIQEFAGCKKIFGSLAFLPESFDGDPASNTAPLQPEQLQVFETLEEITGYLYISAWPDSLPDLSVFQNLQVIRGRILHNGAYSLTLQGLGISWLGLRSLRELGSGLALIHHNTHLCFVHTVPWDQLFRNPHQALLHTANRPEDECVGEGLACHQLCARGHCWGPGPTQCVNCSQFLRGQECVEECRVLQGLPREYVNARHCLPCHPECQPQNGSVTCFGPEADQCVACAHYKDPPFCVARCPSGVKPDLSYMPIWKFPDEEGACQPCPINCTHSCVDLDDKGCPAEQRASPLTSIISAVVGILLVVVLGVVFGILIKRRQQKIRKYTMRRLLQETELVEPLTPSGAMPNQAQMRILKETELRKVKVLGSGAFGTVYKGIWIPDGENVKIPVAIKVLRENTSPKANKEILDEAYVMAGVGSPYVSRLLGICLTSTVQLVTQLMPYGCLLDHVRENRGRLGSQDLLNWCMQIAKGMSYLEDVRLVHRDLAARNVLVKSPNHVKITDFGLARLLDIDETEYHADGGKVPIKWMALESILRRRFTHQSDVWSYGVTVWELMTFGAKPYDGIPAREIPDLLEKGERLPQPPICTIDVYMIMVKCWMIDSECRPRFRELVSEFSRMARDPQRFVVIQNEDLGPASPLDSTFYRSLLEDDDMGDLVDAEEYLVPQQGFFCPDPAPGAGGMVHHRHRSSSTRSGGGDLTLGLEPSEEEAPRSPLAPSEGAGSDVFDGDLGMGAAKGLQSLPTHDPSPLQRYSEDPTVPLPSETDGYVAPLTCSPQPEYVNQPDVRPQPPSPREGPLPAARPAGATLERPKTLSPGKNGVVKDVFAFGGAVENPEYLTPQGGAAPQPHPPPAFSPAFDNLYYWDQDPPERGAPPSTFKGTPTAENPEYLGLDVPV

SEQ ID NO: 861989 - protein, 1232 aa, Homo sapiens
SARYLSIFQLRLPASPETHLDMLRHLYQGCQVVQGNLELTYLPTNASLSFLQDIQEVQGYVLIAHNQVRQVPLQRLRIVRGTQLFEDNYALAVLDNGDPLNNTTPVTGASPGGLRELQLRSLTEILKGGVLIQRNPQLCYQDTILWKDIFHKNNQLALTLIDTNRSRACHPCSPMCKGSRCWGESSEDCQSLTRTVCAGGCARCKGPLPTDCCHEQCAAGCTGPKHSDCLACLHFNHSGICELHCPALVTYNTDTFESMPNPEGRYTFGASCVTACPYNYLSTDVGSCTLVCPLHNQEVTAEDGTQRCEKCSKPCARVCYGLGMEHLREVRAVTSANIQEFAGCKKIFGSLAFLPESFDGDPASNTAPLQPEQLQVFETLEEITGYLYISAWPDSLPDLSVFQNLQVIRGRILHNGAYSLTLQGLGISWLGLRSLRELGSGLALIHHNTHLCFVHTVPWDQLFRNPHQALLHTANRPEDECVGEGLACHQLCARGHCWGPGPTQCVNCSQFLRGQECVEECRVLQGLPREYVNARHCLPCHPECQPQNGSVTCFGPEADQCVACAHYKDPPFCVARCPSGVKPDLSYMPIWKFPDEEGACQPCPINCTHSCVDLDDKGCPAEQRASPLTSIISAVVGILLVVVLGVVFGILIKRRQQKIRKYTMRRLLQETELVEPLTPSGAMPNQAQMRILKETELRKVKVLGSGAFGTVYKGIWIPDGENVKIPVAIKVLRENTSPKANKEILDEAYVMAGVGSPYVSRLLGICLTSTVQLVTQLMPYGCLLDHVRENRGRLGSQDLLNWCMQIAKGMSYLEDVRLVHRDLAARNVLVKSPNHVKITDFGLARLLDIDETEYHADGGKVPIKWMALESILRRRFTHQSDVWSYGVTVWELMTFGAKPYDGIPAREIPDLLEKGERLPQPPICTIDVYMIMVKCWMIDSECRPRFRELVSEFSRMARDPQRFVVIQNEDLGPASPLDSTFYRSLLEDDDMGDLVDAEEYLVPQQGFFCPDPAPGAGGMVHHRHRSSSTRSGGGDLTLGLEPSEEEAPRSPLAPSEGAGSDVFDGDLGMGAAKGLQSLPTHDPSPLQRYSEDPTVPLPSETDGYVAPLTCSPQPEYVNQPDVRPQPPSPREGPLPAARPAGATLERPKTLSPGKNGVVKDVFAFGGAVENPEYLTPQGGAAPQPHPPPAFSPAFDNLYYWDQDPPERGAPPSTFKGTPTAENPEYLGLDVPV

SEQ ID NO: 861990 - protein, 1216 aa, Homo sapiens
MWLGALPKISKYWGTPGRPWGVAVFLFQPHSASPSQDIQEVQGYVLIAHNQVRQVPLQRLRIVRGTQLFEDNYALAVLDNGDPLNNTTPVTGASPGGLRELQLRSLTEILKGGVLIQRNPQLCYQDTILWKDIFHKNNQLALTLIDTNRSRACHPCSPMCKGSRCWGESSEDCQSLTRTVCAGGCARCKGPLPTDCCHEQCAAGCTGPKHSDCLACLHFNHSGICELHCPALVTYNTDTFESMPNPEGRYTFGASCVTACPYNYLSTDVGSCTLVCPLHNQEVTAEDGTQRCEKCSKPCARVCYGLGMEHLREVRAVTSANIQEFAGCKKIFGSLAFLPESFDGDPASNTAPLQPEQLQVFETLEEITGYLYISAWPDSLPDLSVFQNLQVIRGRILHNGAYSLTLQGLGISWLGLRSLRELGSGLALIHHNTHLCFVHTVPWDQLFRNPHQALLHTANRPEDECVGEGLACHQLCARGHCWGPGPTQCVNCSQFLRGQECVEECRVLQGLPREYVNARHCLPCHPECQPQNGSVTCFGPEADQCVACAHYKDPPFCVARCPSGVKPDLSYMPIWKFPDEEGACQPCPINCTHSCVDLDDKGCPAEQRASPLTSIISAVVGILLVVVLGVVFGILIKRRQQKIRKYTMRRLLQETELVEPLTPSGAMPNQAQMRILKETELRKVKVLGSGAFGTVYKGIWIPDGENVKIPVAIKVLRENTSPKANKEILDEAYVMAGVGSPYVSRLLGICLTSTVQLVTQLMPYGCLLDHVRENRGRLGSQDLLNWCMQIAKGMSYLEDVRLVHRDLAARNVLVKSPNHVKITDFGLARLLDIDETEYHADGGKVPIKWMALESILRRRFTHQSDVWSYGVTVWELMTFGAKPYDGIPAREIPDLLEKGERLPQPPICTIDVYMIMVKCWMIDSECRPRFRELVSEFSRMARDPQRFVVIQNEDLGPASPLDSTFYRSLLEDDDMGDLVDAEEYLVPQQGFFCPDPAPGAGGMVHHRHRSSSTRSGGGDLTLGLEPSEEEAPRSPLAPSEGAGSDVFDGDLGMGAAKGLQSLPTHDPSPLQRYSEDPTVPLPSETDGYVAPLTCSPQPEYVNQPDVRPQPPSPREGPLPAARPAGATLERPKTLSPGKNGVVKDVFAFGGAVENPEYLTPQGGAAPQPHPPPAFSPAFDNLYYWDQDPPERGAPPSTFKGTPTAENPEYLGLDVPV

SEQ ID NO: 861991 - protein, 1217 aa, Homo sapiens
MGLSFRLHSLLTTKQHAQSRGEKEGESCGPHEHLDLAWTTHSSLALALFLLRVWWWWDSKTVKIAFSPPWGIWGLFKRPAPLLEGRRAPREAEGDRRGKGPLIIAHPTEILKGGVLIQRNPQLCYQDTILWKDIFHKNNQLALTLIDTNRSRACHPCSPMCKGSRCWGESSEDCQSLTRTVCAGGCARCKGPLPTDCCHEQCAAGCTGPKHSDCLACLHFNHSGICELHCPALVTYNTDTFESMPNPEGRYTFGASCVTACPYNYLSTDVGSCTLVCPLHNQEVTAEDGTQRCEKCSKPCARVCYGLGMEHLREVRAVTSANIQEFAGCKKIFGSLAFLPESFDGDPASNTAPLQPEQLQVFETLEEITGYLYISAWPDSLPDLSVFQNLQVIRGRILHNGAYSLTLQGLGISWLGLRSLRELGSGLALIHHNTHLCFVHTVPWDQLFRNPHQALLHTANRPEDECVGEGLACHQLCARGHCWGPGPTQCVNCSQFLRGQECVEECRVLQGLPREYVNARHCLPCHPECQPQNGSVTCFGPEADQCVACAHYKDPPFCVARCPSGVKPDLSYMPIWKFPDEEGACQPCPINCTHSCVDLDDKGCPAEQRASPLTSIISAVVGILLVVVLGVVFGILIKRRQQKIRKYTMRRLLQETELVEPLTPSGAMPNQAQMRILKETELRKVKVLGSGAFGTVYKGIWIPDGENVKIPVAIKVLRENTSPKANKEILDEAYVMAGVGSPYVSRLLGICLTSTVQLVTQLMPYGCLLDHVRENRGRLGSQDLLNWCMQIAKGMSYLEDVRLVHRDLAARNVLVKSPNHVKITDFGLARLLDIDETEYHADGGKVPIKWMALESILRRRFTHQSDVWSYGVTVWELMTFGAKPYDGIPAREIPDLLEKGERLPQPPICTIDVYMIMVKCWMIDSECRPRFRELVSEFSRMARDPQRFVVIQNEDLGPASPLDSTFYRSLLEDDDMGDLVDAEEYLVPQQGFFCPDPAPGAGGMVHHRHRSSSTRSGGGDLTLGLEPSEEEAPRSPLAPSEGAGSDVFDGDLGMGAAKGLQSLPTHDPSPLQRYSEDPTVPLPSETDGYVAPLTCSPQPEYVNQPDVRPQPPSPREGPLPAARPAGATLERPKTLSPGKNGVVKDVFAFGGAVENPEYLTPQGGAAPQPHPPPAFSPAFDNLYYWDQDPPERGAPPSTFKGTPTAENPEYLGLDVPV

SEQ ID NO: 861992 - protein, 1144 aa, Homo sapiens
GKEALPASFPVPLHLWGSLSCLPLLIGCASGLGASQPVWVPPLLCSWPRGLCCCLCLSLLLTRPLAVRHLSHCLSLVLSSGHPCSPMCKGSRCWGESSEDCQSLTRTVCAGGCARCKGPLPTDCCHEQCAAGCTGPKHSDCLACLHFNHSGICELHCPALVTYNTDTFESMPNPEGRYTFGASCVTACPYNYLSTDVGSCTLVCPLHNQEVTAEDGTQRCEKCSKPCARVCYGLGMEHLREVRAVTSANIQEFAGCKKIFGSLAFLPESFDGDPASNTAPLQPEQLQVFETLEEITGYLYISAWPDSLPDLSVFQNLQVIRGRILHNGAYSLTLQGLGISWLGLRSLRELGSGLALIHHNTHLCFVHTVPWDQLFRNPHQALLHTANRPEDECVGEGLACHQLCARGHCWGPGPTQCVNCSQFLRGQECVEECRVLQGLPREYVNARHCLPCHPECQPQNGSVTCFGPEADQCVACAHYKDPPFCVARCPSGVKPDLSYMPIWKFPDEEGACQPCPINCTHSCVDLDDKGCPAEQRASPLTSIISAVVGILLVVVLGVVFGILIKRRQQKIRKYTMRRLLQETELVEPLTPSGAMPNQAQMRILKETELRKVKVLGSGAFGTVYKGIWIPDGENVKIPVAIKVLRENTSPKANKEILDEAYVMAGVGSPYVSRLLGICLTSTVQLVTQLMPYGCLLDHVRENRGRLGSQDLLNWCMQIAKGMSYLEDVRLVHRDLAARNVLVKSPNHVKITDFGLARLLDIDETEYHADGGKVPIKWMALESILRRRFTHQSDVWSYGVTVWELMTFGAKPYDGIPAREIPDLLEKGERLPQPPICTIDVYMIMVKCWMIDSECRPRFRELVSEFSRMARDPQRFVVIQNEDLGPASPLDSTFYRSLLEDDDMGDLVDAEEYLVPQQGFFCPDPAPGAGGMVHHRHRSSSTRSGGGDLTLGLEPSEEEAPRSPLAPSEGAGSDVFDGDLGMGAAKGLQSLPTHDPSPLQRYSEDPTVPLPSETDGYVAPLTCSPQPEYVNQPDVRPQPPSPREGPLPAARPAGATLERPKTLSPGKNGVVKDVFAFGGAVENPEYLTPQGGAAPQPHPPPAFSPAFDNLYYWDQDPPERGAPPSTFKGTPTAENPEYLGLDVPV

SEQ ID NO: 861993 - protein, 906 aa, Homo sapiens
QAGVQWYDLGSLQPLPPGFKQFSCLSLLSSWDYRDPASNTAPLQPEQLQVFETLEEITGYLYISAWPDSLPDLSVFQNLQVIRGRILHNGAYSLTLQGLGISWLGLRSLRELGSGLALIHHNTHLCFVHTVPWDQLFRNPHQALLHTANRPEDECVGEGLACHQLCARGHCWGPGPTQCVNCSQFLRGQECVEECRVLQGLPREYVNARHCLPCHPECQPQNGSVTCFGPEADQCVACAHYKDPPFCVARCPSGVKPDLSYMPIWKFPDEEGACQPCPINCTHSCVDLDDKGCPAEQRASPLTSIISAVVGILLVVVLGVVFGILIKRRQQKIRKYTMRRLLQETELVEPLTPSGAMPNQAQMRILKETELRKVKVLGSGAFGTVYKGIWIPDGENVKIPVAIKVLRENTSPKANKEILDEAYVMAGVGSPYVSRLLGICLTSTVQLVTQLMPYGCLLDHVRENRGRLGSQDLLNWCMQIAKGMSYLEDVRLVHRDLAARNVLVKSPNHVKITDFGLARLLDIDETEYHADGGKVPIKWMALESILRRRFTHQSDVWSYGVTVWELMTFGAKPYDGIPAREIPDLLEKGERLPQPPICTIDVYMIMVKCWMIDSECRPRFRELVSEFSRMARDPQRFVVIQNEDLGPASPLDSTFYRSLLEDDDMGDLVDAEEYLVPQQGFFCPDPAPGAGGMVHHRHRSSSTRSGGGDLTLGLEPSEEEAPRSPLAPSEGAGSDVFDGDLGMGAAKGLQSLPTHDPSPLQRYSEDPTVPLPSETDGYVAPLTCSPQPEYVNQPDVRPQPPSPREGPLPAARPAGATLERPKTLSPGKNGVVKDVFAFGGAVENPEYLTPQGGAAPQPHPPPAFSPAFDNLYYWDQDPPERGAPPSTFKGTPTAENPEYLGLDVPV

SEQ ID NO: 861994 - protein, 645 aa, Homo sapiens
MPIWKFPDEEGACQPCPINCTHSCVDLDDKGCPAEQRASPLTSIISAVVGILLVVVLGVVFGILIKRRQQKIRKYTMRRLLQETELVEPLTPSGAMPNQAQMRILKETELRKVKVLGSGAFGTVYKGIWIPDGENVKIPVAIKVLRENTSPKANKEILDEAYVMAGVGSPYVSRLLGICLTSTVQLVTQLMPYGCLLDHVRENRGRLGSQDLLNWCMQIAKGMSYLEDVRLVHRDLAARNVLVKSPNHVKITDFGLARLLDIDETEYHADGGKVPIKWMALESILRRRFTHQSDVWSYGVTVWELMTFGAKPYDGIPAREIPDLLEKGERLPQPPICTIDVYMIMVKCWMIDSECRPRFRELVSEFSRMARDPQRFVVIQNEDLGPASPLDSTFYRSLLEDDDMGDLVDAEEYLVPQQGFFCPDPAPGAGGMVHHRHRSSSTRSGGGDLTLGLEPSEEEAPRSPLAPSEGAGSDVFDGDLGMGAAKGLQSLPTHDPSPLQRYSEDPTVPLPSETDGYVAPLTCSPQPEYVNQPDVRPQPPSPREGPLPAARPAGATLERPKTLSPGKNGVVKDVFAFGGAVENPEYLTPQGGAAPQPHPPPAFSPAFDNLYYWDQDPPERGAPPSTFKGTPTAENPEYLGLDVPV

SEQ ID NO: 861995 - protein, 689 aa, Homo sapiens
MVARLGRRTCFGGEADQCVACAHYKDPPFCVARCPSGVKPDLSYMPIWKFPDEEGACQPCPINCTHSCVDLDDKGCPAEQRASPLTSIISAVVGILLVVVLGVVFGILIKRRQQKIRKYTMRRLLQETELVEPLTPSGAMPNQAQMRILKETELRKVKVLGSGAFGTVYKGIWIPDGENVKIPVAIKVLRENTSPKANKEILDEAYVMAGVGSPYVSRLLGICLTSTVQLVTQLMPYGCLLDHVRENRGRLGSQDLLNWCMQIAKGMSYLEDVRLVHRDLAARNVLVKSPNHVKITDFGLARLLDIDETEYHADGGKVPIKWMALESILRRRFTHQSDVWSYGVTVWELMTFGAKPYDGIPAREIPDLLEKGERLPQPPICTIDVYMIMVKCWMIDSECRPRFRELVSEFSRMARDPQRFVVIQNEDLGPASPLDSTFYRSLLEDDDMGDLVDAEEYLVPQQGFFCPDPAPGAGGMVHHRHRSSSTRSGGGDLTLGLEPSEEEAPRSPLAPSEGAGSDVFDGDLGMGAAKGLQSLPTHDPSPLQRYSEDPTVPLPSETDGYVAPLTCSPQPEYVNQPDVRPQPPSPREGPLPAARPAGATLERPKTLSPGKNGVVKDVFAFGGAVENPEYLTPQGGAAPQPHPPPAFSPAFDNLYYWDQDPPERGAPPSTFKGTPTAENPEYLGLDVPV

SEQ ID NO: 861996 - protein, 1225 aa, Homo sapiens
MKLRLPASPETHLDMLRHLYQGCQVVQGNLELTYLPTNASLSFLQDIQEVQGYVLIAHNQVRQVPLQRLRIVRGTQLFEDNYALAVLDNGDPLNNTTPVTGASPGGLRELQLRSLTEILKGGVLIQRNPQLCYQDTILWKDIFHKNNQLALTLIDTNRSRACHPCSPMCKGSRCWGESSEDCQSLTRTVCAGGCARCKGPLPTDCCHEQCAAGCTGPKHSDCLACLHFNHSGICELHCPALVTYNTDTFESMPNPEGRYTFGASCVTACPYNYLSTDVGSCTLVCPLHNQEVTAEDGTQRCEKCSKPCARVCYGLGMEHLREVRAVTSANIQEFAGCKKIFGSLAFLPESFDGDPASNTAPLQPEQLQVFETLEEITGYLYISAWPDSLPDLSVFQNLQVIRGRILHNGAYSLTLQGLGISWLGLRSLRELGSGLALIHHNTHLCFVHTVPWDQLFRNPHQALLHTANRPEDECVGEGLACHQLCARGHCWGPGPTQCVNCSQFLRGQECVEECRVLQGLPREYVNARHCLPCHPECQPQNGSVTCFGPEADQCVACAHYKDPPFCVARCPSGVKPDLSYMPIWKFPDEEGACQPCPINCTHSCVDLDDKGCPAEQRASPLTSIISAVVGILLVVVLGVVFGILIKRRQQKIRKYTMRRLLQETELVEPLTPSGAMPNQAQMRILKETELRKVKVLGSGAFGTVYKGIWIPDGENVKIPVAIKVLRENTSPKANKEILDEAYVMAGVGSPYVSRLLGICLTSTVQLVTQLMPYGCLLDHVRENRGRLGSQDLLNWCMQIAKGMSYLEDVRLVHRDLAARNVLVKSPNHVKITDFGLARLLDIDETEYHADGGKVPIKWMALESILRRRFTHQSDVWSYGVTVWELMTFGAKPYDGIPAREIPDLLEKGERLPQPPICTIDVYMIMVKCWMIDSECRPRFRELVSEFSRMARDPQRFVVIQNEDLGPASPLDSTFYRSLLEDDDMGDLVDAEEYLVPQQGFFCPDPAPGAGGMVHHRHRSSSTRSGGGDLTLGLEPSEEEAPRSPLAPSEGAGSDVFDGDLGMGAAKGLQSLPTHDPSPLQRYSEDPTVPLPSETDGYVAPLTCSPQPEYVNQPDVRPQPPSPREGPLPAARPAGATLERPKTLSPGKNGVVKDVFAFGGAVENPEYLTPQGGAAPQPHPPPAFSPAFDNLYYWDQDPPERGAPPSTFKGTPTAENPEYLGLDVPV

SEQ ID NO: 861997 - protein, 430 aa, Homo sapiens
GCFPFQGMSYLEDVRLVHRDLAARNVLVKSPNHVKITDFGLARLLDIDETEYHADGGKVPIKWMALESILRRRFTHQSDVWSYGVTVWELMTFGAKPYDGIPAREIPDLLEKGERLPQPPICTIDVYMIMVKCWMIDSECRPRFRELVSEFSRMARDPQRFVVIQNEDLGPASPLDSTFYRSLLEDDDMGDLVDAEEYLVPQQGFFCPDPAPGAGGMVHHRHRSSSTRSGGGDLTLGLEPSEEEAPRSPLAPSEGAGSDVFDGDLGMGAAKGLQSLPTHDPSPLQRYSEDPTVPLPSETDGYVAPLTCSPQPEYVNQPDVRPQPPSPREGPLPAARPAGATLERPKTLSPGKNGVVKDVFAFGGAVENPEYLTPQGGAAPQPHPPPAFSPAFDNLYYWDQDPPERGAPPSTFKGTPTAENPEYLGLDVPV

SEQ ID NO: 861998 - protein, 281 aa, Homo sapiens
MLGWGGATILPLLPPQNEDLGPASPLDSTFYRSLLEDDDMGDLVDAEEYLVPQQGFFCPDPAPGAGGMVHHRHRSSSTRSGGGDLTLGLEPSEEEAPRSPLAPSEGAGSDVFDGDLGMGAAKGLQSLPTHDPSPLQRYSEDPTVPLPSETDGYVAPLTCSPQPEYVNQPDVRPQPPSPREGPLPAARPAGATLERPKTLSPGKNGVVKDVFAFGGAVENPEYLTPQGGAAPQPHPPPAFSPAFDNLYYWDQDPPERGAPPSTFKGTPTAENPEYLGLDVPV

SEQ ID NO: 861999 - protein, 1020 aa, Homo sapiens
MKLRLPASPETHLDMLRHLYQGCQVVQGNLELTYLPTNASLSFLQDIQEVQGYVLIAHNQVRQVPLQRLRIVRGTQLFEDNYALAVLDNGDPLNNTTPVTGASPGGLRELQLRSLTEILKGGVLIQRNPQLCYQDTILWKDIFHKNNQLALTLIDTNRSRACHPCSPMCKGSRCWGESSEDCQSLTRTVCAGGCARCKGPLPTDCCHEQCAAGCTGPKHSDCLACLHFNHSGICELHCPALVTYNTDTFESMPNPEGRYTFGASCVTACPYNYLSTDVGSCTLVCPLHNQEVTAEDGTQRCEKCSKPCARVCYGLGMEHLREVRAVTSANIQEFAGCKKIFGSLAFLPESFDGDPASNTAPLQPEQLQVFETLEEITGYLYISAWPDSLPDLSVFQNLQVIRGRILHNGAYSLTLQGLGISWLGLRSLRELGSGLALIHHNTHLCFVHTVPWDQLFRNPHQALLHTANRPEDECVGEGLACHQLCARGHCWGPGPTQCVNCSQFLRGQECVEECRVLQGLPREYVNARHCLPCHPECQPQNGSVTCFGPEADQCVACAHYKDPPFCVARCPSGVKPDLSYMPIWKFPDEEGACQPCPINCTHSCVDLDDKGCPAEQRASPLTSIISAVVGILLVVVLGVVFGILIKRRQQKIRKYTMRRLLQETELVEPLTPSGAMPNQAQMRILKETELRKVKVLGSGAFGTVYKGIWIPDGENVKIPVAIKVLRENTSPKANKEILDEAYVMAGVGSPYVSRLLGICLTSTVQLVTQLMPYGCLLDHVRENRGRLGSQDLLNWCMQIAKGMSYLEDVRLVHRDLAARNVLVKSPNHVKITDFGLARLLDIDETEYHADGGKVPIKWMALESILRRRFTHQSDVWSYGVTVWELMTFGAKPYDGIPAREIPDLLEKGERLPQPPICTIDVYMIMVKCWMIDSECRPRFRELVSEFSRMARDPQRFVVIQNEDLGPASPLDSTFYRSLLEDDDMGDLVDAEEYLVPQQGFFCPDPFPSRSWVLKALGKLA

SEQ ID NO: 862000 - protein, 164 aa, Homo sapiens
SRGSLSTFCSALTDPSPLQRYSEDPTVPLPSETDGYVAPLTCSPQPEYVNQPDVRPQPPSPREGPLPAARPAGATLERPKTLSPGKNGVVKDVFAFGGAVENPEYLTPQGGAAPQPHPPPAFSPAFDNLYYWDQDPPERGAPPSTFKGTPTAENPEYLGLDVPV

SEQ ID NO: 862001 - protein, 930 aa, Homo sapiens
MKLRLPASPETHLDMLRHLYQGCQVVQGNLELTYLPTNASLSFLQDIQEVQGYVLIAHNQVRQVPLQRLRIVRGTQLFEDNYALAVLDNGDPLNNTTPVTGASPGGLRELQLRSLTEILKGGVLIQRNPQLCYQDTILWKDIFHKNNQLALTLIDTNRSRACHPCSPMCKGSRCWGESSEDCQSLTRTVCAGGCARCKGPLPTDCCHEQCAAGCTGPKHSDCLACLHFNHSGICELHCPALVTYNTDTFESMPNPEGRYTFGASCVTACPYNYLSTDVGSCTLVCPLHNQEVTAEDGTQRCEKCSKPCARVCYGLGMEHLREVRAVTSANIQEFAGCKKIFGSLAFLPESFDGDPASNTAPLQPEQLQVFETLEEITGYLYISAWPDSLPDLSVFQNLQVIRGRILHNGAYSLTLQGLGISWLGLRSLRELGSGLALIHHNTHLCFVHTVPWDQLFRNPHQALLHTANRPEDECVGEGLACHQLCARGHCWGPGPTQCVNCSQFLRGQECVEECRVLQGLPREYVNARHCLPCHPECQPQNGSVTCFGPEADQCVACAHYKDPPFCVARCPSGVKPDLSYMPIWKFPDEEGACQPCPINCTHSCVDLDDKGCPAEQRASPLTSIISAVVGILLVVVLGVVFGILIKRRQQKIRKYTMRRLLQETELVEPLTPSGAMPNQAQMRILKETELRKVKVLGSGAFGTVYKGIWIPDGENVKIPVAIKVLRENTSPKANKEILDEAYVMAGVGSPYVSRLLGICLTSTVQLVTQLMPYGCLLDHVRENRGRLGSQDLLNWCMQIAKGMSYLEDVRLVHRDLAARNVLVKSPNHVKITDFGLARLLDIDETEYHADGGKVPIKWMALESILRRRFTHQSDVWSYGVTVWELMTFGAKPYDGIPAREIPDLLEKGERLPQPPICTIDVYMIMVKLDD

SEQ ID NO: 862002 - protein, 942 aa, Homo sapiens
MKLRLPASPETHLDMLRHLYQGCQVVQGNLELTYLPTNASLSFLQDIQEVQGYVLIAHNQVRQVPLQRLRIVRGTQLFEDNYALAVLDNGDPLNNTTPVTGASPGGLRELQLRSLTEILKGGVLIQRNPQLCYQDTILWKDIFHKNNQLALTLIDTNRSRACHPCSPMCKGSRCWGESSEDCQSLTRTVCAGGCARCKGPLPTDCCHEQCAAGCTGPKHSDCLACLHFNHSGICELHCPALVTYNTDTFESMPNPEGRYTFGASCVTACPYNYLSTDVGSCTLVCPLHNQEVTAEDGTQRCEKCSKPCARVCYGLGMEHLREVRAVTSANIQEFAGCKKIFGSLAFLPESFDGDPASNTAPLQPEQLQVFETLEEITGYLYISAWPDSLPDLSVFQNLQVIRGRILHNGAYSLTLQGLGISWLGLRSLRELGSGLALIHHNTHLCFVHTVPWDQLFRNPHQALLHTANRPEDECVGEGLACHQLCARGHCWGPGPTQCVNCSQFLRGQECVEECRVLQGLPREYVNARHCLPCHPECQPQNGSVTCFGPEADQCVACAHYKDPPFCVARCPSGVKPDLSYMPIWKFPDEEGACQPCPINCTHSCVDLDDKGCPAEQRASPLTSIISAVVGILLVVVLGVVFGILIKRRQQKIRKYTMRRLLQETELVEPLTPSGAMPNQAQMRILKETELRKVKVLGSGAFGTVYKGIWIPDGENVKIPVAIKVLRENTSPKANKEILDEAYVMAGVGSPYVSRLLGICLTSTVQLVTQLMPYGCLLDHVRENRGRLGSQDLLNWCMQIAKGMSYLEDVRLVHRDLAARNVLVKSPNHVKITDFGLARLLDIDETEYHADGGKVPIKWMALESILRRRFTHQSDVWSYGVTVWELMTSAHELVTSKIALRKDLDNAEEKADALNKELLMTKQNLIDAEEEKRRLEEESAQLK

SEQ ID NO: 862003 - protein, 103 aa, Homo sapiens
MCRSQRCAAPNACAAPNACTLSPGKNGVVKDVFAFGGAVENPEYLTPQGGAAPQPHPPPAFSPAFDNLYYWDQDPPERGAPPSTFKGTPTAENPEYLGLDVPV

SEQ ID NO: 862004 - protein, 648 aa, Homo sapiens
MKLRLPASPETHLDMLRHLYQGCQVVQGNLELTYLPTNASLSFLQDIQEVQGYVLIAHNQVRQVPLQRLRIVRGTQLFEDNYALAVLDNGDPLNNTTPVTGASPGGLRELQLRSLTEILKGGVLIQRNPQLCYQDTILWKDIFHKNNQLALTLIDTNRSRACHPCSPMCKGSRCWGESSEDCQSLTRTVCAGGCARCKGPLPTDCCHEQCAAGCTGPKHSDCLACLHFNHSGICELHCPALVTYNTDTFESMPNPEGRYTFGASCVTACPYNYLSTDVGSCTLVCPLHNQEVTAEDGTQRCEKCSKPCARVCYGLGMEHLREVRAVTSANIQEFAGCKKIFGSLAFLPESFDGDPASNTAPLQPEQLQVFETLEEITGYLYISAWPDSLPDLSVFQNLQVIRGRILHNGAYSLTLQGLGISWLGLRSLRELGSGLALIHHNTHLCFVHTVPWDQLFRNPHQALLHTANRPEDECVGEGLACHQLCARGHCWGPGPTQCVNCSQFLRGQECVEECRVLQGLPREYVNARHCLPCHPECQPQNGSVTCFGPEADQCVACAHYKDPPFCVARCPSGVKPDLSYMPIWKFPDEEGACQPCPINCTHSCVDLDDKGCPAEQRARLAWTPGCTLHCPSLPHWMLGGHCCREGTP

SEQ ID NO: 862005 - protein, 545 aa, Homo sapiens [sequence omitted]

SEQ ID NO: 862006 - protein, 125 aa, Homo sapiens
VCASALCPMCSTPQDARGGHPAWYCPIAPGTPGQNSTVKASHLSPQACLHFNHSGICELHCPALVTYNTDTFESMPNPEGRYTFGASCVTACPCECQGETQFSHFGGEVCFCKWEHMGSTVCILL

SEQ ID NO: 862007 - protein, 168 aa, Homo sapiens
MCRSQRCAAPKRMCRSQRMCRSQRMCRSQRMCRSQRMCRSQDLLNWCMQIAKGMSYLEDVRLVHRDLAARNVLVKSPNHVKITDFGLARLLDIDETEYHADGGKVPIKWMALESILRRRFTHQSDVWSYGVTVWELMTFGAKPYDGIPAREIPDLLEKGERHMRWGIL

SEQ ID NO: 862008 - protein, 1255 aa, Homo sapiens [sequence omitted]

SEQ ID NO: 862009 - protein, 1225 aa, Homo sapiens; identical to SEQ ID NO: 861996

SEQ ID NO: 862010 - protein, 1225 aa, Homo sapiens; identical to SEQ ID NO: 861996

SEQ ID NO: 862011 - protein, 1261 aa, Homo sapiens
  misc_feature (2)..(2): Xaa can be any naturally occurring amino acid
  misc_feature (8)..(8): Xaa can be any naturally occurring amino acid
  misc_feature (13)..(13): Xaa can be any naturally occurring amino acid
KXSNVLLXTCKKXNTSKIPEDMPRGSWKPQVCTGTDMKLRLPASPETHLDMLRHLYQGCQVVQGNLELTYLPTNASLSFLQDIQEVQGYVLIAHNQVRQVPLQRLRIVRGTQLFEDNYALAVLDNGDPLNNTTPVTGASPGGLRELQLRSLTEILKGGVLIQRNPQLCYQDTILWKDIFHKNNQLALTLIDTNRSRACHPCSPMCKGSRCWGESSEDCQSLTRTVCAGGCARCKGPLPTDCCHEQCAAGCTGPKHSDCLACLHFNHSGICELHCPALVTYNTDTFESMPNPEGRYTFGASCVTACPYNYLSTDVGSCTLVCPLHNQEVTAEDGTQRCEKCSKPCARVCYGLGMEHLREVRAVTSANIQEFAGCKKIFGSLAFLPESFDGDPASNTAPLQPEQLQVFETLEEITGYLYISAWPDSLPDLSVFQNLQVIRGRILHNGAYSLTLQGLGISWLGLRSLRELGSGLALIHHNTHLCFVHTVPWDQLFRNPHQALLHTANRPEDECVGEGLACHQLCARGHCWGPGPTQCVNCSQFLRGQECVEECRVLQGLPREYVNARHCLPCHPECQPQNGSVTCFGPEADQCVACAHYKDPPFCVARCPSGVKPDLSYMPIWKFPDEEGACQPCPINCTHSCVDLDDKGCPAEQRASPLTSIISAVVGILLVVVLGVVFGILIKRRQQKIRKYTMRRLLQETELVEPLTPSGAMPNQAQMRILKETELRKVKVLGSGAFGTVYKGIWIPDGENVKIPVAIKVLRENTSPKANKEILDEAYVMAGVGSPYVSRLLGICLTSTVQLVTQLMPYGCLLDHVRENRGRLGSQDLLNWCMQIAKGMSYLEDVRLVHRDLAARNVLVKSPNHVKITDFGLARLLDIDETEYHADGGKVPIKWMALESILRRRFTHQSDVWSYGVTVWELMTFGAKPYDGIPAREIPDLLEKGERLPQPPICTIDVYMIMVKCWMIDSECRPRFRELVSEFSRMARDPQRFVVIQNEDLGPASPLDSTFYRSLLEDDDMGDLVDAEEYLVPQQGFFCPDPAPGAGGMVHHRHRSSSTRSGGGDLTLGLEPSEEEAPRSPLAPSEGAGSDVFDGDLGMGAAKGLQSLPTHDPSPLQRYSEDPTVPLPSETDGYVAPLTCSPQPEYVNQPDVRPQPPSPREGPLPAARPAGATLERPKTLSPGKNGVVKDVFAFGGAVENPEYLTPQGGAAPQPHPPPAFSPAFDNLYYWDQDPPERGAPPSTFKGTPTAENPEYLGLDVPV

SEQ ID NO: 862012 - protein, 1265 aa, Homo sapiens
MKLRLPASPETHLDMLRHLYQGCQVVQGNLELTYLPTNASLSFLQDIQEVQGYVLIAHNQVRQVPLQRLRIVRGTQLFEDNYALAVLDNGDPLNNTTPVTGASPGGLRELQLRSLTEILKGGVLIQRNPQLCYQDTILWKDIFHKNNQLALTLIDTNRSRACHPCSPMCKGSRCWGESSEDCQSLTRTVCAGGCARCKGPLPTDCCHEQCAAGCTGPKHSDCLACLHFNHSGICELHCPALVTYNTDTFESMPNPEGRYTFGASCVTACPYNYLSTDVGSCTLVCPLHNQEVTAEDGTQRCEKCSKPCARVCYGLGMEHLREVRAVTSANIQEFAGCKKIFGSLAFLPESFDGDPASNTAPLQPEQLQVFETLEEITGYLYISAWPDSLPDLSVFQNLQVIRGRILHNGAYSLTLQGLGISWLGLRSLRELGSGLALIHHNTHLCFVHTVPWDQLFRNPHQALLHTANRPEDECVGEGLACHQLCARGHCWGPGPTQCVNCSQFLRGQECVEECRVLQGLPREYVNARHCLPCHPECQPQNGSVTCFGPEADQCVACAHYKDPPFCVARCPSGVKPDLSYMPIWKFPDEEGACQPCPINCTHSCVDLDDKGCPAEQRASPLTSIISAVVGILLVVVLGVVFGILIKRRQQKIRKYTMRRLLQETELVEPLTPSGAMPNQAQMRILKETELRKVKVLGSGAFGTVYKGIWIPDGENVKIPVAIKVLRENTSPKANKEILDEAYVMAGVGSPYVSRLLGICLTSTVQLVTQLMPYGCLLDHVRENRGRLGSQDLLNWCMQIAKGMSYLEDVRLVHRDLAARNVLVKSPNHVKITDFGLARLLDIDETEYHADGGKVGEGPRSRGGWVEWCLAHGRTLSGHLPTHTVGGLPLLPSQVPIKWMALESILRRRFTHQSDVWSYGVTVWELMTFGAKPYDGIPAREIPDLLEKGERLPQPPICTIDVYMIMVKCWMIDSECRPRFRELVSEFSRMARDPQRFVVIQNEDLGPASPLDSTFYRSLLEDDDMGDLVDAEEYLVPQQGFFCPDPAPGAGGMVHHRHRSSSTRSGGGDLTLGLEPSEEEAPRSPLAPSEGAGSDVFDGDLGMGAAKGLQSLPTHDPSPLQRYSEDPTVPLPSETDGYVAPLTCSPQPEYVNQPDVRPQPPSPREGPLPAARPAGATLERPKTLSPGKNGVVKDVFAFGGAVENPEYLTPQGGAAPQPHPPPAFSPAFDNLYYWDQDPPERGAPPSTFKGTPTAENPEYLGLDVPV

SEQ ID NO: 862013 - protein, 853 aa, Homo sapiens
SGRSRSRTESGDPASNLPDLSVFQNLQVIRGRILHNGAYSLTLQGLGISWLGLRSLRELGSGLALIHHNTHLCFVHTVPWDQLFRNPHQALLHTANRPEDECVGEGLACHQLCARGHCWGPGPTQCVNCSQFLRGQECVEECRVLQGLPREYVNARHCLPCHPECQPQNGSVTCFGPEADQCVACAHYKDPPFCVARCPSGVKPDLSYMPIWKFPDEEGACQPCPINCTHSCVDLDDKGCPAEQRASPLTSIISAVVGILLVVVLGVVFGILIKRRQQKIRKYTMRRLLQETELVEPLTPSGAMPNQAQMRILKETELRKVKVLGSGAFGTVYKGIWIPDGENVKIPVAIKVLRENTSPKANKEILDEAYVMAGVGSPYVSRLLGICLTSTVQLVTQLMPYGCLLDHVRENRGRLGSQDLLNWCMQIAKGMSYLEDVRLVHRDLAARNVLVKSPNHVKITDFGLARLLDIDETEYHADGGKVPIKWMALESILRRRFTHQSDVWSYGVTVWELMTFGAKPYDGIPAREIPDLLEKGERLPQPPICTIDVYMIMVKCWMIDSECRPRFRELVSEFSRMARDPQRFVVIQNEDLGPASPLDSTFYRSLLEDDDMGDLVDAEEYLVPQQGFFCPDPAPGAGGMVHHRHRSSSTRSGGGDLTLGLEPSEEEAPRSPLAPSEGAGSDVFDGDLGMGAAKGLQSLPTHDPSPLQRYSEDPTVPLPSETDGYVAPLTCSPQPEYVNQPDVRPQPPSPREGPLPAARPAGATLERPKTLSPGKNGVVKDVFAFGGAVENPEYLTPQGGAAPQPHPPPAFSPAFDNLYYWDQDPPERGAPPSTFKGTPTAENPEYLGLDVPV

SEQ ID NO: 862014 - protein, 927 aa, Homo sapiens
MKLRLPASPETHLDMLRHLYQGCQVVQGNLELTYLPTNASLSFLQDIQEVQGYVLIAHNQVRQVPLQRLRIVRGTQLFEDNYALAVLDNGDPLNNTTPVTGASPGGLRELQLRSLTEILKGGVLIQRNPQLCYQDTILWKDIFHKNNQLALTLIDTNRSRACHPCSPMCKGSRCWGESSEDCQSLTRTVCAGGCARCKGPLPTDCCHEQCAAGCTGPKHSDCLACLHFNHSGICELHCPALVTYNTDTFESMPNPEGRYTFGASCVTACPYNYLSTDVGSCTLVCPLHNQEVTAEDGTQRCEKCSKPCARVCYGLGMEHLREVRAVTSANIQEFAGCKKIFGSLAFLPESFDGDPASNTAPLQPEQLQVFETLEEITGYLYISAWPDSLPDLSVFQNLQVIRGRILHNGAYSLTLQGLGISWLGLRSLRELGSGLALIHHNTHLCFVHTVPWDQLFRNPHQALLHTANRPEDECVGEGLACHQLCARGHCWGPGPTQCVNCSQFLRGQECVEECRVLQGLPREYVNARHCLPCHPECQPQNGSVTCFGPEADQCVACAHYKDPPFCVARCPSGVKPDLSYMPIWKFPDEEGACQPCPINCTHSCVDLDDKGCPAEQRASPLTSIISAVVGILLVVVLGVVFGILIKRRQQKIRKYTMRRLLQETELVEPLTPSGAMPNQAQMRILKETELRKVKVLGSGAFGTVYKGIWIPDGENVKIPVAIKVLRENTSPKANKEILDEAYVMAGVGSPYVSRLLGICLTSTVQLVTQLMPYGCLLDHVRENRGRLGSQDLLNWCMQIAKGMSYLEDVRLVHRDLAARNVLVKSPNHVKITDFGLARLLDIDETEYHADGGKVPIKWMALESILRRRFTHQSDVWSYGVTVWELMTFGAKPYDGIPAREIPDLLEKGERLPQPPICTIDVYMIMVK

SEQ ID NO: 862015 - protein, 1225 aa, Homo sapiens; identical to SEQ ID NO: 861996

SEQ ID NO: 862016 - protein, 510 aa, Homo sapiens
MVGRLCGVWGCVVSHTLSAYPCPQEAYVMAGVGSPYVSRLLGICLTSTVQLVTQLMPYGCLLDHVRENRGRLGSQDLLNWCMQIAKGMSYLEDVRLVHRDLAARNVLVKSPNHVKITDFGLARLLDIDETEYHADGGKVPIKWMALESILRRRFTHQSDVWSYGVTVWELMTFGAKPYDGIPAREIPDLLEKGERLPQPPICTIDVYMIMVKCWMIDSECRPRFRELVSEFSRMARDPQRFVVIQNEDLGPASPLDSTFYRSLLEDDDMGDLVDAEEYLVPQQGFFCPDPAPGAGGMVHHRHRSSSTRSGGGDLTLGLEPSEEEAPRSPLAPSEGAGSDVFDGDLGMGAAKGLQSLPTHDPSPLQRYSEDPTVPLPSETDGYVAPLTCSPQPEYVNQPDVRPQPPSPREGPLPAARPAGATLERPKTLSPGKNGVVKDVFAFGGAVENPEYLTPQGGAAPQPHPPPAFSPAFDNLYYWDQDPPERGAPPSTFKGTPTAENPEYLGLDVPV

SEQ ID NO: 862017 - protein, 380 aa, Homo sapiens
RRFLADGGVPIKWMALESILRRRFTHQSDVWSYGVTVWELMTFGAKPYDGIPAREIPDLLEKGERLPQPPICTIDVYMIMVKCWMIDSECRPRFRELVSEFSRMARDPQRFVVIQNEDLGPASPLDSTFYRSLLEDDDMGDLVDAEEYLVPQQGFFCPDPAPGAGGMVHHRHRSSSTRSGGGDLTLGLEPSEEEAPRSPLAPSEGAGSDVFDGDLGMGAAKGLQSLPTHDPSPLQRYSEDPTVPLPSETDGYVAPLTCSPQPEYVNQPDVRPQPPSPREGPLPAARPAGATLERPKTLSPGKNGVVKDVFAFGGAVENPEYLTPQGGAAPQPHPPPAFSPAFDNLYYWDQDPPERGAPPSTFKGTPTAENPEYLGLDVPV

SEQ ID NO: 862018 - protein, 1113 aa, Homo sapiens
MKLRLPASPETHLDMLRHLYQGCQVVQGNLELTYLPTNASLSFLQDIQEVQGYVLIAHNQVRQVPLQRLRIVRGTQLFEDNYALAVLDNGDPLNNTTPVTGASPGGLRELQLRSLTEILKGGVLIQRNPQLCYQDTILWKDIFHKNNQLALTLIDTNRSRACHPCSPMCKGSRCWGESSEDCQSLTRTVCAGGCARCKGPLPTDCCHEQCAAGCTGPKHSDCLACLHFNHSGICELHCPALVTYNTDTFESMPNPEGRYTFGASCVTACPYNYLSTDVGSCTLVCPLHNQEVTAEDGTQRCEKCSKPCARVCYGLGMEHLREVRAVTSANIQEFAGCKKIFGSLAFLPESFDGDPASNTAPLQPEQLQVFETLEEITGYLYISAWPDSLPDLSVFQNLQVIRGRILHNGAYSLTLQGLGISWLGLRSLRELGSGLALIHHNTHLCFVHTVPWDQLFRNPHQALLHTANRPEDECVGEGLACHQLCARGHCWGPGPTQCVNCSQFLRGQECVEECRVLQGLPREYVNARHCLPCHPECQPQNGSVTCFGPEADQCVACAHYKDPPFCVARCPSGVKPDLSYMPIWKFPDEEGACQPCPINCTHSCVDLDDKGCPAEQRASPLTSIISAVVGILLVVVLGVVFGILIKRRQQKIRKYTMRRLLQETELVEPLTPSGAMPNQAQMRILKETELRKVKVLGSGAFGTVYKGIWIPDGENVKIPVAIKVLRENTSPKANKEILDEAYVMAGVGSPYVSRLLGICLTSTVQLVTQLMPYGCLLDHVRENRGRLGSQDLLNWCMQIAKGMSYLEDVRLVHRDLAARNVLVKSPNHVKITDFGLARLLDIDETEYHADGGKVPIKWMALESILRRRFTHQSDVWSYGVTVWELMTFGAKPYDGIPAREIPDLLEKGERLPQPPICTIDVYMIMVKCWMIDSECRPRFRELVSEFSRMARDPQRFVVIQNEDLGPASPLDSTFYRSLLEDDDMGDLVDAEEYLVPQQGFFCPDPAPGAGGMVHHRHRSSSTRSGGGDLTLGLEPSEEEAPRSPLAPSEGAGSDVFDGDLGMGAAKGLQSLPTHDPSPLQRYSEDPTERASSFLQRKGRLGGHTNRAHSSGFY

SEQ ID NO: 862019 - protein, 927 aa, Homo sapiens; identical to SEQ ID NO: 862014

SEQ ID NO: 862020 - protein, 917 aa, Homo sapiens
MKLRLPASPETHLDMLRHLYQGCQVVQGNLELTYLPTNASLSFLQDIQEVQGYVLIAHNQVRQVPLQRLRIVRGTQLFEDNYALAVLDNGDPLNNTTPVTGASPGGLRELQLRSLTEILKGGVLIQRNPQLCYQDTILWKDIFHKNNQLALTLIDTNRSRACHPCSPMCKGSRCWGESSEDCQSLTRTVCAGGCARCKGPLPTDCCHEQCAAGCTGPKHSDCLACLHFNHSGICELHCPALVTYNTDTFESMPNPEGRYTFGASCVTACPYNYLSTDVGSCTLVCPLHNQEVTAEDGTQRCEKCSKPCARVCYGLGMEHLREVRAVTSANIQEFAGCKKIFGSLAFLPESFDGDPASNTAPLQPEQLQVFETLEEITGYLYISAWPDSLPDLSVFQNLQVIRGRILHNGAYSLTLQGLGISWLGLRSLRELGSGLALIHHNTHLCFVHTVPWDQLFRNPHQALLHTANRPEDECVGEGLACHQLCARGHCWGPGPTQCVNCSQFLRGQECVEECRVLQGLPREYVNARHCLPCHPECQPQNGSVTCFGPEADQCVACAHYKDPPFCVARCPSGVKPDLSYMPIWKFPDEEGACQPCPINCTHSCVDLDDKGCPAEQRASPLTSIISAVVGILLVVVLGVVFGILIKRRQQKIRKYTMRRLLQETELVEPLTPSGAMPNQAQMRILKETELRKVKVLGSGAFGTVYKGIWIPDGENVKIPVAIKVLRENTSPKANKEILDEAYVMAGVGSPYVSRLLGICLTSTVQLVTQLMPYGCLLDHVRENRGRLGSQDLLNWCMQIAKGMSYLEDVRLVHRDLAARNVLVKSPNHVKITDFGLARLLDIDETEYHADGGKVPIKWMALESILRRRFTHQSDVWSYGVTVWELMTFGAKPYDGIPAREIPDLLEKGERHMRWGIL

SEQ ID NO: 862021 - protein, 104 aa, Homo sapiens
GCQLLGVLHGPTLLLPSAQPSTTSITGTRTHQSGGLHPAPSKGHLRQRTQSTWVWTCQCEPEGQVRRSPDVSSGSREGLTSAGIKRWEGPPTTSRGTCHARNLS

SEQ ID NO: 862022 - protein, 603 aa, Homo sapiens
MKLRLPASPETHLDMLRHLYQGCQVVQGNLELTYLPTNASLSFLQDIQEVQGYVLIAHNQVRQVPLQRLRIVRGTQLFEDNYALAVLDNGDPLNNTTPVTGASPGGLRELQLRSLTEILKGGVLIQRNPQLCYQDTILWKDIFHKNNQLALTLIDTNRSRACHPCSPMCKGSRCWGESSEDCQSLTRTVCAGGCARCKGPLPTDCCHEQCAAGCTGPKHSDCLACLHFNHSGICELHCPALVTYNTDTFESMPNPEGRYTFGASCVTACPYNYLSTDVGSCTLVCPLHNQEVTAEDGTQRCEKCSKPCARVCYGLGMEHLREVRAVTSANIQEFAGCKKIFGSLAFLPESFDGDPASNTAPLQPEQLQVFETLEEITGYLYISAWPDSLPDLSVFQNLQVIRGRILHNGAYSLTLQGLGISWLGLRSLRELGSGLALIHHNTHLCFVHTVPWDQLFRNPHQALLHTANRPEDECVGEGLACHQLCARGHCWGPGPTQCVNCSQFLRGQECVEECRVLQGLPREYVNARHCLPCHPECQPQNGSVTCFGPEADQCVACAHYKDPPFCVARCPSGVKPDLSYMPIWKFPDEEGACQPCPINCTHS

SEQ ID NO: 862023 - protein, 302 aa, Homo sapiens
MKLRLPASPETHLDMLRHLYQGCQVVQGNLELTYLPTNASLSFLQDIQEVQGYVLIAHNQVRQVPLQRLRIVRGTQLFEDNYALAVLDNGDPLNNTTPVTGASPGGLRELQLRSLTEILKGGVLIQRNPQLCYQDTILWKDIFHKNNQLALTLIDTNRSRACHPCSPMCKGSRCWGESSEDCQSLTRTVCAGGCARCKGPLPTDCCHEQCAAGCTGPKHSDCLACLHFNHSGICELHCPALVTYNTDTFESMPNPEGRYTFGASCVTACPCECQGETQFSHFGGEVCFCKWEHMGSTVCILL

SEQ ID NO: 862024 - protein, 109 aa, Homo sapiens
ELILGLLSPSLARPWLSDLPCAVSQACPCPPGFVLFVGVPPPPVLVPRVLPLGPPLLHRVSTVPIWCPRVYTELGFSATLFVVPIGAPMSFFFFSFSFFYFLSKKFICM

SEQ ID NO: 862025 - protein, 78 aa, Homo sapiens
CSSGRITPVCKHLRKDKGLGFCEAPLSPDNRALSGFSETPVHSRIRRFLLHSQDPELHLPVRVFKLLNLASQDFCYCK

SEQ ID NO: 862026 - protein, 192 aa, Homo sapiens; identical to SEQ ID NO: 810935

SEQ ID NO: 862027 - protein, 185 aa, Homo sapiens
MQAIKAVGKTCLLISYTTNAFPGEYIPTVFDNYSANVMVDSKPVNLGLWDTAGQEDYDRLRPLSYPQTDVFLICFSLVSPASYENVRAKWFPEVRHHCPSTPIILVGTKLDLRDDKDTIEKLKEKKLAPITYPQGLALAKEIDSVKYLECSALTQRGLKTVFDEAIRAVLCPQPTRQQKRACSLL

SEQ ID NO: 862028 - protein, 161 aa, Homo sapiens
MYPWAFDNYSANVMVDSKPVNLGLWDTAGQEDYDRLRPLSYPQTDVFLICFSLVSPASYENVRAKWFPEVRHHCPSTPIILVGTKLDLRDDKDTIEKLKEKKLAPITYPQGLALAKEIDSVKYLECSALTQRGLKTVFDEAIRAVLCPQPTRQQKRACSLL

SEQ ID NO: 862029 - protein, 192 aa, Homo sapiens; identical to SEQ ID NO: 810935

SEQ ID NO: 862030 - protein, 192 aa, Homo sapiens; identical to SEQ ID NO: 810935

SEQ ID NO: 862031 - protein, 179 aa, Homo sapiens [sequence omitted]

SEQ ID NO: 862032 - protein, 192 aa, Homo sapiens; identical to SEQ ID NO: 810935

SEQ ID NO: 862033 - protein, 192 aa, Homo sapiens; identical to SEQ ID NO: 810935

SEQ ID NO: 862034 - protein, 192 aa, Homo sapiens; identical to SEQ ID NO: 810935

SEQ ID NO: 862035 - protein, 134 aa, Homo sapiens
GNLLPLLSLHPHTPSDPRTASLPPLDPYNLVSPHPPAQWFPEVRHHCPSTPIILVGTKLDLRDDKDTIEKLKEKKLAPITYPQGLALAKEIDSVKYLECSALTQRGLKTVFDEAIRAVLCPQPTRQQKRACSLL

SEQ ID NO: 862036 - protein, 192 aa, Homo sapiens; identical to SEQ ID NO: 810935

SEQ ID NO: 862037 - protein, 505 aa, Homo sapiens
MASGRRAPRTGLLELRAGAGSGAGGERWQRVLLSLAEDVLTVSPADGDPGPEPGAPREQEPAQLNGAAEPGAGPPQLPEALLLQRRRVTVRKADAGGLGISIKGGRENKMPILISKIFKGLAADQTEALFVGDAILSVNGEDLSSATHDEAVQVLKKTGKEVVLEVKYMKDVSPYFKNSTGGTSVGWDSPPASPLQRQPSSPGPTPRNFSEAKHMSLKMAYVSKRCTPNDPEPRYLEICSADGQDTLFLRAKDEASARSWATAIQAQVNTLTPRVKDELQALLAATSTAGSQDIKQIGWLTEQLPSGGTAPTLALLTEKELLLYLSLPETREALSRPARTAPLIATRLVHSGPSKGSVPYDAELSFALRTGTRHGVDTHLFSVESPQELAAWTRQLVDGCHRAAEGVQEVSTACTWNGRPCSLSVHIDKGFTLWAAEPGAARAVLLRQPFEKLQMSSDDGASLLFLDFGGAEGEIQLDLHSCPKTIVFIIHSFLSAKVTRLGLLA

SEQ ID NO: 862038 - protein, 130 aa, Homo sapiens
  misc_feature (80)..(80): Xaa can be any naturally occurring amino acid
MASGRRAPRTGLLELRAGAGSGAGGERWQRVLLSLAEDVLTVSPADGDPGPEPGAPREQEPAQLNGAADSERPIPRVAMXEALTTAIKRALNLKTAMINGENAKETCDDNRGNNEMERRKNDQKPIQVTK

SEQ ID NO: 862039 - protein, 505 aa, Homo sapiens; identical to SEQ ID NO: 862037

SEQ ID NO: 862040 - protein, 496 aa, Homo sapiens
MASGRRAPRTGLLELRAGAGSGAGGERWQRVLLSLAEDVLTVSPADGDPGPEPGAPREQEPAQLNGAAEPGAGPPQLPEALLLQRRRVTVRKADAGGLGISIKGGRENKMPILISKIFKGLAADQTEALFVGDAILSVNGEDLSSATHDEAVQVLKKTGKEVVLEVKYMKDVSPYFKNSTGGTSVGWDSPPASPLQRQPSSPGPTPRNFSEAKHMSLKMAYVSKRCTPNDPEPRYLEICSADGQDTLFLRAKDEASARSWATAIQAQVNTLTPRVKDELQALLAATSTAGSQDIKQIGWLTEQLPSGGTAPTLALLTEKELLLYLSLPETREALSRPARTAPLIATRLVHSGPSKGSVPYDAELSFALRTGTRHGVDTHLFSVESPQELAAWTRQLVDGCHRAAEGVQEVSTGVLGGSGSVPLPARGMGVPAACLCTSTRASHCGRLSQVQPELCSCDSPSRSCRCLQMTVPVSFSWILEVLKARSSWTCTRVPKP

SEQ ID NO: 862041 - protein, 442 aa, Homo sapiens
MASGRRAPRTGLLELRAGAGSGAGGERWQRVLLSLAEDVLTVSPADGDPGPEPGAPREQEPAQLNGAAEPGAGPPQLPEALLLQRRRVTVRKADAGGLGISIKGGRENKMPILISKIFKGLAADQTEALFVGDAILSVNGEDLSSATHDEAVQVLKKTGKEVVLEVKYMKDVSPYFKNSTGGTSVGWDSPPASPLQRQPSSPGPTPRNFSEAKHMSLKMAYVSKRCTPNDPEPRYLEICSADGQDTLFLRAKDEASARSWATAIQAQVNTLTPRVKDELQALLAATSTAGSQDIKQIGWLTEQLPSGGTAPTLALLTEKELLLYLSLPETREALSRPARTAPLIATRLVHSGPSKGSVPYDAELSFALRTGTRHGVDTHLFSVESPQELAAWTRQLVDGCHRAAEGVQEVSTACTWNGRPCSLSVPSCAPATALREAADVFR

SEQ ID NO: 862042 - protein, 125 aa, Homo sapiens
MQSSLLPCARARVTVWTLTCSAWSHRRSWLPGPASLWMAVTGPPRVCRRCLQPARGMGVPAACLCTSTRASHCGRLSQVQPELCSCDSPSRSCRCLQMTVPVSFSWILEVLKARSSWTCTRVPKP

SEQ ID NO: 862043 - protein, 168 aa, Homo sapiens [sequence omitted]

SEQ ID NO: 862044 - protein, 505 aa, Homo sapiens; identical to SEQ ID NO: 862037

SEQ ID NO: 862045 - protein, 300 aa, Homo sapiens
TKTTTPQTKLLKLSARSRPRCYSAEAEPRYLEICSADGQDTLFLRAKDEASARSWATAIQAQVNTLTPRVKDELQALLAATSTAGSQDIKQIGWLTEQLPSGGTAPTLALLTEKELLLYLSLPETREALSRPARTAPLIATRLVHSGPSKGSVPYDAELSFALRTGTRHGVDTHLFSVESPQELAAWTRQLVDGCHRAAEGVQEVSTACTWNGRPCSLSVHIDKGFTLWAAEPGAARAVLLRQPFEKLQMSSDDGASLLFLDFGGAEGEIQLDLHSCPKTIVFIIHSFLSAKVTRLGLLA

SEQ ID NO: 862046 - protein, 476 aa, Homo sapiens
MASGRRAPRTGLLELRAGAGSGAGGERWQRVLLSLAEDVLTVSPADGDPGPEPGAPREQEPAQLNGAAEPGAGPPQLPEALLLQRRRVTVRKADAGGLGISIKGGRENKMPILISKIFKGLAADQTEALFVGDAILSVNGEDLSSATHDEAVQVLKKTGKEVVLEVKYMKDVSPYFKNSTGGTSVGWDSPPASPLQRQPSSPGPTPRNFSEAKHMSLKMAYVSKRCTPNDPEPRYLEICSADGQDTLFLRAKDEASARSWATAIQAQVNTLTPRVKDELQALLAATSTAGSQDIKQIGWLTEQLPSGGTAPTLALLTEKELLLYLSLPETREALSRPARTAPLIATRYPQAGAVCLPQNLPGDAPAGPQKLGTPALSTLSYSPACTWNGRPCSLSVHIDKGFTLWAAEPGAARAVLLRQPFEKLQMSSDDGASLLFLDFGGAEGEIQLDLHSCPKTIVFIIHSFLSAKVTRLGLLA

SEQ ID NO: 862047 - protein, 505 aa, Homo sapiens; identical to SEQ ID NO: 862037

SEQ ID NO: 862048 - protein, 505 aa, Homo sapiens; identical to SEQ ID NO: 862037

SEQ ID NO: 862049 - protein, 100 aa, Homo sapiens
PMAELSLRSTAAALYGVLFEKSKEAAFANHRLWEALGFVIAFGYSTFLCVHVKLYILLGVLSLTMVAYGLVECVESKNPIRPHAPGQANQAEDEEIQTKM

SEQ ID NO: 862050 - protein, 81 aa, Homo sapiens
  misc_feature (76)..(76): Xaa can be any naturally occurring amino acid
  misc_feature (79)..(80): Xaa can be any naturally occurring amino acid
MANENHGSPREEASLLSHSPGTSNQSQPCSPKPIRLVQDLPEELVHAGWEKCWSGERHMGWGILRVEVHATASAGXSQXXI

SEQ ID NO: 862051 - protein, 704 aa, Homo sapiens
MANENHGSPREEASLLSHSPGTSNQSQPCSPKPIRLVQDLPEELVHAGWEKCWSRRENRPYYFNRFTNQSLWEMPVLGQHDVISDPLGLNATPLPQDSSLVETPPAENKPRKRQLSEEQPSGNGVKKPKIEIPVTPTGQSVPSSPSIPGTPTLKMWGTSPEDKQQAALLRPTEVYWDLDIQTNAVIKHRGPSEVLPPHPEVELLRSQLILKLRQHYRELCQQREGIEPPRESFNRWMLERKVVDKGSDPLLPSNCEPVVSPSMFREIMNDIPIRLSRIKFREEAKRLLFKYAEAARRLIESRSASPDSRKVVKWNVEDTFSWLRKDHSASKEDYMDRLEHLRRQCGPHVSAAAKDSVEGICSKIYHISLEYVKRIREKHLAILKENNISEEVEAPEVEPRLVYCYPVRLAVSAPPMPSVEMHMENNVVCIRYKGEMVKVSRNYFSKLWLLYRYSCIDDSAFERFLPRVWCLLRRYQMMFGVGLYEGTGLQGSLPVHVFEALHRLFGVSFECFASPLNCYFRQYCSAFPDTDGYFGSRGPCLDFAPLSGSFEANPPFCEELMDAMVSHFERLLESSPEPLSFIVFIPEWREPPTPALTRMEQSRFKRHQLILPAFEHEYRSGSQHICKKEEMHYKAVHNTAVLFLQNDPGFAKWAPTPERLQELSAAYRQSGRSHSSGSSSSSSSEAKDRDSGREQGPSREPHPT

SEQ ID NO: 862052 - protein, 704 aa, Homo sapiens; identical to SEQ ID NO: 862051

SEQ ID NO: 862053 - protein, 704 aa, Homo sapiens; identical to SEQ ID NO: 862051

SEQ ID NO: 862054 - protein, 152 aa, Homo sapiens
ASEFIPSSVHPQAYKAVSPSSAPQGTAGTDGKKGRGPKASWVRGASRPCHTQDGGAAAARSLRGGTSACAARSPGPGHKMAAAALGRARRRRQNGRSSRTCSRVPSSPLRAGKSPRKPWSRSEPRQGLGIRSWGAAAPPALSARDCRLPCLC

SEQ ID NO: 862055 - protein, 704 aa, Homo sapiens; identical to SEQ ID NO: 862051

SEQ ID NO: 862056 - protein, 732 aa, Homo sapiens
MANENHGSPREEASLLSHSPGTSNQSQPCSPKPIRLVQDLPEELVHAGWEKCWSRRENRPYYFNRFTNQSLWEMPVLGQHDVISDPLGLNATPLPQDSSLVETPPAENKPRKRQLSEEQPSGNGVKKPKIEIPVTPTGQSVPSSPSIPGTPTLKMWGTSPEDKQQAALLRPTEVYWDLDIQTNAVIKHRGPSEVLPPHPEVELLRSQLILKLRQHYRELCQQREGIEPPRESFNRWMLERKVVDKGSDPLLPSNCEPVVSPSMFREIMNDIPIRLSRIKFREEAKRLLFKYAEAARRLIESRSASPDSRKVVKWNVEDTFSWLRKDHSASKEDYMDRLEHLRRQCGPHVSAAAKDSVEGICSKIYHISLEYVKRIREKHLAILKENNISEEVEAPEVEPRLVYCYPVRLAVSAPPMPSVEMHMENNVVCIRYKGEMVKVSRNYFSKLWLLYRYSCIDDSAFERFLPRVWCLLRRYQMMFGVGLYEGTGLQGSLPVHVFEALHRLFGVSFECFASPLNCYFRQYCSAFPDTDGYFGSRGPCLDFAPLSGSFEANPPFCEELMDAMVSHFERLLESSPEPLSFIVFIPEWREPPTPALTRMEQSRFKRHQLILPAFEHEYRSGSQHICKKWVPGRAGEGGWAGQARPSPTLAIAFARREEMHYKAVHNTAVLFLQNDPGFAKWAPTPERLQELSAAYRQSGRSHSSGSSSSSSSEAKDRDSGREQGPSREPHPT

SEQ ID NO: 862057 - protein, 704 aa, Homo sapiens; identical to SEQ ID NO: 862051

SEQ ID NO: 862058 - protein, 270 aa, Homo sapiens
ALLKAPPLCPAPQWLLYRYSCIDDSAFERFLPRVWCLLRRYQMMFGVGLYEGTGLQGSLPVHVFEALHRLFGVSFECFASPLNCYFRQYCSAFPDTDGYFGSRGPCLDFAPLSGSFEANPPFCEELMDAMVSHFERLLESSPEPLSFIVFIPEWREPPTPALTRMEQSRFKRHQLILPAFEHEYRSGSQHICKKEEMHYKAVHNTAVLFLQNDPGFAKWAPTPERLQELSAAYRQSGRSHSSGSSSSSSSEAKDRDSGREQGPSREPHPT

SEQ ID NO: 862059 - protein, 131 aa, Homo sapiens
MRCQPPPCCHTQLWLFHLHCCLESQHLRTHSADIDWFLLDTLFAALVIYNFLSLCYEYLGGESSIMSEIRGKPIESSCMYGTCCLWGKTYSIGFLRFCKQATLQFCVVKPLMAVSTVVLQAFGKYRDGDFE

SEQ ID NO: 862060 - protein, 204 aa, Homo sapiens
MRAAAALHWARDAPAAAETPGLRRRPPRPQSPAAAHRPQTPPPPWAPEVSRLAGLAREPQGGAATPERGGLLVSERPARGTPGFGRRLPGGEGTTEAGAAAEGGGIRLPTRASSPPREVARGCARSLSTPTWRGQLLECNRTCPGGGPGRGRRMDQGALQEGLCAPGWVCWRLARPSEWGRRPCPVRVAVTWEGGRRGAFGAAS

SEQ ID NO: 862061 - protein, 419 aa, Homo sapiens
MRAAAALHWARDAPAAAETPGLRRRPPRPQSPAAAHRPQTPPPPWAPEASLSLSAKVSLREPPAARHHDSEGGCAGPGSSVAHDRSSLAQRLRDPRGQPHCHGAACVPDDNCRSGHLWLLRVDGPAHHMPPALVIYNFLSLCYEYLGGESSIMSEIRGKPIESSCMYGTCCLWGKTYSIGFLRFCKQATLQFCVVKPLMAVSTVVLQAFGKYRDGDFDVTSGYLYVTIIYNISVSLALYALFLFYFATRELLSPYSPVLKFFMVKSVIFLSFWQGMLLAILEKCGAIPKIHSARVSVGEGTVAAGYQDFIICVEMFFAALALRHAFTYKVYADKRLDAQGRCAPMKSISSSLKETMNPHDIVQDAIHNFSPAYQQYTQQSTLEPGPTWRGGAHGLSRSHSLSGARDNEKTLLLSSDDEF

SEQ ID NO: 862062 - protein, 217 aa, Homo sapiens
PCLADALFNFHLNLDPALFYSKSSWVASVICPLCFLLISFRTLDAHPALRSARCPVLKFFMVKSVIFLSFWQGMLLAILEKCGAIPKIHSARVSVGEGTVAAGYQDFIICVEMFFAALALRHAFTYKVYADKRLDAQGRCAPMKSISSSLKETMNPHDIVQDAIHNFSPAYQQYTQQSTLEPGPTWRGGAHGLSRSHSLSGARDNEKTLLLSSDDEF

SEQ ID NO: 862063 - protein, 407 aa, Homo sapiens
MTVRGDVLAPDPASPTTAAASPSVSVIPEGSPTAMEQPVFLMTTAAQAISGFFVWTALLITCHQIYMHLRCYSCPNEQRYIVRILFIVPIYAFDSWLSLLFFTNDQYYVYFGTVRDCYEALVIYNFLSLCYEYLGGESSIMSEIRGKPIESSCMYGTCCLWGKTYSIGFLRFCKQATLQFCVVKPLMAVSTVVLQAFGKYRDGDFDVTSGYLYVTIIYNISVSLALYALFLFYFATRELLSPYSPVLKFFMVKSVIFLSFWQGMLLAILEKCGAIPKIHSARVSVGEGTVAAGYQDFIICVEMFFAALALRHAFTYKVYADKRLDAQGRCAPMKSISSSLKETMNPHDIVQDAIHNFSPAYQQYTQQSTLEPGPTWRGGAHGLSRSHSLSGARDNEKTLLLSSDDEF

SEQ ID NO: 862064 - protein, 407 aa, Homo sapiens; identical to SEQ ID NO: 862063

SEQ ID NO: 862065 - protein, 55 aa, Homo sapiens
ELLSPYSPVLKFFMVKSVIFLSFWQGEPPPSTWRLPMPPCPLRFLLPLLLMVPGA

SEQ ID NO: 862066 - protein, 407 aa, Homo sapiens; identical to SEQ ID NO: 862063

SEQ ID NO: 862067 - protein, 149 aa, Homo sapiens
MSVTVRDLLSEALVIYNFLSLCYEYLGGESSIMSEIRGKPIESSCMYGTCCLWGKTYSIGFLRFCKQATLQFCVVKPLMAVSTVVLQAFGKYRDGDFDVTSGYLYVTIIYNISYLGQARWLTPVIPALWEAEAGGSPEDRSSRPPWPTW

SEQ ID NO: 862068 - protein, 376 aa, Homo sapiens
PGLGWAKCDVMRAGTRHPGAAGLRTVVEQLLAFIYMHLRCYSCPNEQRYIVRILFIVPIYAFDSWLSLLFFTNDQYYVYFGTVRDCYEALVIYNFLSLCYEYLGGESSIMSEIRGKPIESSCMYGTCCLWGKTYSIGFLRFCKQATLQFCVVKPLMAVSTVVLQAFGKYRDGDFDVTSGYLYVTIIYNISVSLALYALFLFYFATRELLSPYSPVLKFFMVKSVIFLSFWQGMLLAILEKCGAIPKIHSARVSVGEGTVAAGYQDFIICVEMFFAALALRHAFTYKVYADKRLDAQGRCAPMKSISSSLKETMNPHDIVQDAIHNFSPAYQQYTQQSTLEPGPTWRGGAHGLSRSHSLSGARDNEKTLLLSSDDEF

SEQ ID NO: 862069 - protein, 426 aa, Homo sapiens
MTVRGDVLAPDPASPTTAAASPSVSVIPEGSPTAMEQPVFLMTTAAQAISGFFVWTALLITCHQIYMHLRCYSCPNEQRYIVRILFIVPIYAFDSWLSLLFFTNDQYYVYFGTVRDCYEALVIYNFLSLCYEYLGGESSIMSEIRGKPIESSCMYGTCCLWGKTYSIGFLRFCKQATLQFCVVKPLMAVSTVVLQAFGKYRDGDFDVTSGYLYVTIIYNISVSLALYALFLFYFATRELLSPYSPVLKFFMVKSVIFLSFWQGMLLAILEKCGAIPKIHSARVSVGEGTVAAGYQDFIICVEMFFAALALRHAFTYKVYADKRLDAQVPTYGPYASSPAPPAPCPAGRCAPMKSISSSLKETMNPHDIVQDAIHNFSPAYQQYTQQSTLEPGPTWRGGAHGLSRSHSLSGARDNEKTLLLSSDDEF

SEQ ID NO: 862070 - protein, 407 aa, Homo sapiens; identical to SEQ ID NO: 862063

SEQ ID NO: 862071 - protein, 206 aa, Homo sapiens
MTVRGDVLAPDPASPTTAAASPSVSVIPEGSPTAMEQPVFLMTTAAQAISGFFVWTALLITCHQIYMHLRCYSCPNEQRYIVRILFIVPIYAFDSWLSLLFFTNDQYYVYFGTVRDCYEALVIYNFLSLCYEYLGGESSIMSEIRGKPIESSCMYGTCCLWGKTYSIGFLRFCKQATLQFCVVKPLMAVSTVVLQAFGKYRDGDFE

SEQ ID NO: 862072 - protein, 318 aa, Homo sapiens
MAGLKRRASQVWPEEHGEQEHGLYSLHRMFDIVGTHLTHRDVRVLSFLFVDVIDDHERGLIRNGRDFLLALERQGRCDESNFRQVLQLLRIITRHDLLPYVTLKRRRAVCPDLVDKYLEETSIRYVTPRALSDPEPRPPQPSKTVPPHYPVVCCPTSGPQMCSKRPARGRATLGSQRKRRKSVTPDPKEKQTCDIRLRVRAEYCQHETALQGNVFSNKQDPLERQFERFNQANTILKSRDLGSIICDIKFSELTYLDAFWRDYINGSLLEALKGVFITDSLKQAVGHEAIKLLVNVDEEDYELGRQKLLRNLMLQALP

SEQ ID NO: 862073 - protein, 318 aa, Homo sapiens; identical to SEQ ID NO: 862072

SEQ ID NO: 862074 - protein, 318 aa, Homo sapiens; identical to SEQ ID NO: 862072

SEQ ID NO: 862075 - protein, 318 aa, Homo sapiens; identical to SEQ ID NO: 862072

SEQ ID NO: 862076 - protein, 318 aa, Homo sapiens; identical to SEQ ID NO: 862072

SEQ ID NO: 862077 - protein, 318 aa, Homo sapiens; identical to SEQ ID NO: 862072

SEQ ID NO: 862078 - protein, 303 aa, Homo sapiens
MAGLKRRASQVWPEEHGEQEHGLYSLHRMFDIVGTHLTHRDVRVLSFLFVDVIDDHERGLIRNGRDFLLALERQGRCDESNFRQVLQLLRIITRHDLLPYVTLKRRRAVCPDLVDKYLEETSIRYVTPRALSDPEPRPPQPSKTVPPHYPVVCCPTSGPQMCSKRPARGRATLGSQRKHIRLRVRAEYCQHETALQGNVFSNKQDPLERQFERFNQANTILKSRDLGSIICDIKFSELTYLDAFWRDYINGSLLEALKGVFITDSLKQAVGHEAIKLLVNVDEEDYELGRQKLLRNLMLQALP

SEQ ID NO: 862079 - protein, 158 aa, Homo sapiens
MCSKRPARGRATLGSQRKRRKSVTPDPKEKQTCDIRLRVRAEYCQHETALQGNVFSNKQDPLERQFERFNQANTILKSRDLGSIICDIKFSELTYLDAFWRDYINGSLLEALKGVFITDSLKQAVGHEAIKLLVNVDEEDYELGRQKLLRNLMLQALP

SEQ ID NO: 862080 - protein, 114 aa, Homo sapiens
MAGLKRRASQVWPEEHGEQEHGLYSLHRMFDIVGTHLTHRDVRVLSFLFVDVIDDHERGLIRNGRDFLLALERQGRCDESNFRQVLQLLRIITRHDLLPYVTLKRRRAARCILA

SEQ ID NO: 862081 - protein, 114 aa, Homo sapiens; identical to SEQ ID NO: 862080

SEQ ID NO: 862082 - protein, 318 aa, Homo sapiens; identical to SEQ ID NO: 862072

SEQ ID NO: 862083 - protein, 318 aa, Homo sapiens; identical to SEQ ID NO: 862072

SEQ ID NO: 862084 - protein, 318 aa, Homo sapiens; identical to SEQ ID NO: 862072

SEQ ID NO: 862085 - protein, 318 aa, Homo sapiens; identical to SEQ ID NO: 862072

SEQ ID NO: 862086 - protein, 318 aa, Homo sapiens; identical to SEQ ID NO: 862072

SEQ ID NO: 862087 - protein, 348 aa, Homo sapiens
MAGLKRRASQVWPEEHGEQEHGLYSLHRMFDIVGTHLTHRDVRVLSFLFVDVIDDHERGLIRNGRDFLLALERQGRCDESNFRQVLQLLRIITRHDLLPYVTLKRRRAVCPDLVDKYLEETSIRYVTPRALSDPEPRPPQPSKTVPPHYPVVCCPTSGPQMCSKRPARGRATLGSQRKRRKSVTPDPKEKQTCGEEVQGFQRWSRLEGEYKELLGHWAVYAIQYIRLRVRAEYCQHETALQGNVFSNKQDPLERQFERFNQANTILKSRDLGSIICDIKFSELTYLDAFWRDYINGSLLEALKGVFITDSLKQAVGHEAIKLLVNVDEEDYELGRQKLLRNLMLQALP

SEQ ID NO: 862088 - protein, 158 aa, Homo sapiens; identical to SEQ ID NO: 862079

SEQ ID NO: 862089 - protein, 233 aa, Homo sapiens
MAGLKRRASQVWPEEHGEQEHGLYSLHRMFDIVGTHLTHRDVRVLSFLFVDVIDDHERGLIRNGRDFLLALERQGRCDESNFRQVLQLLRIITRHDLLPYVTLKRRRAVCPDLVDKYLEETSIRYVTPRALSDPEPRPPQPSKTVPPHYPVVCCPTSGPQMCSKRPARGRATLGSQRKRRKSVTPDPKEKQTCGEEVQGFQRWSRLEGEYKELLGHWAVYAIQCGHPIVVVLR

SEQ ID NO: 862090 - protein, 94 aa, Homo sapiens
FLVGLQSEPIVVSILVVLHIPDKGLIFLLQSLHPQLTISGSGVSLQHRDLRHNTSRGFIRHLGPGRKRNAEVVLPVAYLKAPSSLLWEDETLGC

SEQ ID NO: 862091 - protein, 452 aa, Homo sapiens
MAELQMLLEEEIPSGKRALIESYQNLTRVADYCENNYIQATDKRKALEETKAYTTQSLASVAYQINALANNVLQLLDIQASQLRRMESSINHISQTVDIHKEKVARREIGILTTNKNTSRTHKIIAPANMERPVRYIRKPIDYTVLDDVGHGVKWLKAKHGNNQPARTGTLSRTNPPTQKPPSPPMSGRGTLGRNTPYKTLEPVKPPTVPNDYMTSPARLGSQHSPGRTASLNQRPRTHSGSSGGSGSRENSGSSSIGIPIAVPTPSPPTIGPAAPGSAPGSQYGTMTRQISRHNSTTSSTSSGGYRRTPSVTAQFSAQPHVNGGPLYSQNSIADSPTPPPPPPPDDIPMFDDSPPPPPPPPVDYEDEEAAVVQYNDPYADGDPAWAPKNYIEKVVAIYDYTKDKDDELSFMEGAIIYVIKKNDDGWYEGVCNRVTGLFPGNYVESIMHYTD

SEQ ID NO: 862092 - protein, 452 aa, Homo sapiens; identical to SEQ ID NO: 862091

SEQ ID NO: 862093 - protein, 452 aa, Homo sapiens; identical to SEQ ID NO: 862091

SEQ ID NO: 862094 - protein, 508 aa, Homo sapiens
MAELQMLLEEEIPSGKRALIESYQNLTRVADYCENNYIQATDKRKALEETKAYTTQSLASVAYQINALANNVLQLLDIQASQLRRMESSINHISQTVDIHKEKVARREIGILTTNKNTSRTHKIIAPANMERPVRYIRKPIDYTVLDDVGHGVKWLKAKHGNNQPARTGTLSRTNPPTQKPPSPPMSGRGTLGRNTPYKTLEPVKPPTVPNDYMTSPARLGSQHSPGRTASLNQRPRTHSGSSGGSGSRENSGSSSIGIPIAVPTPSPPTIGPENISVPPPSGAPPAPPLAPLLPVSTVIAAPGSAPGSQYGTMTRQISRHNSTTSSTSSGGYRRTPSVTAQFSAQPHVNGGPLYSQNSISIAPPPPPMPQLTPQIPLTGFVARVQENIADSPTPPPPPPPDDIPMFDDSPPPPPPPPVDYEDEEAAVVQYNDPYADGDPAWAPKNYIEKVVAIYDYTKDKDDELSFMEGAIIYVIKKNDDGWYEGVCNRVTGLFPGNYVESIMHYTD

SEQ ID NO: 862095 - protein, 481 aa, Homo sapiens
MAELQMLLEEEIPSGKRALIESYQNLTRVADYCENNYIQATDKRKALEETKAYTTQSLASVAYQINALANNVLQLLDIQASQLRRMESSINHISQTVDIHKEKVARREIGILTTNKNTSRTHKIIAPANMERPVRYIRKPIDYTVLDDVGHGVKWLKAKHGNNQPARTGTLSRTNPPTQKPPSPPMSGRGTLGRNTPYKTLEPVKPPTVPNDYMTSPARLGSQHSPGRTASLNQRPRTHSGSSGGSGSRENSGSSSIGIPIAVPTPSPPTIGPAAPGSAPGSQYGTMTRQISRHNSTTSSTSSGGYRRTPSVTAQFSAQPHVNGGPLYSQNSISIAPPPPPMPQLTPQIPLTGFVARVQENIADSPTPPPPPPPDDIPMFDDSPPPPPPPPVDYEDEEAAVVQYNDPYADGDPAWAPKNYIEKVVAIYDYTKDKDDELSFMEGAIIYVIKKNDDGWYEGVCNRVTGLFPGNYVESIMHYTD

SEQ ID NO: 862096 - protein, 459 aa, Homo sapiens
MAELQMLLEEEIPSGKRALIESYQNLTRVADYCENNYIQATDKRKALEETKAYTTQSLASVAYQINALANNVLQLLDIQASQLRRMESSINHISQTVDIHKEKVARREIGILTTNKNTSRTHKIIAPANMERPVRYIRKPIDYTVLDDVGHGVKWLKAKHGNNQPARTGTLSRTNPPTQKPPSPPMSGRGTLGRNTPYKTLEPVKPPTVPNDYMTSPARLGSQHSPGRTASLNQRPRTHSGSSGGSGSRENTAPGSAPGSQYGTMTRQISRHNSTTSSTSSGGYRRTPSVTAQFSAQPHVNGGPLYSQNSISIAPPPPPMPQLTPQIPLTGFVARVQENIADSPTPPPPPPPDDIPMFDDSPPPPPPPPVDYEDEEAAVVQYNDPYADGDPAWAPKNYIEKVVAIYDYTKDKDDELSFMEGAIIYVIKKNDDGWYEGVCNRVTGLFPGNYVESIMHYTD

SEQ ID NO: 862097 - protein, 393 aa, Homo sapiens
MAELQMLLEEEIPSGKRALIESYQNLTRVADYCENNYIQATDKRKALEETKAYTTQSLASVAYQINALANNVLQLLDIQASQLRRMESSINHISQTVDIHKEKVARREIGILTTNKNTSRTHKIIAPANMERPVRYIRKPIDYTVLDDVGHGVKWLKAKHGNNQPARTGTLSRTNPPTQKPPSPPMSGRGTLGRNTPYKTLEPVKPPTVPNDYMTSPARLGSQHSPGRTASLNQRPRTHSGSSGGSGSRENSGSSSIGIPIAVPTPSPPTIGPVADSPTPPPPPPPDDIPMFDDSPPPPPPPPVDYEDEEAAVVQYNDPYADGDPAWAPKNYIEKVVAIYDYTKDKDDELSFMEGAIIYVIKKNDDGWYEGVCNRVTGLFPGNYVESIMHYTD

SEQ ID NO: 862098 - protein, 288 aa, Homo sapiens
MAELQMLLEEEIPSGKRALIESYQNLTRVADYCENNYIQATDKRKALEETKAYTTQSLASVAYQINALANNVLQLLDIQASQLRRMESSINHISQTVDIHKEKVARREIGILTTNKNTSRTHKIIAPANMERPVRYIRKPIDYTVLDDVGHGVKWLKAKHGNNQPARTGTLSRTNPPTQKPPSPPMSGRGTLGRNTPYKTLEPVKPPTVPNDYMTSPARLGSQHSPGRTASLNQRPRTHSSPGLSSWFPVWHNDQADISTQLYYFFDIFWWIQTNSLCDCSIFCSASC

SEQ ID NO: 862099 - protein, 481 aa, Homo sapiens; identical to SEQ ID NO: 862095

SEQ ID NO: 862100 - protein, 103 aa, Homo sapiens
MFDDSPPPPPPPPVDYEDEEAAVVQYNDPYADGDPAWAPKNYIEKVVAIYDYTKDKDDELSFMEGAIIYVIKKNDDGWYEGVCNRVTGLFPGNYVESIMHYTD

SEQ ID NO: 862101 - protein, 395 aa, Homo sapiens
MAELQMLLEEEIPSGKRALIESYQNLTRVADYCENNYIQATDKRKALEETKAYTTQSLASVAYQINALANNVLQLLDIQASQLRRMESSINHISQTVDIHKEKVARREIGILTTNKNTSRTHKIIAPANMERPVRYIRKPIDYTVLDDVGHGVKWLKAKHGNNQPARTGTLSRTNPPTQKPPSPPMSGRGTLGRNTPYKTLEPVKPPTVPNDYMTSPARLGSQHSPGRTASLNQRPRTHSGSSGGSGSRENSGSSSIGIPIAVPTPSPPTIGPAAPGSAPGSQYGTMTRQISRHNSTTSSTSSGGYRRTPSVTAQFSAQPHVNGGPLYSQNSISIAPPPPPMPQLTPQIPLTGFVARVQENSKFGKTELWKSRGCLLIACMADDESSFSLLLLRS

SEQ ID NO: 862102 - protein, 176 aa, Homo sapiens
MAELQMLLEEEIPSGKRALIESYQNLTRVADYCENNYIQATDKRKALEETKAYTTQSLASVAYQINALANNVLQLLDIQASQLRRMESSINHISQTVDIHKEKVARREIGILTTNKNTSRTHKIIAPANMERPVRYIRKPIDYTVLDDVGHGVKWLKASILYYINKLICISSKYFG

SEQ ID NO: 862103 - protein, 508 aa, Homo sapiens; identical to SEQ ID NO: 862094

SEQ ID NO: 862104 - protein, 481 aa, Homo sapiens; identical to SEQ ID NO: 862095

SEQ ID NO: 862105 - protein, 452 aa, Homo sapiens; identical to SEQ ID NO: 862091

SEQ ID NO: 862106 - protein, 422 aa, Homo sapiens
MAELQMLLEEEIPSGKRALIESYQNLTRVADYCENNYIQATDKRKALEETKAYTTQSLASVAYQINALANNVLQLLDIQASQLRRMESSINHISQTVDIHKEKVARREIGILTTNKNTSRTHKIIAPANMERPVRYIRKPIDYTVLDDVGHGVKWLKAKHGNNQPARTGTLSRTNPPTQKPPSPPMSGRGTLGRNTPYKTLEPVKPPTVPNDYMTSPARLGSQHSPGRTASLNQRPRTHSGSSGGSGSRENSGSSSIGIPIAVPTPSPPTIGPVSIAPPPPPMPQLTPQIPLTGFVARVQENIADSPTPPPPPPPDDIPMFDDSPPPPPPPPVDYEDEEAAVVQYNDPYADGDPAWAPKNYIEKVVAIYDYTKDKDDELSFMEGAIIYVIKKNDDGWYEGVCNRVTGLFPGNYVESIMHYTD

SEQ ID NO: 862107 - protein, 481 aa, Homo sapiens; identical to SEQ ID NO: 862095

SEQ ID NO: 862108 - protein, 177 aa, Homo sapiens
VPSSFNCGLYPGCEVLGASADLAASVSLTREEAMQRGGKWQSPQIPLTGFVARVQENIADSPTPPPPPPPDDIPMFDDSPPPPPPPPVDYEDEEAAVVQYNDPYADGDPAWAPKNYIEKVVAIYDYTKDKDDELSFMEGAIIYVIKKNDDGWYEGVCNRVTGLFPGNYVESIMHYTD

SEQ ID NO: 862109 - protein, 352 aa, Homo sapiens
MAELQMLLEEEIPSGKRALIESYQNLTRVADYCENNYIQATDKRKALEETKAYTTQSLASVAYQINALANNVLQLLDIQASQLRRMESSINHISQTVDIHKEKVARREIGILTTNKNTSRTHKIIAPANMERPVRYIRKPIDYTVLDDVGHGVKWLKAKHGNNQPARTGTLSRTNPPTQKPPSPPMSGRGTLGRNTPYKTLEPVKPPTVPNDYMTSPARLGSQHSPGRTASLNQRPRTHSGSSGGSGSRENSGSSSIGIPIAVPTPSPPTIGPAAPGSAPGSQYGTMTRQISRHNSTTSSTSSGGYRRTPSVTAQFSAQPHVNGGPLYSQNSSKLVLCRHTATVELLLKEII

SEQ ID NO: 862110 - protein, 234 aa, Homo sapiens
MAELQMLLEEEIPSGKRALIESYQNLTRVADYCENNYIQATDKRKALEETKAYTTQSLASVAYQINALANNVLQLLDIQASQLRRMESSINHISQTVDIHKEKVARREIGILTTNKNTSRTHKIIAPANMERPVRYIRKPIDYTVLDDVGHGVKWLKAKHGNNQPARTGTLSRTNPPTQKPPSPPMSGRGTLGGYSYKTWNLETPKSSDYMTGCRVDVVSRGSSYRAALAPGRD

SEQ ID NO: 862111 - protein, 342 aa, Homo sapiens
MRKETPPPLVPPAAREWNLPPNAPACMERQLEAARYRSDGALLLGASSLSGRCWAGSLWLFKDPCAAPNEGFCSAGVQTEAGVADLTWVGERGILVASDSGAVELWELDENETLIVSKFCKYEHDDIVSTVSVLSSGTQAVSGSKDICIKVWDLAQQVVLSSYRAHAAQVTCVAASPHKDSVFLSCSEDNRILLWDTRCPKPASQIGCSAPGYLPTSLAWHPQQSEVFVFGDENGTVSLVDTKSTSCVLSSAVHSQCVTGLVFSPHSVPFLASLSEDCSLAVLDSSLSELFRSQAHRDFVRDATWSPLNHSLLTTVGWDHQVVHHVVPTEPLPAPGPASVTE

SEQ ID NO: 862112 - protein, 330 aa, Homo sapiens
MRKETPPPLVPPAAREWNLPPNAPACMERQLEAARYRSDGALLLGASSLSGRCWAGSLWLFKDPCAAPNEGFCSAGVQTEAGVADLTWVGERGILVASDSGAVELWELDENETLIVSKFCKYEHDDIVSTVSVLSSGTQAVSGSKDICIKVWDLAQQVVLSSYRAHAAQVTCVAASPHKDSVFLSCSEDNRILLWDTRCPKPASQIGCSAPGYLPTSLAWHPQQSEVFVFGDENGTVSLVDTKSTSCVLSSAVHSQCVTGLVFSPHSVPFLASLSEDCSLAVLDSSLSELFRSQAHRDFVRDATWSPLNHPLDLQVLLSRLDLRQKASPP

SEQ ID NO: 862113 - protein, 302 aa, Homo sapiens
MRKETPPPLVPPAAREWNLPPNAPACMERQLEAARYRSDGALLLGASSLSGRCWAGSLWLFKDPCAAPNEGFCSAGVQTEAGVADLTWVGERGILVASDSGAVELWELDENETLIVSKFCKYEHDDIVSTVSVLSSGTQAVSGSKDICIKVWDLAQQVVLSSYRAHAAQVTCVAASPHKDSVFLSCSEDNRILLWDTRCPKPASQIGCSAPGYLPTSLAWHPQQSEVFVFGDENGTVSLVDTKSTSCVLSSAVHSQCVTGLVFSPHSVPFLASLSEDCSLAVLDSSLSEFISSSMKIEDWIG

SEQ ID NO: 862114 - protein, 312 aa, Homo sapiens
MRKETPPPLVPPAAREWNLPPNAPACMERQLEAARYRSDGALLLGASSLSGRCWAGSLWLFKDPCAAPNEGFCSAGVQTEAGVADLTWVGERGILVASDSGAVELWELDENETLIVSKFCKYEHDDIVSTVSVLSSGTQAVSGSKDICIKVWDLAQQVVLSSYRAHAAQVTCVAASPHKDSVFLSCSEDNRILLWDTRCPKPASQIGCSAPGYLPTSLAWHPQQSEVFVFGDENGTVSLVDTKSTSCVLSSAVHSQCVTGLVFSPHRLDLSQPSPPSDSVFPSWPLSVKTAHLLCWTQAFLSCLEAKPTETL

SEQ ID NO: 862115 - protein, 342 aa, Homo sapiens; identical to SEQ ID NO: 862111

SEQ ID NO: 862116 - protein, 342 aa, Homo sapiens; identical to SEQ ID NO: 862111

SEQ ID NO: 862117 - protein, 342 aa, Homo sapiens; identical to SEQ ID NO: 862111

SEQ ID NO: 862118 - protein, 340 aa, Homo sapiens
MRKETPLGRIREQACVSRDRNSQWAWSDRAALYTFLDGALLLGASSLSGRCWAGSLWLFKDPCAAPNEGFCSAGVQTEAGVADLTWVGERGILVASDSGAVELWELDENETLIVSKFCKYEHDDIVSTVSVLSSGTQAVSGSKDICIKVWDLAQQVVLSSYRAHAAQVTCVAASPHKDSVFLSCSEDNRILLWDTRCPKPASQIGCSAPGYLPTSLAWHPQQSEVFVFGDENGTVSLVDTKSTSCVLSSAVHSQCVTGLVFSPHSVPFLASLSEDCSLAVLDSSLSELFRSQAHRDFVRDATWSPLNHSLLTTVGWDHQVVHHVVPTEPLPAPGPASVTE

SEQ ID NO: 862119 - protein, 321 aa, Homo sapiens
MEVPQGACVVTGEVGAADGALLLGASSLSGRCWAGSLWLFKDPCAAPNEGFCSAGVQTEAGVADLTWVGERGILVASDSGAVELWELDENETLIVSKFCKYEHDDIVSTVSVLSSGTQAVSGSKDICIKVWDLAQQVVLSSYRAHAAQVTCVAASPHKDSVFLSCSEDNRILLWDTRCPKPASQIGCSAPGYLPTSLAWHPQQSEVFVFGDENGTVSLVDTKSTSCVLSSAVHSQCVTGLVFSPHSVPFLASLSEDCSLAVLDSSLSELFRSQAHRDFVRDATWSPLNHSLLTTVGWDHQVVHHVVPTEPLPAPGPASVTE

SEQ ID NO: 862120 - protein, 261 aa, Homo sapiens
  misc_feature (1)..(1): Xaa can be any naturally occurring amino acid
XESTHNAQYMSIFKKAFPPCDYRNPESSLPQAEETMPINGTEHDDIVSTVSVLSSGTQAVSGSKDICIKVWDLAQQVVLSSYRAHAAQVTCVAASPHKDSVFLSCSEDNRILLWDTRCPKPASQIGCSAPGYLPTSLAWHPQQSEVFVFGDENGTVSLVDTKSTSCVLSSAVHSQCVTGLVFSPHSVPFLASLSEDCSLAVLDSSLSELFRSQAHRDFVRDATWSPLNHSLLTTVGWDHQVVHHVVPTEPLPAPGPASVTE

SEQ ID NO: 862121 - protein, 342 aa, Homo sapiens; identical to SEQ ID NO: 862111

SEQ ID NO: 862122 - protein, 302 aa, Homo sapiens; identical to SEQ ID NO: 862113

SEQ ID NO: 862123 - protein, 275 aa, Homo sapiens
MRKETPPPLVPPAAREWNLPPNAPACMERQLEAARYRSDGALLLGASSLSGRCWAGSLWLFKDPCAAPNEGFCSAGVQTEAGVADLTWVGERGILVASDSGAVELWELDENETLIVSKFCKYEHDDIVSTVSVLSSGTQAVSGSKDICIKVWDLAQQVVLSSYRAHAAQVTCVAASPHKDSVFLSCSEDNRILLWDTRCPKPASQIGCSAPGYLPTSLAWHPQQSEVFVFGDENGTVSLVDTKSTSCVLSSAVHSQCVTGLVFSPHRYCSLSSGA

SEQ ID NO: 862124 - protein, 269 aa, Homo sapiens
MRKETPPPLVPPAAREWNLPPNAPACMERQLEAARYRSDGALLLGASSLSGRCWAGSLWLFKDPCAAPNEGFCSAGVQTEAGVADLTWVGERGILVASDSGAVELWELDENETLIVSKFCKYEHDDIVSTVSVLSSGTQAVSGSKDICIKLRTLLSRVVLEFIPRLHAGPGPFVFAALLQRAPGSFSWRGNRIKLGNPCPSAVRLGAGRGSLNTGGAPQESLFWAKERHSWANTVWRKTTVSSPTATRSHLLCIFLIISSCLSHDPLLE

SEQ ID NO: 862125 - protein, 110 aa, Homo sapiens
MPGRGWPAGTQAEARGGTPQNGLAHKEEGEGVRASRPGDWNTPGRWELNWTTRQPLGPQRGSGGPDHRARRTESGWTTRGESAPTAERRTLAPITCGAAPRQPANMTQGH

SEQ ID NO: 862126 - protein, 302 aa, Homo sapiens; identical to SEQ ID NO: 862113

SEQ ID NO: 862127 - protein, 342 aa, Homo sapiens; identical to SEQ ID NO: 862111

SEQ ID NO: 862128 - protein, 342 aa, Homo sapiens; identical to SEQ ID NO: 862111

SEQ ID NO: 862129 - protein, 342 aa, Homo sapiens; identical to SEQ ID NO: 862111

SEQ ID NO: 862130 - protein, 342 aa, Homo sapiens; identical to SEQ ID NO: 862111

SEQ ID NO: 862131 - protein, 196 aa, Homo sapiens
MRKETPPPLVPPAAREWNLPPNAPACMERQLEAARYRSDGALLLGASSLSGRCWAGSLWLFKDPCAAPNEGFCSAGVQTEAGVADLTWVGERGILVASDSGAVELWELDENETLIVSKFCKYEHDDIVSTVSVLSSGTQAVSGSKDICIKVWDLAQQVVLSSYRAHAAQVTCVAASPHKDSVFLSCSECSLPGLSQ

SEQ ID NO: 862132 - protein, 285 aa, Homo sapiens
VIQAHRGQSLQQLQHNTISLRWLGGLLEEERQRKSEDKPCCAHKGGAGLLANLVHPCLEGGGWGLQFQDQCLPEVIVGVLIYNVRSSKDICIKVWDLAQQVVLSSYRAHAAQVTCVAASPHKDSVFLSCSEDNRILLWDTRCPKPASQIGCSAPGYLPTSLAWHPQQSEVFVFGDENGTVSLVDTKSTSCVLSSAVHSQCVTGLVFSPHSVPFLASLSEDCSLAVLDSSLSELFRSQAHRDFVRDATWSPLNHSLLTTVGWDHQVVHHVVPTEPLPAPGPASVTE

SEQ ID NO: 862133 - protein, 68 aa, Homo sapiens
LGIREGEQWVGESFSSSENCVVLLENRFSICIRRDLVMEAGWLLTLSIPGAHSQPQGQAVSLVEGGGR

SEQ ID NO: 862134 - protein, 222 aa, Homo sapiens
  misc_feature (191)..(192): Xaa can be any naturally occurring amino acid
  misc_feature (214)..(214): Xaa can be any naturally occurring amino acid
MRKETPPPLVPPAAREWNLPPNAPACMERQLEAARYRSDGALLLGASSLSGRCWAGSLWLFKDPCAAPNEGFCSAGVQTEAGVADLTWVGERGILVASDSGAVELWELDENETLIVSKFCKYEHDDIVSTVSVLSSGTQAVSGSKDICIKVWDLAQQVVLSSYRAHAAQVTCVAASPHKDSVFLSCSERKXXILLWGIPPLFPSPSSTELGWQXRPGLTFPN

SEQ ID NO: 862135 - protein, 864 aa, Homo sapiens
MKMKTFVIIHFHLIQLGLQELFPQGHSCAVCGKVKCKRHRPSLLLENYQPWLDLKISSKVDASLSEVLELVLENFVYPWYRDVTDDESFVDELRITLRFFASVLIRRIHKVDIPSIITKKLLKAAMKHIEVIVKARQKVKNTEFLQQAALEEYGPELHVALRSRRDELHYLRKLTELLFPYILPPKATDCRSLTLLIREILSGSVFLPSLDFLADPDTVNHLLIIFIDDSPPEKATEPASPLVPFLQKFAEPRNKKPSVLKLELKQIREQQDLLFRFMNFLKQEGAVHVLQFCLTVEEFNDRILRPELSNDEMLSLHEELQKIYKTYCLDESIDKIRFDPFIVEEIQRIAEGPYIDVVKLQTMRCLFEAYEHVLSLLENVFTPMFCHSDEYFRQLLRGAESPTRNSKLNRNTQKRGESFGISRIGSKIKGVFKSTTMEGAMLPNYGVAEGEDDFIEEGIVVMEDDSPVEAVSTPNTPRNLAAWKISIPYVDFFEDPSSERKEKKERIPVFCIDVERNDRRAVGHEPEHWSVYRRYLEFYVLESKLTEFHGAFPDAQLPSKRIIGPKNYEFLKSKREEFQEYLQKLLQHPELSNSQLLADFLSPNGGETQFLDKILPDVNLGKIIKSVPGKLMKEKGQHLEPFIMNFINSCESPKPKPSRPELTILSPTSENNKKLFNDLFKNNANRAENTERKQNQNYFMEVMTVEGVYDYLMYVGRVVFQVPDWLHHLLMGTRILFKNTLEMYTDYYLQCKLEQLFQEHRLVSLITLLRDAIFCENTEPRSLQDKQKGAKQTFEEMMNYIPDLLVKCIGEETKYESIRLLFDGLQQPVLNKQLTYVLLDIVIQELFPELNKVQKEVTSVTSWM

SEQ ID NO: 862136 - protein, 893 aa, Homo sapiens
MVPWVRTMGQKLKQRLRLDVGREICRQYPLFCFLLLCLSAASLLLNRYIHILMIFWSFVAGVVTFYCSLGPDSLLPNIFFTIKYKPKQLGLQELFPQGHSCAVCGKVKCKRHRPSLLLENYQPWLDLKISSKVDASLSEVDIPSIITKKLLKAAMKHIEVIVKARQKVKNTEFLQQAALEEYGPELHVALRSRRDELHYLRKLTELLFPYILPPKATDCRSLTLLIREILSGSVFLPSLDFLADPDTVNHLLIIFIDDSPPEKATEPASPLVPFLQKFAEPRNKKPSVLKLELKQIREQQDLLFRFMNFLKQEGAVHVLQFCLTVEEFNDRILRPELSNDEMLSLHEELQKIYKTYCLDESIDKIRFDPFIVEEIQRIAEGPYIDVVKLQTMRCLFEAYEHVLSLLENVFTPMFCHSDEYFRQLLRGAESPTRNSKLNRNTQKRGESFGISRIGSKIKGVFKSTTMEGAMLPNYGVAEGEDDFIEEGIVVMEDDSPVEAVSTPNTPRNLAAWKISIPYVDFFEDPSSERKEKKERIPVFCIDVERNDRRAVGHEPEHWSVYRRYLEFYVLESKLTEFHGAFPDAQLPSKRIIGPKNYEFLKSKREEFQEYLQKLLQHPELSNSQLLADFLSPNGGETQFLDKILPDVNLGKIIKSVPGKLMKEKGQHLEPFIMNFINSCESPKPKPSRPELTILSPTSENNKKLFNDLFKNNANRAENTERKQNQNYFMEVMTVEGVYDYLMYVGRVVFQVPDWLHHLLMGTRILFKNTLEMYTDYYLQCKLEQLFQEHRLVSLITLLRDAIFCENTEPRSLQDKQKGAKQTFEEMMNYIPDLLVKCIGEETKYESIRLLFDGLQQPVLNKQLTYVLLDIVIQELFPELNKVQKEVTSVTSWM

SEQ ID NO: 862137 - protein, 946 aa, Homo sapiens
MVPWVRTMGQKLKQRLRLDVGREICRQYPLFCFLLLCLSAASLLLNRYIHILMIFWSFVAGVVTFYCSLGPDSLLPNIFFTIKYKPKQLGLQELFPQGHSCAVCGKVKCKRHRPSLLLENYQPWLDLKISSKVDASLSEVLELVLENFVYPWYRDVTDDESFVDELRITLRFFASVLIRRIHKVDIPSIITKKLLKAAMKHIEVIVKARQKVKNTEFLQQAALEEYGPELHVALRSRRDELHYLRKLTELLFPYILPPKATDCRSLTLLIREILSGSVFLPSLDFLADPDTVNHLLIIFIDDSPPEKATEPASPLVPFLQKFAEPRNKKPSVLKLELKQIREQQDLLFRFMNFLKQEGAVHVLQFCLTVEEFNDRILRPELSNDEMLSLHEELQKIYKTYCLDESIDKIRFDPFIVEEIQRIAEGPYIDVVKLQTMRCLFEAYEHVLSLLENVFTPMFCHSDEYFRQLLRGAESPTRNSKLNRGSLSLDDFRNTQKRGESFGISRIGSKIKGVFKSTTMEGAMLPNYGVAEGEDDFIEEGIVVMEDDSPVEAVSTPNTPRNLAAWKISIPYVDFFEDPSSERKEKKERIPVFCIDVERNDRRAVGHEPEHWSVYRRYLEFYVLESKLTEFHGAFPDAQLPSKRIIGPKNYEFLKSKREEFQEYLQKLLQHPELSNSQLLADFLSPNGGETQFLDKILPDVNLGKIIKSVPGKLMKEKGQHLEPFIMNFINSCESPKPKPSRPELTILSPTSENNKKLFNDLFKNNANRAENTERKQNQNYFMEVMTVEGVYDYLMYVGRVVFQVPDWLHHLLMGTRILFKNTLEMYTDYYLQCKLEQLFQEHRLVSLITLLRDAIFCENTEPRSLQDKQKGAKQTFEEMMNYIPDLLVKCIGEETKYESIRLLFDGLQQPVLNKQLTYVLLDIVIQELFPELNKVQKEVTSVTSWM

SEQ ID NO: 862138 - protein, 893 aa, Homo sapiens; identical to SEQ ID NO: 862136

SEQ ID NO: 862139 - protein, 894 aa, Homo sapiens
MIFWSFVAGVVTFYCSLGPDSLLPNIFFTIKYKPKQLGLQELFPQGHSCAVCGKVKCKRHRPSLLLENYQPWLDLKISSKVDASLSEVLELVLENFVYPWYRDVTDDESFVDELRITLRFFASVLIRRIHKVDIPSIITKKLLKAAMKHIEVIVKARQKVKNTEFLQQAALEEYGPELHVALRSRRDELHYLRKLTELLFPYILPPKATDCRSLTLLIREILSGSVFLPSLDFLADPDTVNHLLIIFIDDSPPEKATEPASPLVPFLQKFAEPRNKKPSVLKLELKQIREQQDLLFRFMNFLKQEGAVHVLQFCLTVEEFNDRILRPELSNDEMLSLHEELQKIYKTYCLDESIDKIRFDPFIVEEIQRIAEGPYIDVVKLQTMRCLFEAYEHVLSLLENVFTPMFCHSDEYFRQLLRGAESPTRNSKLNRGSLSLDDFRNTQKRGESFGISRIGSKIKGVFKSTTMEGAMLPNYGVAEGEDDFIEEGIVVMEDDSPVEAVSTPNTPRNLAAWKISIPYVDFFEDPSSERKEKKERIPVFCIDVERNDRRAVGHEPEHWSVYRRYLEFYVLESKLTEFHGAFPDAQLPSKRIIGPKNYEFLKSKREEFQEYLQKLLQHPELSNSQLLADFLSPNGGETQFLDKILPDVNLGKIIKSVPGKLMKEKGQHLEPFIMNFINSCESPKPKPSRPELTILSPTSENNKKLFNDLFKNNANRAENTERKQNQNYFMEVMTVEGVYDYLMYVGRVVFQVPDWLHHLLMGTRILFKNTLEMYTDYYLQCKLEQLFQEHRLVSLITLLRDAIFCENTEPRSLQDKQKGAKQTFEEMMNYIPDLLVKCIGEETKYESIRLLFDGLQQPVLNKQLTYVLLDIVIQELFPELNKVQKEVTSVTSWM

SEQ ID NO: 862140 - protein, 1012 aa, Homo sapiens
MIIMVMITITIVVDMKIHTMVMKIFKLELEEGVVEEQGVLLHPEVVGLLLPAVEPVIHREEVLDQQEAFEVREEVPNNKEAAGEKGSRPVLTCYNEDMTCYVGLHQKLAVEYWYIHILMIFWSFVAGVVTFYCSLGPDSLLPNIFFTIKYKPKQLGLQELFPQGHSCAVCGKVKCKRHRPSLLLENYQPWLDLKISSKVDASLSEVLELVLENFVYPWYRDVTDDESFVDELRITLRFFASVLIRRIHKVDIPSIITKKLLKAAMKHIEVIVKARQKVKNTEFLQQAALEEYGPELHVALRSRRDELHYLRKLTELLFPYILPPKATDCRSLTLLIREILSGSVFLPSLDFLADPDTVNHLLIIFIDDSPPEKATEPASPLVPFLQKFAEPRNKKPSVLKLELKQIREQQDLLFRFMNFLKQEGAVHVLQFCLTVEEFNDRILRPELSNDEMLSLHEELQKIYKTYCLDESIDKIRFDPFIVEEIQRIAEGPYIDVVKLQTMRCLFEAYEHVLSLLENVFTPMFCHSDEYFRQLLRGAESPTRNSKLNRGSLSLDDFRNTQKRGESFGISRIGSKIKGVFKSTTMEGAMLPNYGVAEGEDDFIEEGIVVMEDDSPVEAVSTPNTPRNLAAWKISIPYVDFFEDPSSERKEKKERIPVFCIDVERNDRRAVGHEPEHWSVYRRYLEFYVLESKLTEFHGAFPDAQLPSKRIIGPKNYEFLKSKREEFQEYLQKLLQHPELSNSQLLADFLSPNGGETQFLDKILPDVNLGKIIKSVPGKLMKEKGQHLEPFIMNFINSCESPKPKPSRPELTILSPTSENNKKLFNDLFKNNANRAENTERKQNQNYFMEVMTVEGVYDYLMYVGRVVFQVPDWLHHLLMGTRILFKNTLEMYTDYYLQCKLEQLFQEHRLVSLITLLRDAIFCENTEPRSLQDKQKGAKQTFEEMMNYIPDLLVKCIGEETKYESIRLLFDGLQQPVLNKQLTYVLLDIVIQELFPELNKVQKEVTSVTSWM

SEQ ID NO: 862141 - protein, 465 aa, Homo sapiens [sequence omitted]

SEQ ID NO: 862142 - protein, 428 aa, Homo sapiens [sequence omitted]

SEQ ID NO: 862143 - protein, 369 aa, Homo sapiens
MYHKLQRPSRNKCSRLSTTLLIYPATVGHEPEHWSVYRRYLEFYVLESKLTEFHGAFPDAQLPSKRIIGPKNYEFLKSKREEFQEYLQKLLQHPELSNSQLLADFLSPNGGETQFLDKILPDVNLGKIIKSVPGKLMKEKGQHLEPFIMNFINSCESPKPKPSRPELTILSPTSENNKKLFNDLFKNNANRAENTERKQNQNYFMEVMTVEGVYDYLMYVGRVVFQVPDWLHHLLMGTRILFKNTLEMYTDYYLQCKLEQLFQEHRLVSLITLLRDAIFCENTEPRSLQDKQKGAKQTFEEMMNYIPDLLVKCIGEETKYESIRLLFDGLQQPVLNKQLTYVLLDIVIQELFPELNKVQKEVTSVTSWM

SEQ ID NO: 862144 - protein, 939 aa, Homo sapiens
MVPWVRTMGQKLKQRLRLDVGREICRQYPLFCFLLLCLSAASLLLNRYIHILMIFWSFVAGVVTFYCSLGPDSLLPNIFFTIKYKPKQLGLQELFPQGHSCAVCGKVKCKRHRPSLLLENYQPWLDLKISSKVDASLSEVLELVLENFVYPWYRDVTDDESFVDELRITLRFFASVLIRRIHKVDIPSIITKKLLKAAMKHIEVIVKARQKVKNTEFLQQAALEEYGPELHVALRSRRDELHYLRKLTELLFPYILPPKATDCRSLTLLIREILSGSVFLPSLDFLADPDTVNHLLIIFIDDSPPEKATEPASPLVPFLQKFAEPRNKKPSVLKLELKQIREQQDLLFRFMNFLKQEGAVHVLQFCLTVEEFNDRILRPELSNDEMLSLHEELQKIYKTYCLDESIDKIRFDPFIVEEIQRIAEGPYIDVVKLQTMRCLFEAYEHVLSLLENVFTPMFCHSDEYFRQLLRGAESPTRNSKLNRGSLSLDDFRNTQKRGESFGISRIGSKIKGVFKSTTMEGAMLPNYGVAEGEDDFIEEGIVVMEDDSPVEAVSTPNTPRNLAAWKISIPYVDFFEDPSSERKEKKERIPVFCIDVERNDRRAVGHEPEHWSVYRRYLEFYVLESKLTEFHGAFPDAQLPSKRIIGPKNYEFLKSKREEFQEYLQKLLQHPELSNSQLLADFLSPNGGETQFLDKILPDVNLGKIIKSVPGKLMKEKGQHLEPFIMNFINSCESPKPKPSRPELTILSPTSENNKKLFNDLFKNNANRAENTERKQNQNYFMEVMTVEGVYDYLMYVGRVVFQVPDWLHHLLMGTRILFKNTLEMYTDYYLQCKLEQLFQEHRLVSLITLLRDAIFCENTEPRSLQDKQKGAKQTFEEMMNYIPDLLVKCIGEETKYESIRLLFDGLQQPVLNKQLTYVLLDIVIQELFPELNKVTEKQ

SEQ ID NO: 862145 - protein, 880 aa, Homo sapiens
MVPWVRTMGQKLKQRLRLDVGREICRQYPLFCFLLLCLSAASLLLNRYIHILMIFWSFVAGVVTFYCSLGPDSLLPNIFFTIKYKPKQLGLQELFPQGHSCAVCGKVKCKRHRPSLLLENYQPWLDLKISSKVDASLSEVLELVLENFVYPWYRDVTDDESFVDELRITLRFFASVLIRRIHKVDIPSIITKKLLKAAMKHIEVIVKARQKVKNTEFLQQAALEEYGPELHVALRSRRDELHYLRKLTELLFPYILPPKATDCRSLTLLIREILSGSVFLPSLDFLADPDTVNHLLIIFIDDSPPEKATEPASPLVPFLQKFAEPRNKKPSVLKLELKQIREQQDLLFRFMNFLKQEGAVHVLQFCLTVEEFNDRILRPELSNDEMLSLHEELQKIYKTYCLDESIDKIRFDPFIVEEIQRIAEGPYIDVVKLQTMRCLFEAYEHVLSLLENVFTPMFCHSDEYFRQLLRGAESPTRNSKLNRGSLSLDDFRNTQKRGESFGISRIGSKIKGVFKSTTMEGAMLPNYGVAEGEDDFIEEGIVVMEDDSPVEAVSTPNTPRNLAAWKISIPYVDFFEDPSSERKEKKERIPVFCIDVERNDRRAVGHEPEHWSVYRRYLEFYVLESKLTEFHGAFPDAQLPSKRIIGPKNYEFLKSKREEFQEYLQKLLQHPELSNSQLLADFLSPNGGETQFLDKILPDVNLGKIIKSVPGKLMKEKGQHLEPFIMNFINSCESPKPKPSRPELTILSPTSENNKKLFNDLFKNNANRAENTERKQNQNYFMEVMTVEGVYDYLMYVDAIFCENTEPRSLQDKQKGAKQTFEEMMNYIPDLLVKCIGEETKYESIRLLFDGLQQPVLNKQELFPELNKVQKEVTSVTSWM

SEQ ID NO: 862146 - protein, 880 aa, Homo sapiens; identical to SEQ ID NO: 862145

SEQ ID NO: 862147 - protein, 783 aa, Homo sapiens
MVPWVRTMGQKLKQRLRLDVGREICRQYPLFCFLLLCLSAASLLLNRYIHILMIFWSFVAGVVTFYCSLGPDSLLPNIFFTIKYKPKQLGLQELFPQGHSCAVCGKVKCKRHRPSLLLENYQPWLDLKISSKVDASLSEVLELVLENFVYPWYRDVTDDESFVDELRITLRFFASVLIRRIHKVDIPSIITKKLLKAAMKHIEVIVKARQKVKNTEFLQQAALEEYGPELHVALRSRRDELHYLRKLTELLFPYILPPKATDCRSLTLLIREILSGSVFLPSLDFLADPDTVNHLLIIFIDDSPPEKATEPASPLVPFLQKFAEPRNKKPSVLKLELKQIREQQDLLFRFMNFLKQEGAVHVLQFCLTVEEFNDRILRPELSNDEMLSLHEELQKIYKTYCLDESIDKIRFDPFIVEEIQRIAEGPYIDVVKLQTMRCLFEAYEHVLSLLENVFTPMFCHSDEYFRQLLRGAESPTRNSKLNRGSLSLDDFRNTQKRGESFGISRIGSKIKGVFKSTTMEGAMLPNYGVAEGEDDFIEEGIVVMEDDSPVEAVSTPNTPRNLAAWKISIPYVDFFEDPSSERKEKKERIPVFCIDVERNDRRAVGHEPEHWSVYRRYLEFYVLESKLTEFHGAFPDAQLPSKRIIGPKNYEFLKSKREEFQEYLQKLLQHPELSNSQLLADFLSPNGGETQFLDKILPDVNLGKIIKSVPGKLMKEKGQHLEPFIMNFINSCESPKPKPSRPELTILSPTSENNKKLFNDLFKNNANRAENTERKQNQNYFVG

SEQ ID NO: 862148 - protein, 317 aa, Homo sapiens
MVPWVRTMGQKLKQRLRLDVGREICRQYPLFCFLLLCLSAASLLLNRYIHILMIFWSFVAGVVTFYCSLGPDSLLPNIFFTIKYKPKQLGLQELFPQGHSCAVCGKVKCKRHRPSLLLENYQPWLDLKISSKVDASLSEVLELVLENFVYPWYRDVTDDESFVDELRITLRFFASVLIRRIHKVDIPSIITKKLLKAAMKHIEVIVKARQKVKNTEFLQQAALEEYGPELHVALRSRRDELHYLRKLTELLFPYILPPKATDCRSLTLLIREILSGSVFLPSLDFLADPDTVNHLLIIFIDDSPVSIEYIRKHFRLH

SEQ ID NO: 862149 - protein, 303 aa, Homo sapiens
MYHKLQRPSRNKCSRLSTTLLIYPATVGHEPEHWSVYRRYLEFYVLESKLTEFHGAFPDAQLPSKRIIGPKNYEFLKSKREEFQEYLQKLLQHPELSNSQLLADFLSPNGGETQFLDKILPDVNLGKIIKSVPGKLMKEKGQHLEPFIMNFINSCESPKPKPSRPELTILSPTSENNKKLFNDLFKNNANRAENTERKQNQNYFMEVMTVEGVYDYLMYVGRVVFQVPDWLHHLLMGTRILFKNTLEMYTDYYLQCKLEQLFQEHRLVSLITLLRGLSQNAFSGKHGPLFQKRKGQTTLRMGF

SEQ ID NO: 862150 - protein, 893 aa, Homo sapiens; identical to SEQ ID NO: 862136

SEQ ID NO: 862151 - protein, 918 aa, Homo sapiens
MVPWVRTMGQKLKQRLRLDVGREICRQYPLFCFLLLCLSAASLLLNRYIHILMIFWSFVAGVVTFYCSLGPDSLLPNIFFTIKYKPKQLGLQELFPQGHSCAVCGKVKCKRHRPSLLLENYQPWLDLKISSKVDASLSEVLELVLENFVYPWYRDVTDDESFVDELRITLRFFASVLIRRIHKYKNTEFLQQAALEEYGPELHVALRSRRDELHYLRKLTELLFPYILPPKATDCRSLTLLIREILSGSVFLPSLDFLADPDTVNHLLIIFIDDSPPEKATEPASPLVPFLQKFAEPRNKKPSVLKLELKQIREQQDLLFRFMNFLKQEGAVHVLQFCLTVEEFNDRILRPELSNDEMLSLHEELQKIYKTYCLDESIDKIRFDPFIVEEIQRIAEGPYIDVVKLQTMRCLFEAYEHVLSLLENVFTPMFCHSDEYFRQLLRGAESPTRNSKLNRGSLSLDDFRNTQKRGESFGISRIGSKIKGVFKSTTMEGAMLPNYGVAEGEDDFIEEGIVVMEDDSPVEAVSTPNTPRNLAAWKISIPYVDFFEDPSSERKEKKERIPVFCIDVERNDRRAVGHEPEHWSVYRRYLEFYVLESKLTEFHGAFPDAQLPSKRIIGPKNYEFLKSKREEFQEYLQKLLQHPELSNSQLLADFLSPNGGETQFLDKILPDVNLGKIIKSVPGKLMKEKGQHLEPFIMNFINSCESPKPKPSRPELTILSPTSENNKKLFNDLFKNNANRAENTERKQNQNYFMEVMTVEGVYDYLMYVGRVVFQVPDWLHHLLMGTRILFKNTLEMYTDYYLQCKLEQLFQEHRLVSLITLLRDAIFCENTEPRSLQDKQKGAKQTFEEMMNYIPDLLVKCIGEETKYESIRLLFDGLQQPVLNKQLTYVLLDIVIQELFPELNKVQKEVTSVTSWM

SEQ ID NO: 862152 - protein, 893 aa, Homo sapiens; identical to SEQ ID NO: 862136

SEQ ID NO: 862153 - protein, 891 aa, Homo sapiens
MVPWVRTMGQKLKQRLRLDVGREICRQYPLFCFLLLCLSAASLLLNRYIHILMIFWSFVAGVVTFYCSLGPDSLLPNIFFTIKYKPKQLGLQELFPQGHSCAVCGKVKCKRHRPSLLLENYQPWLDLKISSKVDASLSEVLELVLENFVYPWYRDVTDDESFVDELRITLRFFASVLIRRIHKVDIPSIITKKLLKAAMKHIEVIVKARQKVKNTEFLQQAALEEYGPELHVALRSRRDELHYLRKLTELLFPYILPPKATDCRSLTLLIREILSGSVFLPSLDFLADPDTVNHLLIIFIDDSPPEKATEPASPLVPFLQKFAEPRNKKPSVLKLELKQIREQQDLLFRFMNFLKQEGAVHVLQFCLTVEEFNDRILRPELSNDEMLSLHEELQKIYKTYCLDESIDKIRFDPFIVEEIQRIAEGPYIDVVKLQTMRCLFEAYEHVLSLLENVFTPMFCHSDEYFRQLLRGAESPTRNSKLNRGSLSLDDFRNTQKRGESFGISRIGSKIKGVFKSTTMEGAMLPNYGVAEGEDDFIEEGIVVMEDDSPVEAVSTPNTPRNLAAWKISIPYVDFFEDPSSERKEKKERIPVFCIDVERNDRRAVGHEPEHWSVYRRYLEFYVLESKLTEFHGAFPDAQLPSKRIIGPKNYEFLKSKREEFQEYLQKLLQHPELSNSQLLADFLSPNGGETQFLDKILPDVNLGKIIKSVPGKLMKEKGQHLEPFIMNFINSCESPKPKPSRPELTILSPTSENNKKLFNDLFKNNANRAENTERKQNQNYFMEVMTVEGVYDYLMYVDAIFCENTEPRSLQDKQKGAKQTFEEMMNYIPDLLVKCIGEETKYESIRLLFDGLQQPVLNKQLTYVLLDIVIQELFPELNKVQKEVTSVTSWM

SEQ ID NO: 862154 - protein, 890 aa, Homo sapiens
MVPWVRTMGQKLKQRLRLDVGREICRQYPLFCFLLLCLSAASLLLNRYIHILMIFWSFVAGVVTFYCSLGPDSLLPNIFFTIKYKPKQLGLQELFPQGHSCAVCGKVKCKRHRPSLLLENYQPWLDLKISSKVDASLSEVLELVLENFVYPWYRDVTDDESFVDELRITLRFFASVLIRRIHKVDIPSIITKKLLKAAMKHIEVIVKARQKVKNTEFLQQAALEEYGPELHVALRSRRDELHYLRKLTELLFPYILPPKATDCRSLTLLIREILSGSVFLPSLDFLADPDTVNHLLIIFIDDSPPEKATEPASPLVPFLQKFAEPRNKKPSVLKLELKQIREQQDLLFRFMNFLKQEGAVHVLQFCLTVEEFNDRILRPELSNDEMLSLHEELQKIYKTYCLDESIDKIRFDPFIVEEIQRIAEGPYIDVVKLQTMRCLFEAYEHVLSLLENVFTPMFCHSDEYFRQLLRGAESPTRNSKLNRGSLSLDDFRNTQKRGESFGISRIGSKIKGVFKSTTMEGAMLPNYGVAEGEDDFIEEGIVVMEDDSPVEAVSTPNTPRNLAAWKISIPYVDFFEDPSSERKEKKERIPVFCIDVERNDRRAVGHEPEHWSVYRRYLEFYVLESKLTEFHGAFPDAQLPSKRIIGPKNYEFLKSKREEFQEYLQKLLQHPELSNSQLLADFLSPNGGETQFLDKILPDVNLGKIIKSVPGKLMKEKGQHLEPFIMNFINSCESPKPKPSRPELTILSPTSENNKKLFNDLFKNNANRAENTERKQNQNYFMEVMTVEGVYDYLMYVGRVVFQVPDWLHHLLMGTRILFKNTLEMYTDYYLQCKLEQLFQEHRLVSLITLLRDAIFCENTEPRSLQDKQKGAKQTFEEMMNYIPGVIFKK

SEQ ID NO: 862155 - protein, 880 aa, Homo sapiens
MVPWVRTMGQKLKQRLRLDVGREICRQYPLFCFLLLCLSAASLLLNRYIHILMIFWSFVAGVVTFYCSLGPDSLLPNIFFTIKYKPKQLGLQELFPQGHSCAVCGKVKCKRHRPSLLLENYQPWLDLKISSKVDASLSEVLELVLENFVYPWYRDVTDDESFVDELRITLRFFASVLIRRIHKVDIPSIITKKLLKAAMKHIEVIVKARQKVKNTEFLQQAALEEYGPELHVALRSRRDELHYLRKLTELLFPYILPPKATDCRSLTLLIREILSGSVFLPSLDFLADPDTVNHLLIIFIDDSPPEKATEPASPLVPFLQKFAEPRNKKPSVLKLELKQIREQQDLLFRFMNFLKQEGAVHVLQFCLTVEEFNDRILRPELSNDEMLSLHEELQKIYKTYCLDESIDKIRFDPFIVEEIQRIAEGPYIDVVKLQTMRCLFEAYEHVLSLLENVFTPMFCHSDEYFRQLLRGAESPTRNSKLNRGSLSLDDFRNTQKRGESFGISRIGSKIKGVFKSTTMEGAMLPNYGVAEGEDDFIEEGIVVMEDDSPVEAVSTPNTPRNLAAWKISIPYVDFFEDPSSERKEKKERIPVFCIDVERNDRRAVGHEPEHWSVYRRYLEFYVLESKLTEFHGAFPDAQLPSKRIIGPKNYEFLKSKREEFQEYLQKLLQHPELSNSQLLADFLSPNGGETQFLDKILPDVNLGKIIKSVPGKLMKEKGQHLEPFIMNFINSCESPKPKPSRPELTILSPTSENNKKLFNDLFKNNANRAENTERKQNQNYFMEVMTVEGVYDYLMYVGRVVFQVPDWLHHLLMGTRILFKNTLEMYTDYYLQCKLEQLFQEHRLVSLITLLRGLSQNAFSGKHGPLFQKRKGQTTLRMGF

SEQ ID NO: 862156 - protein, 765 aa, Homo sapiens
MVPWVRTMGQKLKQRLRLDVGREICRQYPLFCFLLLCLSAASLLLNRYIHILMIFWSFVAGVVTFYCSLGPDSLLPNIFFTIKYKPKQLGLQELFPQGHSCAVCGKVKCKRHRPSLLLENYQPWLDLKISSKVDASLSEVLELVLENFVYPWYRDVTDDESFVDELRITLRFFASVLIRRIHKVDIPSIITKKLLKAAMKHIEVIVKARQKVKNTEFLQQAALEEYGPELHVALRSRRDELHYLRKLTELLFPYILPPKATDCRSLTLLIREILSGSVFLPSLDFLADPDTVNHLLIIFIDDSPPEKATEPASPLVPFLQKFAEPRNKKPSVLKLELKQIREQQDLLFRFMNFLKQEGAVHVLQFCLTVEEFNDRILRPELSNDEMLSLHEELQKIYKTYCLDESIDKIRFDPFIVEEIQRIAEGPYIDVVKLQTMRCLFEAYEHVLSLLENVFTPMFCHSDEYFRQLLRGAESPTRNSKLNRGSLSLDDFRNTQKRGESFGISRIGSKIKGVFKSTTMEGAMLPNYGVAEGEDDFIEEGIVVMEDDSPVEAVSTPNTPRNLAAWKISIPYVDFFEDPSSERKEKKERIPVFCIDVERNDRRAVGHEPEHWSVYRRYLEFYVLESKLTEFHGAFPDAQLPSKRIIGPKNYEFLKSKREEFQEYLQKLLQHPELSNSQLLADFLSPNGGETQFLDKILPDVNLGKIIKSVPGKLMKEKGQHLEPFIMNFINSCESPKPKPSRPELTILSPTSENNKKVLHIALKNY

SEQ ID NO: 862157 - protein, 379 aa, Homo sapiens
MVPWVRTMGQKLKQRLRLDVGREICRQYPLFCFLLLCLSAASLLLNRYIHILMIFWSFVAGVVTFYCSLGPDSLLPNIFFTIKYKPKQLGLQELFPQGHSCAVCGKVKCKRHRPSLLLENYQPWLDLKISSKVDASLSEVLELVLENFVYPWYRDVTDDESFVDELRITLRFFASVLIRRIHKVDIPSIITKKLLKAAMKHIEVIVKARQKVKNTEFLQQAALEEYGPELHVALRSRRDELHYLRKLTELLFPYILPPKATDCRSLTLLIREILSGSVFLPSLDFLADPDTVNHLLIIFIDDSPPEKATEPASPLVPFLQKFAEPRNKKPSVLKLELKQIREQQDLLFRFMNFLKQEGAVHVLQFCLTVGEAYLCILRK

SEQ ID NO: 862158 - protein, 1175 aa, Homo sapiens
FVVAEGLTCLIKVGAEADQNYQNYILRALGQIMLYVDGMNGVINRNETIQWLYTLIGSKFRLVVKTALKLLLVFVEYSESNAPLLIQAVTAVDTKRGVKPWSNIMEILEEKDGVDTELLVYAMTLVNKTLSGLPDQDTFYDVVDCLEELGIAAVSQRHLNKKGTDLDLVEQLNIYEVALRHEDGDETTEPPPSGCRDRRRASVCSSGGGEHRGLDRRRSRRHSVQSIKSTLSAPTSPCSQSAPSFKPNQVRDLREKSSPSGLLTSSFRQHQESLAAERERRRQEREERLQRIEREERNKFSRDYLDKREEQRQAREERYKYLEQLAAEEHEKELRSRSVSRGRADLSLDLTSPAAPACLAPLSHSPSSSDSQEALTVSASSPGTPHHPQASAGDPEPESEAEPEAEAGAGQVADEAGQDIASAHEGAETEVEQALEQEPEERASLSEKERQNEGVNERDNCSASSVSSSSSTLEREEKEDKLSRDRTTGLWPAGVQDAGVNGQCGDILTNKRFMLDMLYAHNRKSPDDEEKGDGEAGRTQQEAEAVASLATRISTLQANSQTQDESVRRVDVGCLDNRGSVKAFAEKFNSGDLGRGSISPDAEPNDKVPETAPVQPKTESDYIWDQLMANPRELRIQDMDFTDLGEEDDIDVLDVDLGHREAPGPPPPPPPTFLGLPPPPPPPLLDSIPPPPVPGNLLVPPPPVFNAPQGLGWSQVPRGQPTFTKKKKTIRLFWNEVRPFDWPCKNNRRCREFLWSKLEPIKVDTSRLEHLFESKSKELSVSKKTAADGKRQEIIVLDSKRSNAINIGLTVLPPPRTIKIAILNFDEYALNKEGIEKILTMIPTDEEKQKIQEAQLANPEIPLGSAEQFLLTLSSISELSARLHLWAFKMDYETTEKEVAEPLLDLKEGIDQLENNKTLGFILSTLLAIGNFLNGTNAKAFELSYLEKVPEVKDTVHKQSLLHHVCTMVVENFPDSSDLYSEIGAITRSAKVDFDQLQDNLCQMERRCKASWDHLKAIAKHEMKPVLKQRMSEFLKDCAERIIILKIVHRRIINRFHSFLLFMGHPPYAIREVNINKFCRIISEFALEYRTTRERVLQQKQKRANHRERNKTRGKMITDSGKFSGSSPAPPSQPQGLSYAEDAAEHENMKAVLKTSSPSRSPLHIPSPSCQLCFS

SEQ ID NO: 862159 - protein, 200 aa, Homo sapiens
FVVAEGLTCLIKVGAEADQNYQNYILRALGQIMLYVDGMNGVINRNETIQWLYTLIGSKFRLVVKTALKLLLVFVEYSESNAPLLIQAVTAVDTKRGVKPWSNIMEILEEKDGVDTELLVYAMTLVNKTLSGLPDQDTFYDVVDCLEELGIAAVSQRHLNKKGTDLDLVEQLNIYEVPDHAFCKVSYSFGNCQRLRWRLL

SEQ ID NO: 862160 - protein, 1258 aa, Homo sapiens
FVVAEGLTCLIKVGAEADQNYQNYILRALGQIMLYVDGMNGVINRNETIQWLYTLIGSKFRLVVKTALKLLLVFVEYSESNAPLLIQAVTAVDTKRGVKPWSNIMEILEEKDGVDTELLVYAMTLVNKTLSGLPDQDTFYDVVDCLEELGIAAVSQRHLNKKGTDLDLVEQLNIYEVALRHEDGDETTEPPPSGCRDRRRASVCSSGGGEHRGLDRRRSRRHSVQSIKSTLSAPTSPCSQSAPSFKPNQVRDLREKSSPSGLLTSSFRQHQESLAAERERRRQEREERLQRIEREERNKFSRDYLDKREEQRQAREERYKYLEQLAAEEHEKELRSRSVSRGRADLSLDLTSPAAPACLAPLSHSPSSSDSQEALTVSASSPGTPHHPQASAGDPEPESEAEPEAEAGAGQVADEAGQDIASAHEGAETEVEQALEQEPEERASLSEKERQNEGVNERDNCSASSVSSSSSTLEREEKEDKLSRDRTTGLWPAGVQDAGVNGQCGDILTNKRFMLDMLYAHNRKSPDDEEKGDGEAGRTQQEAEAVASLATRISTLQANSQTQDESVRRVDVGCLDNRGSVKAFAEKFNSGDLGRGSISPDAEPNDKVPETAPVQPKTESDYIWDQLMANPRELRIQDMDFTDLGEEDDIDVLDVDLGHREAPGPPPPPPPTFLGLPPPPPPPLLDSIPPPPVPGNLLVPPPPVFNAPQGLGWSQVPRGQPTFTKKKKTIRLFWNEVRPFDWPCKNNRRCREFLWSKLEPIKVDTSRLEHLFESKSKELSVSKKTAADGKRQEIIVLDSKRSNAINIGLTVLPPPRTIKIAILNFDEYALNKEGIEKILTMIPTDEEKQKIQEAQLANPEIPLGSAEQFLLTLSSISELSARLHLWAFKMDYETTEKEVAEPLLDLKEGIDQLENNKTLGFILSTLLAIGNFLNGTNAKAFELSYLEKVPEVKDTVHKQSLLHHVCTMVVENFPDSSDLYSEIGAITRSAKVDFDQLQDNLCQMERRCKASWDHLKAIAKHEMKPVLKQRMSEFLKDCAERIIILKIVHRRIINRFHSFLLFMGHPPYAIREVNINKFCRIISEFALEYRTTRERVLQQKQKRANHRERNKTRGKMITDSGKFSGSSPAPPSQPQGLSYAEDAAEHENMKAVLKTSSPSVEDATPALGVRTRSRASRGSTSSWTMGTDDSPNVTDDAADEIMDRIVKSATQVPSQRVVPRERKRSRANRKSLRRTLKSGLTPEEARALGLVGTSELQL

SEQ ID NO: 862161 - protein, 369 aa, Homo sapiens
MDYDTTEKEVAEPLLDLKEGIDQLENNKTLGFILSTLLAIGNFLNGTNAKAFELSYLEKVPEVKDTVHKQSLLHHVCTMVVENFPDSSDLYSEIGAITRSAKVDFDQLQDNLCQMERRCKASWDHLKAIAKHEMKPVLKQRMSEFLKDCAERIIILKIVHRRIINRFHSFLLFMGHPPYAIREVNINKFCRIISEFALEYRTTRERVLQQKQKRANHRERNKTRGKMITDSGKFSGSSPAPPSQPQGLSYAEDAAEHENMKAVLKTSSPSVEDATPALGVRTRSRASRGSTSSWTMGTDDSPNVTDDAADEIMDRIVKSATQVPSQRVVPRERKRSRANRKSLRRTLKSGLTPEEARALGLVGTSELQL

SEQ ID NO: 862162 - protein, 741 aa, Homo sapiens
FVVAEGLTCLIKVGAEADQNYQNYILRALGQIMLYVDGMNGVINRNETIQWLYTLIGSKFRLVVKTALKLLLVFVEYSESNAPLLIQAVTAVDTKRGVKPWSNIMEILEEKDGVDTELLVYAMTLVNKTLSGLPDQDTFYDVVDCLEELGIAAVSQRHLNKKGTDLDLVEQLNIYEVALRHEDGDETTEPPPSGCRDRRRASVCSSGGGEHRGLDRRRSRRHSVQSIKSTLSAPTSPCSQSAPSFKPNQVRDLREKSSPSGLLTSSFRQHQESLAAERERRRQEREERLQRIEREERNKFSRDYLDKREEQRQAREERYKYLEQLAAEEHEKELRSRSVSRGRADLSLDLTSPAAPACLAPLSHSPSSSDSQEALTVSASSPGTPHHPQASAGDPEPESEAEPEAEAGAGQVADEAGQDIASAHEGAETEVEQALEQEPEERASLSEKERQNEGVNERDNCSASSVSSSSSTLEREEKEDKLSRDRTTGLWPAGVQDAGVNGQCGDILTNKRFMLDMLYAHNRKSPDDEEKGDGEAGRTQQEAEAVASLATRISTLQANSQTQDESVRRVDVGCLDNRGSVKAFAEKFNSGDLGRGSISPDAEPNDKVPETAPVQPKTESDYIWDQLMANPRELRIQDMDFTDLGEEDDIDVLDVDLGHREAPGPPPPPPPTFLGLPPPPPPPLLDSIPPPPVPGNLLVPPPPVFNAPQGLGWSQKKPEPWAWLAPRSCSCDTHRLLPGVC

SEQ ID NO: 862163 - protein, 490 aa, Homo sapiens
FVVAEGLTCLIKVGAEADQNYQNYILRALGQIMLYVDGMNGVINRNETIQWLYTLIGSKFRLVVKTALKLLLVFVEYSESNAPLLIQAVTAVDTKRGVKPWSNIMEILEEKDGVDTELLVYAMTLVNKTLSGLPDQDTFYDVVDCLEELGIAAVSQRHLNKKGTDLDLVEQLNIYEVALRHEDGDETTEPPPSGCRDRRRASVCSSGGGEHRGLDRRRSRRHSVQSIKSTLSAPTSPCSQSAPSFKPNQVRDLREKSSPSGLLTSSFRQHQESLAAERERRRQEREERLQRIEREERNKFSRDYLDKREEQRQAREERYKYLEQLAAEEHEKELRSRSVSRGRADLSLDLTSPAAPACLAPLSHSPSSSDSQEALTVSASSPGTPHHPQASAGDPEPESEAEPEAEAGAGQVADEAGQDIASAHEGAETEVEQALEQEPEERASLSEKERQNEGVNERDNCSASSVSSSSSTLEREEKEDKLSRDRTTGK

SEQ ID NO: 862164 - protein, 114 aa, Homo sapiens
MAEAGAGLSETVTETTVTVTTEPENRSLTIKLRKRKPEKKVEWTSDTVDNEHMGRRSSKCCCIYEKPRAFGESSTESDEEEEEGCGHTHCVRGHRKGRRRATLGPDPHHPSPAS

SEQ ID NO: 862165 - protein, 114 aa, Homo sapiens; identical to SEQ ID NO: 862164

SEQ ID NO: 862166 - protein, 114 aa, Homo sapiens; identical to SEQ ID NO: 862164

SEQ ID NO: 862167 - protein, 137 aa, Homo sapiens
MSAIRGCNFSHEAGGGPGGGGIKKVEDPGYHSESDTASLRPQRQKKENRSLTIKLRKRKPEKKVEWTSDTVDNEHMGRRSSKCCCIYEKPRAFGESSTESDEEEEEGCGHTHCVRGHRKGRRRATLGPDPHHPSPAS

SEQ ID NO: 862168 - protein, 114 aa, Homo sapiens; identical to SEQ ID NO: 862164

SEQ ID NO: 862169 - protein, 114 aa, Homo sapiens; identical to SEQ ID NO: 862164

SEQ ID NO: 862170 - protein, 114 aa, Homo sapiens; identical to SEQ ID NO: 862164

SEQ ID NO: 862171 - protein, 114 aa, Homo sapiens; identical to SEQ ID NO: 862164

SEQ ID NO: 862172 - protein, 114 aa, Homo sapiens; identical to SEQ ID NO: 862164

SEQ ID NO: 862173 - protein, 114 aa, Homo sapiens; identical to SEQ ID NO: 862164

SEQ ID NO: 862174 - protein, 117 aa, Homo sapiens
MECLRSLPCLLPRAMRLPRRTLCALALDVTSVGPPVAACGRRANLIGRSRAAQLCGPDRLRVAGEVHRFRTSDVSQATLASVAPVFTVTKFDKQGNVTSFVFESCDNSRVSSDIRLS

SEQ ID NO: 862175 - protein, 360 aa, Homo sapiens
MECLRSLPCLLPRAMRLPRRTLCALALDVTSVGPPVAACGRRANLIGRSRAAQLCGPDRLRVAGEVHRFRTSDVSQATLASVAPVFTVTKFDKQGNVTSFERKKTELYQELGLQARDLRFQHVMSITVRNNRIIMRMEYLKAVITPECLLILDYRNLNLEQWLFRELPSQLSGEGQLVTYPLPFEFRAIEALLQYWINTLQGKLSILQPLILETLDALVDPKHSSVDRSKLHILLQNGKSLSELETDIKIFKESILEILDEEELLEELCVSKWSDPQVFEKSSAGIDHAEEMELLLENYYRLADDLSNAARELRVLIDDSQSIIFINLDSHRNVMMRLNLQLTMGTFSLSLFGLMGVALE

SEQ ID NO: 862176 - protein, 360 aa, Homo sapiens; identical to SEQ ID NO: 862175

SEQ ID NO: 862177 - protein, 117 aa, Homo sapiens; identical to SEQ ID NO: 862174

SEQ ID NO: 862178 - protein, 115 aa, Homo sapiens
MECLRSLPCLLPRAMRLPRRTLCALALDVTSVGPPVAACGRRANLIGRSRAAQLCGPDRLRVAGEVHRFRTSDVSQATLASVAPVFTVTKFDKQGNVTSFERKKTELYQELVYQS

SEQ ID NO: 862179 - protein, 360 aa, Homo sapiens; identical to SEQ ID NO: 862175

SEQ ID NO: 862180 - protein, 360 aa, Homo sapiens; identical to SEQ ID NO: 862175

SEQ ID NO: 862181 - protein, 115 aa, Homo sapiens; identical to SEQ ID NO: 862178

SEQ ID NO: 862182 - protein, 140 aa, Homo sapiens
  misc_feature (117)..(117): Xaa can be any naturally occurring amino acid
  misc_feature (121)..(121): Xaa can be any naturally occurring amino acid
  misc_feature (123)..(124): Xaa can be any naturally occurring amino acid
  misc_feature (130)..(130): Xaa can be any naturally occurring amino acid
  misc_feature (138)..(138): Xaa can be any naturally occurring amino acid
MECLRSLPCLLPRAMRLPRRTLCALALDVTSVGPPVAACGRRANLIGRSRAAQLCGPDRLRVAGEVHRFRTSDVSQATLASVAPVFTVTKFDKQGNVTSFVKRKKNLNYYQRVKGLXKPRXFXXISKPLXNGGYSKGXGK

SEQ ID NO: 862183 - protein, 360 aa, Homo sapiens; identical to SEQ ID NO: 862175

SEQ ID NO: 862184 - protein, 360 aa, Homo sapiens; identical to SEQ ID NO: 862175

SEQ ID NO: 862185 - protein, 257 aa, Homo sapiens
MECLRSLPCLLPRAMRLPRRTLCALALDVTSVGPPVAACGRRANLIGRSRAAQLCGPDRLRVAGEVHRFRTSDVSQATLASVAPVFTVTKFDKQGNVTSFVSILQPLILETLDALVDPKHSSVDRSKLHILLQNGKSLSELETDIKIFKESILEILDEEELLEELCVSKWSDPQVFEKSSAGIDHAEEMELLLENYYRLADDLSNAARELRVLIDDSQSIIFINLDSHRNVMMRLNLQLTMGTFSLSLFGLMGVALE

SEQ ID NO: 862186 - protein, 103 aa, Homo sapiens
LVHRVCRSGGSDRSELRPEQPASGMKVWGLAAACFLLQHHGMPAQFTLPPAPRDETSPADAVCPGLGRDLCGSSRCCLRPPSQPDWKEPSGAALRARPAPRGR

SEQ ID NO: 862187 - protein, 342 aa, Homo sapiens
MECLRSLPCLLPRAMRLPRRTLCALALDVTSVGPPVAACGRRANLIGRSRAAQLCGPDRLRVAGEVHRFRTSDVSQATLASVAPVFTVTKFDKQGNVTSFERKKTELYQELGLQARDLRFQHVMSITVRNNRIIMRMEYLKAVITPECLLILDYRNLNLEQWLFRELPSQLSGEGQLVTYPLPFEFRAIEALLQYWINTLQGKLSILQPLILETLDALVDPKHSSVDRSKLHILLQNGKSLSELETDIKIFKESILEILDEEELLEELCVSKWSDPQVFEKSSAGIDHAEEMELLLVLIDDSQSIIFINLDSHRNVMMRLNLQLTMGTFSLSLFGLMGVALE

SEQ ID NO: 862188 - protein, 416 aa, Homo sapiens
MSTKQITCRYFMHGVCREGSQCLFSHDLANSKPSTICKYYQKGYCAYGTRCRYDHTRPSAAAGGAVGTMAHSVPSPAFHSPHPPSEVTASIVKTNSHEPGKREKRTLVLRDRNLSGMAERKTQPSMVSNPGSCSDPQPSPEMKPHSYLDAIRSGLDDVEASSSYSNEQQLCPYAAAGECRFGDACVYLHGEVCEICRLQVLHPFDPEQRKAHEKICMLTFEHEMEKAFAFQASQDKVCSICMEVILEKASASERRFGILSNCNHTYCLSCIRQWRCAKQFENPIIKSCPECRVISEFVIPSVYWVEDQNKKNELIEAFKQGMGKKACKYFEQGKGTCPFGSKCLYRHAYPDGRLAEPEKPRKQLSSQGTVRFFNSVRLWDFIENRESRHVPNNEDVDMTELGDLFMHLSGVESSEP

SEQ ID NO: 862189 - protein, 460 aa, Homo sapiens
PEGRRAPACAGVTRLRGMGRARPRPRRQRLREAAARRRSLSPATMSTKQITCRYFMHGVCREGSQCLFSHDLANSKPSTICKYYQKGYCAYGTRCRYDHTRPSAAAGGAVGTMAHSVPSPAFHSPHPPSEVTASIVKTNSHEPGKREKRTLVLRDRNLSGMAERKTQPSMVSNPGSCSDPQPSPEMKPHSYLDAIRSGLDDVEASSSYSNEQQLCPYAAAGECRFGDACVYLHGEVCEICRLQVLHPFDPEQRKAHEKICMLTFEHEMEKAFAFQASQDKVCSICMEVILEKASASERRFGILSNCNHTYCLSCIRQWRCAKQFENPIIKSCPECRVISEFVIPSVYWVEDQNKKNELIEAFKQGMGKKACKYFEQGKGTCPFGSKCLYRHAYPDGRLAEPEKPRKQLSSQGTVRFFNSVRLWDFIENRESRHVPNNEDVDMTELGDLFMHLSGVESSEP

SEQ ID NO: 862190 - protein, 460 aa, Homo sapiens; identical to SEQ ID NO: 862189

SEQ ID NO: 862191 - protein, 312 aa, Homo sapiens
MCSPQESGMTALSARMLTRSRSLGPGAGPRGCREEPGPLRRREAAAEARKSHSPVKRPRKAQRLRVAYEGSDSEKGEGAEPLKVPVWEPQDWQQQLVNIRAMRNKKDAPVDHLGTEHCYDSSAPPKVRRYQVLLSLMLSSQTKDQVTAGAMQRLRARGLTVDSILQTDDATLGKLIYPVGFWRSKVKYIKQTSAILQQHYGGDIPASVAELVALPGVGPKMAHLAMAVAWGTVSGIAVDTHVHRIANRLRWTKKATKSPEETRAALEEWLPRELWHEINGLLVGFGQQTCLPVHPRCHACLNQALCPAAQGL

SEQ ID NO: 862192 - protein, 113 aa, Homo sapiens
MSNWRATGVVADSPLGGEGHGLGWWSVPLFTPLGLPAAVDTHVHRIANRLRWTKKATKSPEETRAALEEWLPRELWHEINGLLVGFGQQTCLPVHPRCHACLNQALCPAAQGL

SEQ ID NO: 862193 - protein, 194 aa, Homo sapiens
MRARTVRKVRRYQVLLSLMLSSQTKDQVTAGAMQRLRARGLTVDSILQTDDATLGKLIYPVGFWRSKVKYIKQTSAILQQHYGGDIPASVAELVALPGVGPKMAHLAMAVAWGTVSGIAVDTHVHRIANRLRWTKKATKSPEETRAALEEWLPRELWHEINGLLVGFGQQTCLPVHPRCHACLNQALCPAAQGL

SEQ ID NO: 862194 - protein, 139 aa, Homo sapiens
MCSPQESGMTALSARMLTRSRSLGPGAGPRGCREEPGPLRRREAAAEARKSHSPVKRPRKAQRLRVAYEGSDSEKGEGAEPLKVPVWEPQDWQQQLVNIRAMRNKKDAPVDHLGTEHCYDSSAPPKVGRGPICPDDPPS

SEQ ID NO: 862195 - protein, 312 aa, Homo sapiens; identical to SEQ ID NO: 862191

SEQ ID NO: 862196 - protein, 255 aa, Homo sapiens
MCSPQESGMTALSARMLTRSRSLGPGAGPRGCREEPGPLRRREAAAEARKSHSPVKRPRKAQRLRVAYEGSDSEKGEGAEPLKVPVWEPQDWQQQLVNIRAMRNKKDAPVDHLGTEHCYDSSAPPKSKVKYIKQTSAILQQHYGGDIPASVAELVALPGVGPKMAHLAMAVAWGTVSGIAVDTHVHRIANRLRWTKKATKSPEETRAALEEWLPRELWHEINGLLVGFGQQTCLPVHPRCHACLNQALCPAAQGL

SEQ ID NO: 862197 - protein, 114 aa, Homo sapiens [sequence omitted]

SEQ ID NO: 862198 - protein, 877 aa, Homo sapiens
MTTEKSLVTEAENSQHQQKEEGEEAINSGQQEPQQEESCQTAAEGDNWCEQKLKASNGDTPTHEDLTKNKERTSESRGLSRLFSSFLKRPKSQVSEEEGKEVESDKEKGEGGQKEIEFGTSLDEEIILKAPIAAPEPELKTDPSLDLHSLSSAETQPHHYKLRIIFRVFLFLKHVNIISIVKSPAQEELREDPDFEIKEGEGLEECSKIEVKEESPQSKAETELKASQKPIRKHRNMHCKVSLLDDTVYECVVEKHAKGQDLLKRVCEHLNLLEEDYFGLAIWDNATSKTWLDSAKEIKKQVRGVPWNFTFNVKFYPPDPAQLTEDITRYYLCLQLRQDIVAGRLPCSFATLALLGSYTIQSELGDYDPELHGVDYVSDFKLAPNQTKELEEKVMELHKSYRSMTPAQADLEFLENAKKLSMYGVDLHKAKDLEGVDIILGVCSSGLLVYKDKLRINRFPWPKVLKISYKRSSFFIKIRPGEQEQYESTIGFKLPSYRAAKKLWKVCVEHHTFFRLTSTDTIPKSKFLALGSKFRYSGRTQAQTRQASALIDRPAPHFERTASKRASRSLDGAAAVDSADRSPRPTSAPAITQGQVAEGGVLDASAKKTVVPKAQKETVKAEVKKEDEPPEQAEPEPTEAWKVEKTHIEVTVPTSNGDQTQKKRERLDGENIYIRHSNLMLEDLDKSQEEIKKHHASISELKKNFMESVPEPRPSEWDKRLSTHSPFRTLNINGQIPTGEGPPLVKTQTVTISDNANAVKSEIPTKDVPIVHTETKTITYEAAQTDDNSGDLDPGVLLTAQTITSETPSSTTTTQITKTVKGGISETRIEKRIVITGDADIDHDQVLVQAIKEAKEQHPDMSVTKVVVHQETEIADE

SEQ ID NO: 862199 - protein, 864 aa, Homo sapiens
MTTEKSLVTEAENSQHQQKEEGEEAINSGQQEPQQEESCQTAAEGDNWCEQKLKASNGDTPTHEDLTKNKERTSESRGLSRLFSSFLKRPKSQVSEEEGKEVESDKEKGEGGQKEIEFGTSLDEEIILKAPIAAPEPELKTDPSLDLHSLSSAETQPAQEELREDPDFEIKEGEGLEECSKIEVKEESPQSKAETELKASQKPIRKHRNMHCKVSLLDDTVYECVVEKHAKGQDLLKRVCEHLNLLEEDYFGLAIWDNATSKTWLDSAKEIKKQVRGVPWNFTFNVKFYPPDPAQLTEDITRYYLCLQLRQDIVAGRLPCSFATLALLGSYTIQSELGDYDPELHGVDYVSDFKLAPNQTKELEEKVMELHKSYRSMTPAQADLEFLENAKKLSMYGVDLHKAKDLEGVDIILGVCSSGLLVYKDKLRINRFPWPKVLKISYKRSSFFIKIRPGEQEQYESTIGFKLPSYRAAKKLWKVCVEHHTFFRLTSTDTIPKSKFLALGSKFRYSGRTQAQTRQASALIDRPAPHFERTASKRASRSLDGAAAVDSADRSPRPTSAPAITQGQVAEGGVLDASAKKTVVPKAQKETVKAEVKKEDEPPEQAEPEPTEAWKVEKTHIEVTVPTSNGDQTQKLAEKTEDLIRMRKKKRERLDGENIYIRHSNLMLEDLDKSQEEIKKHHASISELKKNFMESVPEPRPSEWDKRLSTHSPFRTLNINGQIPTGEGPPLVKTQTVTISDNANAVKSEIPTKDVPIVHTETKTITYEAAQTDDNSGDLDPGVLLTAQTITSETPSSTTTTQITKTVKGGISETRIEKRIVITGDADIDHDQVLVQAIKEAKEQHPDMSVTKVVVHQETEIADE

SEQ ID NO: 862200 - protein, 794 aa, Homo sapiens
MTTEKSLVTEAENSQHQQKEEGEEAINSGQQEPQQEESCQTAAEGDNWCEQKLKASNGDTPTHEDLTKNKERTSESRGLSRLFSSFLKRPKSQVSEEEGKEVESDKEKGEGGQKEIEFGTSLDEEIILKAPIAAPEPELKTDPSLDLHSLSSAETQPAQEELREDPDFEIKEGEGLEECSKIEVKEESPQSKAETELKASQKPIRKHRNMHCKVSLLDDTVYECVVETWLDSAKEIKKQVRGVPWNFTFNVKFYPPDPAQLTEDITRYYLCLQLRQDIVAGRLPCSFATLALLGSYTIQSELGDYDPELHGVDYVSDFKLAPNQTKELEEKVMELHKSYRSMTPAQADLEFLENAKKLSMYGVDLHKAKDLEGVDIILGVCSSGLLVYKDKLRINRFPWPKVLKISYKRSSFFIKIRPGEQEQYESTIGFKLPSYRAAKKLWKVCVEHHTFFRLTSTDTIPKSKFLALGSKFRYSGRTQAQTRQASALIDRPAPHFERTASKRASRSLDGAAAVDSADRSPRPTSAPAITQGQVAEGGVLDASAKKTVVPKAQKETVKAEVKKEDEPPEQAEPEPTEAWKVEKTHIEVTVPTSNGDQTQDLDKSQEEIKKHHASISELKKNFMESVPEPRPSEWDKRLSTHSPFRTLNINGQIPTGEGPPLVKTQTVTISDNANAVKSEIPTKDVPIVHTETKTITYEAAQTDDNSGDLDPGVLLTAQTITSETPSSTTTTQITKTVKGGISETRIEKRIVITGDADIDHDQVLVQAIKEAKEQHPDMSVTKVVVHQETEIADE

SEQ ID NO: 862201 - protein, 250 aa, Homo sapiens
PAGRILENPLFAAGGVCGVHCRSPSCSQYTESHAKKRERLDGENIYIRHSNLMLEDLDKSQEEIKKHHASISELKKNFMESVPEPRPSEWDKRLSTHSPFRTLNINGQIPTGEGPPLVKTQTVTISDNANAVKSEIPTKDVPIVHTETKTITYEAAQTDDNSGDLDPGVLLTAQTITSETPSSTTTTQITKTVKGGISETRIEKRIVITGDADIDHDQVLVQAIKEAKEQHPDMSVTKVVVHQETEIADE

SEQ ID NO: 862202 - protein, 145 aa, Homo sapiens
MRFRGTQPNHIILPQSLPNLMSSHFKTSHAFPTKDVPIVHTETKTITYEAAQTDDNSGDLDPGVLLTAQTITSETPSSTTTTQITKTVKGGISETRIEKRIVITGDADIDHDQVLVQAIKEAKEQHPDMSVTKVVVHQETEIADE

SEQ ID NO: 862203 - protein, 864 aa, Homo sapiens; identical to SEQ ID NO: 862199

SEQ ID NO: 862204 - protein, 742 aa, Homo sapiens
MTTEKSLVTEAENSQHQQKEEGEEAINSGQQEPQQEESCQTAAEGDNWCEQKLKASNGDTPTHEDLTKNKERTSESRGLSRLFSSFLKRPKSQVSEEEGKEVESDKEKGEGGQKEIEFGTSLDEEIILKAPIAAPEPELKTDPSLDLHSLSSAETQPAQEELREDPDFEIKEGEGLEECSKIEVKEESPQSKAETELKASQKPIRKHRNMHCKVSLLDDTVYECVVETWLDSAKEIKKQVRGVPWNFTFNVKFYPPDPAQLTEDITRYYLCLQLRQDIVAGRLPCSFATLALLGSYTIQSELGDYDPELHGVDYVSDFKLAPNQTKELEEKVMELHKSYRSMTPAQADLEFLENAKKLSMYGVDLHKAKDLEGVDIILGVCSSGLLVYKDKLRINRFPWPKVLKISYKRSSFFIKIRPGEQEQYESTIGFKLPSYRAAKKLWKVCVEHHTFFRLTSTDTIPKSKFLALGSKFRYSGRTQAQTRQASALIDRPAPHFERTASKRASRSLDGAAAVDSADRSPRPTSAPAITQGQVAEGGVLDASAKKTVVPKAQKETVKAEVKKEDEPPEQAEPEPTEAWKDLDKSQEEIKKHHASISELKKNFMESVPEPRPSEWDKRLSTHSPFRTLNINGQIPTGEGPPLVKTQTVTISDNANAVKSEIPTKDVPIVHTETKTITYEAAQTDDNSGDLDPGVLLTAQTITSETPSSTTTTQITKVTDQLEPLYGTQGQAKLAATSLQEGP

SEQ ID NO: 862205 - protein, 824 aa, Homo sapiens
MTTEKSLVTEAENSQHQQKEEGEEAINSGQQEPQQEESCQTAAEGDNWCEQKLKASNGDTPTHEDLTKNKERTSESRGLSRLFSSFLKRPKSQVSEEEGKEVESDKEKGEGGQKEIEFGTSLDEEIILKAPIAAPEPELKTDPSLDLHSLSSAETQPHHYKLRIIFRVFLFLKHVNIISIVKSPAQEELREDPDFEIKEGEGLEECSKIEVKEESPQSKAETELKASQKPIRKHRNMHCKVSLLDDTVYECVVEKHAKGQDLLKRVCEHLNLLEEDYFGLAIWDNATSKTWLDSAKEIKKQVRGVPWNFTFNVKFYPPDPAQLTEDITRYYLCLQLRQDIVAGRLPCSFATLALLGSYTIQSELGDYDPELHGVDYVSDFKLAPNQTKELEEKVMELHKSYRSMTPAQADLEFLENAKKLSMYGVDLHKAKDLEGVDIILGVCSSGLLVYKDKLRINRFPWPKVLKISYKRSSFFIKIRPGEQEQYESTIGFKLPSYRAAKKLWKVCVEHHTFFRLTSTDTIPKSKFLALGSKFRYSGRTQAQTRQASALIDRPAPHFERTASKRASRSLDGAAAVDSADRSPRPTSAPAITQGQVAEGGVLDASAKKTVVPKAQKETVKAEVKKEDEPPEQAEPEPTEAWKKKRERLDGENIYIRHSNLMLEDLDKSQEEIKKHHASISELKKNFMESVPEPRPSEWDKRLSTHSPFRTLNINGQIPTGEGPPLVKTQTVTISDNANAVKSEIPTKDVPIVHTETKTITYEAAQTVKGGISETRIEKRIVITGDADIDHDQVLVQAIKEAKEQHPDMSVTKVVVHQETEIADE

SEQ ID NO: 862206 - protein, 775 aa, Homo sapiens
MTTEKSLVTEAENSQHQQKEEGEEAINSGQQEPQQEESCQTAAEGDNWCEQKLKASNGDTPTHEDLTKNKERTSESRGLSRLFSSFLKRPKSQVSEEEGKEVESDKEKGEGGQKEIEFGTSLDEEIILKAPIAAPEPELKTDPSLDLHSLSSAETQPAQEELREDPDFEIKEGEGLEECSKIEVKEESPQSKAETELKASQKPIRKHRNMHCKVSLLDDTVYECVVETWLDSAKEIKKQVRGVPWNFTFNVKFYPPDPAQLTEDITRYYLCLQLRQDIVAGRLPCSFATLALLGSYTIQSELGDYDPELHGVDYVSDFKLAPNQTKELEEKVMELHKSYRSMTPAQADLEFLENAKKLSMYGVDLHKAKDLEGVDIILGVCSSGLLVYKDKLRINRFPWPKVLKISYKRSSFFIKIRPGEQEQYESTIGFKLPSYRAAKKLWKVCVEHHTFFRLTSTDTIPKSKFLALGSKFRYSGRTQAQTRQASALIDRPAPHFERTASKRASRSLDGAAAVDSADRSPRPTSAPAITQGQVAEGGVLDASAKKTVVPKAQKETVKAEVKKEDEPPEQAEPEPTEAWKDLDKSQEEIKKHHASISELKKNFMESVPEPRPSEWDKRLSTHSPFRTLNINGQIPTGEGPPLVKTQTVTISDNANAVKSEIPTKDVPIVHTETKTITYEAAQTDDNSGDLDPGVLLTAQTITSETPSSTTTTQITKTVKGGISETRIEKRIVITGDADIDHDQVLVQAIKEAKEQHPDMSVTKVVVHQETEIADE

SEQ ID NO: 862207 - protein, 824 aa, Homo sapiens; identical to SEQ ID NO: 862205

SEQ ID NO: 862208 - protein, 172 aa, Homo sapiens [sequence omitted]

SEQ ID NO: 862209 - protein, 824 aa, Homo sapiens; identical to SEQ ID NO: 862205

SEQ ID NO: 862210 - protein, 864 aa, Homo sapiens; identical to SEQ ID NO: 862199

SEQ ID NO: 862211 - protein, 423 aa, Homo sapiens
MKLCSLAVLVPIVLFCEQHVFAFQSGQVLAALPRTSRQVQVLQNLTTTYEIVLWQPVTADLIVKKKQVHFFVNASDVDNVKAHLNVSGIPCSVLLADVEDLIQQQISNDTVSPRASASYYEQYHSLNEIYSWIEFITERHPDMLTKIHIGSSFEKYPLYVLKVSGKEQAAKNAIWIDCGIHAREWISPAFCLWFIGHITQFYGIIGQYTNLLRLVDFYVMPVVNVDGYDYSWKKNRMWRKNRSFYANNHCIGTDLNRNFASKHWCEEGASSSSCSETYCGLYPESEPEVKAVASFLRRNINQIKAYISMHSYSQHIVFPYSYTRSKSKDHEELSLVASEAVRAIEKTSKNTRYTHGHGSETLYLAPGGGDDWIYDLGIKYSFTIELRDTGTYGFLLPERYIKPTCREAFAAVSKIAWHVIRNV

SEQ ID NO: 862212 - protein, 360 aa, Homo sapiens
MKLCSLAVLVPIVLFCEQHVFAFQSGQVLAALPRTSRQVQVLQNLTTTYEIVLWQPVTADLIVKKKQVHFFVNASDVDNVKAHLNVSGIPCSVLLADVEDLIQQQISNDTVSPRASASYYEQYHSLNEIYSWIEFITERHPDMLTKIHIGSSFEKYPLYVLKVSGKEQAAKNAIWIDCGIHAREWISPAFCLWFIGHNRMWRKNRSFYANNHCIGTDLNRNFASKHWCEEGASSSSCSETYCGLYPESEPEVKAVASFLRRNINQIKAYISMHSYSQHIVFPYSYTRSKSKDHEELSLVASEAVRAIEKTSKNTRYTHGHGSETLYLAPGGGDDWIYDLGIKYSFTSNPPVEKLLPLSLK

SEQ ID NO: 862213 - protein, 402 aa, Homo sapiens
MKLCSLAVLVPIVLFCEQHVFAFQSGQVLAALPRTSRQVQVLQNLTTTYEIVLWQPVTADLIVKKKQVHFFVNASDVDNVKAHLNVSGIPCSVLLADVEDLIQQQISNDTVSPRASASYYEQYHSLNEIYSWIEFITERHPDMLTKIHIGSSFEKYPLYVLKFWEPATFCLWFIGHITQFYGIIGQYTNLLRLVDFYVMPVVNVDGYDYSWKKNRMWRKNRSFYANNHCIGTDLNRNFASKHWCEEGASSSSCSETYCGLYPESEPEVKAVASFLRRNINQIKAYISMHSYSQHIVFPYSYTRSKSKDHEELSLVASEAVRAIEKTSKNTRYTHGHGSETLYLAPGGGDDWIYDLGIKYSFTIELRDTGTYGFLLPERYIKPTCREAFAAVSKIAWHVIRNV

SEQ ID NO: 862214 - protein, 404 aa, Homo sapiens
MKLCSLAVLVPIVLFCEQHVFAFQSGQVLAALPRTSRQVQVLQNLTTTYEIVLWQPVTADLIVKKKQVHFFVNASDVDNVKAHLNVSGIPCSVLLADVEDLIQQQISNDTVSPRASASYYEQYHSLNEIYSWIEFITERHPDMLTKIHIGSSFEKYPLYVLKVSGKEQAAKNAIWIDCGIHAREWISPAFCLWFIGHITQFYGIIGQYTNLLRLVDFYVMPVVNVDGYDYSWKKQPWIGTLLSTLGEEGASSSSCSETYCGLYPESEPEVKAVASFLRRNINQIKAYISMHSYSQHIVFPYSYTRSKSKDHEELSLVASEAVRAIEKTSKNTRYTHGHGSETLYLAPGGGDDWIYDLGIKYSFTIELRDTGTYGFLLPERYIKPTCREAFAAVSKIAWHVIRNV

SEQ ID NO: 862215 - protein, 281 aa, Homo sapiens
MLTKIHIGSSFEKYPLYVLKVSGKEQAAKNAIWIDCGIHAREWISPAFCLWFIGHITQFYGIIGQYTNLLRLVDFYVMPVVNVDGYDYSWKKNRMWRKNRSFYANNHCIGTDLNRNFASKHWCEEGASSSSCSETYCGLYPESEPEVKAVASFLRRNINQIKAYISMHSYSQHIVFPYSYTRSKSKDHEELSLVASEAVRAIEKTSKNTRYTHGHGSETLYLAPGGGDDWIYDLGIKYSFTIELRDTGTYGFLLPERYIKPTCREAFAAVSKIAWHVIRNV

SEQ ID NO: 862216 - protein, 417 aa, Homo sapiens
MKLCSLAVLVPIVLFCEQHVFAFQSGQVLAALPRTSRQVQVLQNLTTTYEIVLWQPVTADLIVKKKQVHFFVNASDVDNVKAHLNVSGIPCSVLLADVEDLIQQQISNDTVSPRASASYYEQYHSLNEIYSWIEFITERHPDMLTKIHIGSSFEKYPLYVLKVSGKEQAAKNAIWIDCGIHAREWISPAFCLWFIGHITQFYGIIGQYTNLLRLVDFYVMPVVNVDGYDYSWKKNRMWRKNRSFYANNHCIGTDLNRNFASKHWCEEGASSSSCSETYCGLYPESEPEVKAVASFLRRNINQIKAYISMHSYSQHIVFPYSYTRSKSKDHEELSLVASEAVRAIEKTSKNTRYTHGHGSETLYLAPGGGDDWIYDLGIKYSFTIELRDTGTYGFLLPERYIKPTCREAFAAVSASVF

SEQ ID NO: 862217 - protein, 423 aa, Homo sapiens; identical to SEQ ID NO: 862211

SEQ ID NO: 862218 - protein, 200 aa, Homo sapiens
MKLCSLAVLVPIVLFCEQHVFAFQSGQVLAALPRTSRQVQVLQNLTTTYEIVLWQPVTADLIVKKKQVHFFVNASDVDNVKAHLNVSGIPCSVLLADVEDLIQQQISNDTVSPRASASYYEQYHSLNEIYSWIEFITERHPDMLTKIHIGSSFEKYPLYVLKVSGKEQAAKNAIWIDCGIHAREWISPAFCLWFIGHVTS

SEQ ID NO: 862219 - protein, 423 aa, Homo sapiens; identical to SEQ ID NO: 862211

SEQ ID NO: 862220 - protein, 405 aa, Homo sapiens
MKLCSLAVLVPIVLFCEQHVFAFQSGQVLAALPRTSRQVQVLQNLTTTYEIVLWQPVTADLIVKNLNVSGIPCSVLLADVEDLIQQQISNDTVSPRASASYYEQYHSLNEIYSWIEFITERHPDMLTKIHIGSSFEKYPLYVLKVSGKEQAAKNAIWIDCGIHAREWISPAFCLWFIGHITQFYGIIGQYTNLLRLVDFYVMPVVNVDGYDYSWKKNRMWRKNRSFYANNHCIGTDLNRNFASKHWCEEGASSSSCSETYCGLYPESEPEVKAVASFLRRNINQIKAYISMHSYSQHIVFPYSYTRSKSKDHEELSLVASEAVRAIEKTSKNTRYTHGHGSETLYLAPGGGDDWIYDLGIKYSFTIELRDTGTYGFLLPERYIKPTCREAFAAVSKIAWHVIRNV

SEQ ID NO: 862221 - protein, 290 aa, Homo sapiens
MKLCSLAVLVPIVLFCEQHVFAFQSGQVLAALPRTSRQVQVLQNLTTTYEIVLWQPVTADLIVKKKQVHFFVNASDVDNVKAHLNVSGIPCSVLLADVEDLIQQQISNDTVSPRASASYYEQYHSLNEIYSWIEFITERHPDMLTKIHIGSSFEKYPLYVLKVSGKEQAAKNAIWIDCGIHAREWISPAFCLWFIGHITQFYGIIGQYTNLLRLVDFYVMPVVNVDGYDYSWKKNRMWRKNRSFYANNHCIGTDLNRNFASKHWCALFTRAKTWNQSRCLSMADWIKKMW

SEQ ID NO: 862222 - protein, 126 aa, Homo sapiens
MQIYSWIEFITERHPDMLTKIHIGSSFEKYPLYVLKSLVASEAVRAIEKTSKNTRYTHGHGSETLYLAPGGGDDWIYDLGIKYSFTIELRDTGTYGFLLPERYIKPTCREAFAAVSKIAWHVIRNV

SEQ ID NO: 862223 - protein, 890 aa, Homo sapiens
MSQGILSPPAGLLSDDDVVVSPMFESTAADLGSVVRKNLLSDCSVVSTSLEDKQQVPSEDSMEKVKVYLRVRPLLPSELERQEDQGCVRIENVETLVLQAPKDSFALKSNERGIGQATHRFTFSQIFGPEVGQASFFNLTVKEMVKDVLKGQNWLIYTYGVTNSGKTHTIQGTIKDGGILPRSLALIFNSLQGQLHPTPDLKPLLSNEVIWLDSKQIRQEEMKKLSLLNGGLQEEELSTSLKRSVYIESRIGTSTSFDSGIAGLSSISQCTSSSQLDETSHRWAQPDTAPLPVPANIRFSIWISFFEIYNELLYDLLEPPSQQRKRQTLRLCEDQNGNPYVKDLNWIHVQDAEEAWKLLKVGRKNQSFASTHLNQNSSRSHSIFSIRILHLQGEGDIVPKISELSLCDLAGSERCKDQKSGERLKEAGNINTSLHTLGRCIAALRQNQQNRSKQNLVPFRDSKLTRVFQGFFTGRGRSCMIVNVNPCASTYDETLHVAKFSAIASQLVHAPPMQLGFPSLHSFIKEHSLQVSPSLEKGAKADTGLDDDIENEADISMYGKEELLQVVEAMKTLLLKERQEKLQLEMHLRDEICNEMVEQMQQREQWCSEHLDTQKELLEEMYEEKLNILKESLTSFYQEEIQERDEKIEELEALLQEARQQSVAHQQSGSELALRRSQRLAASASTQQLQEVKAKLQQCKAELNSTTEELHKYQKMLEPPPSAKPFTIDVDKKLEEGQKNIRLLRTELQKLGESLQSAERACCHSTGAGKLRQALTTCDDILIKQDQTLAELQNNMVLVKLDLRKKAACIAEQYHTVLKLQGQVSAKKRLGTNQENQQPNQQPPGKKPFLRNLLPRTPTCQSSTDCSPYARILRSRRSPLLKSGPFGKKY

SEQ ID NO: 862224 - protein, 890 aa, Homo sapiens; identical to SEQ ID NO: 862223

SEQ ID NO: 862225 - protein, 650 aa, Homo sapiens [sequence omitted]

SEQ ID NO: 862226 - protein, 890 aa, Homo sapiens; identical to SEQ ID NO: 862223

SEQ ID NO: 862227 - protein, 890 aa, Homo sapiens; identical to SEQ ID NO: 862223

SEQ ID NO: 862228 - protein, 190 aa, Homo sapiens
GAGRGRSAGRRLLWRLPRLRLAASGPAPVTLGRARPRPARRRSPMAPSRLQLGLRAAYSGISSVAGFSIFLVWTVVYRQPGTAAMGGLAGVLALWVLVTHVMYMQDYWRTWLKGLRGFFFVGVLFSAVSIAAFCTFLVLAITRHQSLTDPTSYYLSSVWSFISFKWAFLLSLYAHRYRADFADISILSDF

SEQ ID NO: 862229 - protein, 92 aa, Homo sapiens
PPYPPSCFFSSSHSRAGSSKRLGGPQRPPSALIRGSGGCQWVICCVHTLRNAGGVLNASPGKEESLRMNLTSDPNPFNGVLVIWKKEEQPGN

SEQ ID NO: 862230 - protein, 146 aa, Homo sapiens
KPRLGTSLVVNRPRGRLSSVAGFSIFLVWTVVYRQPGTAAMGGLAGVLALWVLVTHVMYMQDYWRTWLKGLRGFFFVGVLFSAVSIAAFCTFLVLAITRHQSLTDPTSYYLSSVWSFISFKWAFLLSLYAHRYRADFADISILSDF

SEQ ID NO: 862231 - protein, 190 aa, Homo sapiens; identical to SEQ ID NO: 862228

SEQ ID NO: 862232 - protein, 160 aa, Homo sapiens [sequence omitted]

SEQ ID NO: 862233 - protein, 190 aa, Homo sapiens; identical to SEQ ID NO: 862228

SEQ ID NO: 862234 - protein, 190 aa, Homo sapiens; identical to SEQ ID NO: 862228

SEQ ID NO: 862235 - protein, 150 aa, Homo sapiens
MMGLPMWILSAVAEALVIVLGFSLQLPAGSWAHVGAQCPPATDLSLPYNGVLALWVLVTHVMYMQDYWRTWLKGLRGFFFVGVLFSAVSIAAFCTFLVLAITRHQSLTDPTSYYLSSVWSFISFKWAFLLSLYAHRYRADFADISILSDF

SEQ ID NO: 862236 - protein, 118 aa, Homo sapiens
KPRLGTSLVVNRPRGRLRVLALWVLVTHVMYMQDYWRTWLKGLRGFFFVGVLFSAVSIAAFCTFLVLAITRHQSLTDPTSYYLSSVWSFISFKWAFLLSLYAHRYRADFADISILSDF

SEQ ID NO: 862237 - protein, 160 aa, Homo sapiens [sequence omitted]

SEQ ID NO: 862238 - protein, 190 aa, Homo sapiens; identical to SEQ ID NO: 862228

SEQ ID NO: 862239 - protein, 190 aa, Homo sapiens; identical to SEQ ID NO: 862228

SEQ ID NO: 862240 - protein, 138 aa, Homo sapiens
AQDGDETAIAPRPTHLLTWARLSRSQSRSAGAKTIDNRPHDPGRDTERGSTKTGRHARDSSVVHRAYSAKDTQAHGHTHTNPQRVGKKHTETERQREKGEWETHTHTNKGSYSRGIETHTTRQPLRLRGSAVNQNDPR

SEQ ID NO: 862241 - protein, 690 aa, Homo sapiens
MGSSGLGKAATLDELLCTCIEMFDDNGELDNSYLPRIVLLMHRWYLSSTELAEKLLCMYRNATGESCNEFRLKICYFMRYWILKFPAEFNLDLGLIRMTEEFREVASQLGYEKHVSLIDISSIPSYDWMRRVTQRKKVSKKGKACLLFDHLEPIELAEHLTFLEHKSFRRISFTDYQSYVIHGCLENNPTLERSIALFNGISKWVQLMVLSKPTPQQRAEVITKFINVAKKLLQLKNFNTLMAVVGGLSHSSISRLKETHSHLSSEVTKNWNEMTELVSSNGNYCNYRKAFADCDGFKIPILGVHLKDLIAVHVIFPDWTEENKVNIVKMHQLSVTLSELVSLQNASHHLEPNMDLINLLTLSLDLYHTEDDIYKLSLVLEPRNSKSQPTSPTTPNKPVVPLEWALGVMPKPDPTVINKHIRKLVESVFRNYDHDHDGYISQEDFESIAANFPFLDSFCVLDKDQDGLISKDEMMAYFLRAKSQLHCKMGPGFIHNFQEMTYLKPTFCEHCAGFLWGIIKQGYKCKDCGANCHKQCKDLLVLACRRFARAPSLSSGHGSLPGSPSLPPAQDEVFEFPGVTAGHRDLDSRAITLVTGSSRKISVRLQRATTSQATQTEPVWSEAGWGDSGSHTFPKMKSKFHDKAAKDKGFAKWENEKPRVHAGVDVVDRGTEFELDQDEGEETRQDGEDG

SEQ ID NO: 862242 - protein, 690 aa, Homo sapiens; identical to SEQ ID NO: 862241

SEQ ID NO: 862243 - protein, 690 aa, Homo sapiens; identical to SEQ ID NO: 862241

SEQ ID NO: 862244 - protein, 108 aa, Homo sapiens
MFPQSHLKNCFLGTLLFCYMRSSHAIGSNLCFRMADFRLRKLKAIMLAFGRGKTRNSEESSDSQEVIWKDTWMFTALGHCGISMFGLWDRELTLTNYELFISSSPTPS

SEQ ID NO: 862245 - protein, 690 aa, Homo sapiens; identical to SEQ ID NO: 862241

SEQ ID NO: 862246 - protein, 429 aa, Homo sapiens
MGSSGLGKAATLDELLCTCIEMFDDNGELDNSYLPRIVLLMHRWYLSSTELAEKLLCMYRNATGESCNEFRLKICYFMRYWILKFPAEFNLDLGLIRMTEEFREVASQLGYEKHVSLIDISSIPSYDWMRRVTQRKKVSKKGKACLLFDHLEPIELAEHLTFLEHKSFRRISFTDYQSYVIHGCLENNPTLERSIALFNGISKWVQLMVLSKPTPQQRAEVITKFINVAKKLLQLKNFNTLMAVVGGLSHSSISRLKETHSHLSSEVTKNWNEMTELVSSNGNYCNYRKAFADCDGFKIPILGVHLKDLIAVHVIFPDWTEENKVNIVKMHQLSVTLSELVSLQNASHHLEPNMDLINLLTLSLDLYHTEDDIYKLSLVLEPRNSKSQPTSPTTPNKPVVPLEWALGVMPKPDPTVINKHIRKLVEVSG

SEQ ID NO: 862247 - protein, 375 aa, Homo sapiens
MGSSGLGKAATLDELLCTCIEMFDDNGELDNSYLPRIVLLMHRWYLSSTELAEKLLCMYRNATGESCNEFRLKICYFMRYWILKFPAEFNLDLGLIRMTEEFREVASQLGYEKHVSLIDISSIPSYDWMRRVTQRKKVSKKGKACLLFDHLEPIELAEHLTFLEHKSFRRISFTDYQSYVIHGCLENNPTLERSIALFNGISKWVQLMVLSKPTPQQRAEVITKFINVAKKLLQLKNFNTLMAVVGGLSHSSISRLKETHSHLSSEVTKNWNEMTELVSSNGNYCNYRKAFADCDGFKIPILGVHLKDLIAVHVIFPDWTEENKVNIVKMHQLSVTLSELVSLQNASHHLEPNMDLINLLTGISGEDICLTSQFT

SEQ ID NO: 862248 - protein, 690 aa, Homo sapiens; identical to SEQ ID NO: 862241

SEQ ID NO: 862249 - protein, 690 aa, Homo sapiens; identical to SEQ ID NO: 862241

SEQ ID NO: 862250 - protein, 690 aa, Homo sapiens; identical to SEQ ID NO: 862241

SEQ ID NO: 862251 - protein, 429 aa, Homo sapiens; identical to SEQ ID NO: 862246

SEQ ID NO: 862252 - protein, 147 aa, Homo sapiens
MSYPTRDPSGRLISYVCSALEATFQHLLFPDFLMIAILTGVRWYLIVVKSFCTAKETTIRVNRQPTEWEKIFAIYSSDKGLISRIYNELQQIYKKKTTPSKVGKGYEQTLSKEDIYAAKRHKKKCSSSLAIRETQIRRRLFNLFFSL

SEQ ID NO: 862253 - protein, 114 aa, Homo sapiens
MIAILTGVRWYLIVVKSFCTAKETTIRVNRQPTEWEKIFAIYSSDKGLISRIYNELQQIYKKKTTPSKVGKGYEQTLSKEDIYAAKRHKKKCSSSLAIRETQIRRRLFNLFFSL

SEQ ID NO: 862254 - protein, 588 aa, Homo sapiens
SPGAGRTGRGPGSGKAPPAEISSGAPDFPGGKANVVGGGAGLGGGGSSLRDLKAPLASGGVANHAGGGGLDAGHQAVLRAASEKAVKMAASWRLGCDPRLLRYLVGFPGRRSVGLVKGALGWSVSRGANWRWFHSTQWLRGDPIKILMPSLSPTMEEGNIVKWLKKEGEAVSAGDALCEIETDKAVVTLDASDDGILAKIVVEEGSKNIRLGSLIGLIVEEGEDWKHVEIPKDVGPPPPVSKPSEPRPSPEPQISIPVKKEHIPGTLRFRLSPAARNILEKHSLDASQGTATGPRGIFTKEDALKLVQLKQTGKITESRPTPAPTATPTAPSPLQATAGPSYPRPVIPPVSTPGQPNAVGTFTEIPASNIRRVIAKRLTESKSTVPHAYATADCDLGAVLKVRQDLVKDDIKVSVNDFIIKAAAVTLKQMPDVNVSWDGEGPKQLPFIDISVAVATDKGLLTPIIKDAAAKGIQEIADSVKALSKKARDGKLLPEEYQGGSFSISNLGMFGIDEFTAVINPPQACILAVGRFRPVLKLTEDEEGNAKLQQRQLITVTMSSDSRVVDDELATRFLKSFKANLENPIRLA

SEQ ID NO: 862255 - protein, 588 aa, Homo sapiens; identical to SEQ ID NO: 862254

SEQ ID NO: 862256 - protein, 478 aa, Homo sapiens
SPGAGRTGRGPGSGKAPPAEISSGAPDFPGGDPIKILMPSLSPTMEEGNIVKWLKKEGEAVSAGDALCEIETDKAVVTLDASDDGILAKIVVEEGSKNIRLGSLIGLIVEEGEDWKHVEIPKDVGPPPPVSKPSEPRPSPEPQISIPVKKEHIPGTLRFRLSPAARNILEKHSLDASQGTATGPRGIFTKEDALKLVQLKQTGKITESRPTPAPTATPTAPSPLQATAGPSYPRPVIPPVSTPGQPNAVGTFTEIPASNIRRVIAKRLTESKSTVPHAYATADCDLGAVLKVRQDLVKDDIKVSVNDFIIKAAAVTLKQMPDVNVSWDGEGPKQLPFIDISVAVATDKGLLTPIIKDAAAKGIQEIADSVKALSKKARDGKLLPEEYQGGSFSISNLGMFGIDEFTAVINPPQACILAVGRFRPVLKLTEDEEGNAKLQQRQLITVTMSSDSRVVDDELATRFLKSFKANLENPIRLA

SEQ ID NO: 862257 - protein, 460 aa, Homo sapiens
SPGAGRTGRGPGSGKAPPAEISSGAPDFPGGDPIKILMPSLSPTMEEGNIVKWLKKEGEAVSAGDALCEIETDKAVVTLDASDDGILAKIVVEEGSKNIRLGSLIGLIVEEGEDWKHVEIPKDVGPPPPVSKEHIPGTLRFRLSPAARNILEKHSLDASQGTATGPRGIFTKEDALKLVQLKQTGKITESRPTPAPTATPTAPSPLQATAGPSYPRPVIPPVSTPGQPNAVGTFTEIPASNIRRVIAKRLTESKSTVPHAYATADCDLGAVLKVRQDLVKDDIKVSVNDFIIKAAAVTLKQMPDVNVSWDGEGPKQLPFIDISVAVATDKGLLTPIIKDAAAKGIQEIADSVKALSKKARDGKLLPEEYQGGSFSISNLGMFGIDEFTAVINPPQACILAVGRFRPVLKLTEDEEGNAKLQQRQLITVTMSSDSRVVDDELATRFLKSFKANLENPIRLA

SEQ ID NO: 862258 - protein, 518 aa, Homo sapiens
SPGAGRTGRGPGSGKAPPAEISSGAPDFPGGKANVVGGGAGLGGGGSSLRDLKAPLASGGVANHAGGGGLDAGHQAVLRAASEKAVKMAASWRLGCDPRLLRYLVGFPGRRSVGLVKGALGWSVSRGANWRWFHSTQWLRGDPIKILMPSLSPTMEEGNIVKWLKKEGEAVSAGDALCEIETDKAVVTLDASDDGILAKIVVEEGSKNIRLGSLIGLIVEEGEDWKHVEIPKDVGPPPPVSKPSEPRPSPEPQISIPVKKEHIPGTLRFRLSPAARNILEKHSLDASQGTATGPRGIFTKEDALKLVQLKQTGKITESRPTPAPTATPTAPSPLQATAGPSYPRPVIPPVSTPGQPNAVGTFTEIPASNIRRVIAKRLTESKSTVPHAYATADCDLGAVLKVRQDLVKDDIKVSVNDFIIKAAAVTLKQMPDVNVSWDGEGPKQLPFIDISVAVATDKGLLTPIIKDAAAKGIQEIADSVKALSKKARDGKLLPEEYQGGSFRWSLALSPRLQCSGMI

SEQ ID NO: 862259 - protein, 588 aa, Homo sapiens; identical to SEQ ID NO: 862254

SEQ ID NO: 862260 - protein, 588 aa, Homo sapiens; identical to SEQ ID NO: 862254

SEQ ID NO: 862261 - protein, 361 aa, Homo sapiens
SPGAGRTGRGPGSGKAPPAEISSGAPDFPGGKANVVGGGAGLGGGGSSLRDLKAPLASGGVANHAGGGGLDAGHQAVLRAASEKAVKMAASWRLGCDPRLLRYLVGFPGRRSVGLVKGALGWSVSRGANWRWFHSTQWLRGDPIKILMPSLSPTMEEGNIVKWLKKEGEAVSAGDALCEIETDKAVVTLDASDDGILAKIVQMPDVNVSWDGEGPKQLPFIDISVAVATDKGLLTPIIKDAAAKGIQEIADSVKALSKKARDGKLLPEEYQGGSFSISNLGMFGIDEFTAVINPPQACILAVGRFRPVLKLTEDEEGNAKLQQRQLITVTMSSDSRVVDDELATRFLKSFKANLENPIRLA

SEQ ID NO: 862262 - protein, 711 aa, Homo sapiens
MESGAVLLESKSSPFNLLHEMHELRLLGHLCDVTVSVEYQGVRKDFMAHKAVLAATSKFFKEVFLNEKSVDGTRTNVYLNEVQVADFASFLEFVYTAKVQVEEDRVQRMLEVAEKLKCLDLSETCFQLKKQMLESVLLELQNFSESQEVEVSSGSQVSAAPAPRASVATDGPHPSGLTDSLDYPGERASNGMSSDLPPKKSKDKLDKKKEVVKPPYPKIRRASGRLAGRKVFVEIPKKKYTRRLREQQKTAEGDVGDYRCPQDQSPDRVGTEMEQVSKNEGCQAGAELEELSKKAGPEEEEEEEEEDEEGEKKKSNFKCSICEKAFLYEKSFLKHSKHRHGVATEVVYRCDTCGQTFANRCNLKSHQRHVHSSERHFPCELCGKKFKRKKDVKRHVLQVHEGGGERHRCGQCGKGLSSKTALRLHERTHTGDRPYGCTECGARFSQPSALKTHMRIHTGEKPFVCDECGARFTQNHMLIYHKRCHTGERPFMCETCGKSFASKEYLKHHNRIHTGSKPFKCEVCFRTFAQRNSLYQHIKVHTGERPYCCDQCGKQFTQLNALQRHRRIHTGERPFMCNACGRTFTDKSTLRRHTSIHDKNTPWKSFLVIVDGSPKNDDGHKTEQPDEEYVSSKLSDKLLSFAENGHFHNLAAVQDTVPTMQENSSADTACKADDSVVSQDTLLATTISELSELTPQTDSMPTQLHSLSNME

SEQ ID NO: 862263 - protein, 711 aa, Homo sapiens; identical to SEQ ID NO: 862262

SEQ ID NO: 862264 - protein, 127 aa, Homo sapiens
DSGCSGGAGWEIHDKNTPWKSFLVIVDGSPKNDDGHKTEQPDEEYVSSKLSDKLLSFAENGHFHNLAAVQDTVPTMQENSSADTACKADDSVVSQDTLLATTISELSELTPQTDSMPTQLHSLSNME

SEQ ID NO: 862265 - protein, 711 aa, Homo sapiens; identical to SEQ ID NO: 862262

SEQ ID NO: 862266 - protein, 711 aa, Homo sapiens; identical to SEQ ID NO: 862262

SEQ ID NO: 862267 - protein, 679 aa, Homo sapiens
MESGAVLLESKSSPFNLLHEMHELRLLGHLCDVTVSVEYQGVRKDFMAHKAVLAATSKFFKEVFLNEKSVDGTRTNVYLNEVQVADFASFLEFVYTAKVQVEEDRVQRMLEVAEKLKCLDLSETCFQLKKQMLESVLLELQNFSESQEVEVSSGSQVSAAPAPRASVATDGPHPSGLTDSLDYPGERASNGMSSDLPPKKSKDKLDKKKEVVKPPYPKIRRASGRLAGRKVFVEIPKKKYTRRLREQQKTAEGDVGDYRCPQDQSPDRVGTEMEQVSKNEGCQAGAELEELSKKAGPEEEEEEEEEDEEGEKKKSNFKCSICEKAFLYEKSFLKHSKHRHGVATEVVYRCDTCGQTFANRCNLKSHQRHVHSSERHFPCELCGKKFKRKKDVKRHVLQVHEGGGERHRCGQCGKGLSSKTALRLHERTHTGDRPYGCTECGARFSQPSALKTHMRERPFMCETCGKSFASKEYLKHHNRIHTGSKPFKCEVCFRTFAQRNSLYQHIKVHTGERPYCCDQCGKQFTQLNALQRHRRIHTGERPFMCNACGRTFTDKSTLRRHTSIHDKNTPWKSFLVIVDGSPKNDDGHKTEQPDEEYVSSKLSDKLLSFAENGHFHNLAAVQDTVPTMQENSSADTACKADDSVVSQDTLLATTISELSELTPQTDSMPTQLHSLSNME

SEQ ID NO: 862268 - protein, 455 aa, Homo sapiens
MESGAVLLESKSSPFNLLHEMHELRLLGHLCDVTVSVEYQGVRKDFMAHKAVLAATSKFFKEVFLNEKSVDGTRTNVYLNEVQVADFASFLEFVYTAKVQVEEDRVQRMLEVAEKLKCLDLSETCFQLKKQMLESVLLELQNFSESQEVEVSSGSQVSAAPAPRASVATDGPHPSGLTDSLDYPGERASNGMSSDLPPKKSKDKLDKKKEVVKPPYPKIRRASGRLAGRKVFVEIPKKKYTRRLREQQKTAEGDVGDYRCPQDQSPDRVGTEMEQVSKNEGCQAGAELEELSKKAGPEEEEEEEEEDEEGEKKKSNFKCSICEKAFLYEKSFLKHSKHRHGVATEVVYRCDTCGQTFANRCNLKSHQRHVHSSERHFPCELCGKKFKRKKDVKRHVLQVHEGGGERHRCGQCGKGLSSKTALRLHERTHTGDRPYGCTECGARFSQPSALKTHMR

SEQ ID NO: 862269 - protein, 125 aa, Homo sapiens
WNAYMSLDPRQAPYPVSSLGGFNCPETEVSFLFRPFPRLLLAVLVRARAQRASSPCLGKLRKSRTSCSQPDRKDAKSVKIKKNKDNVKFKVRCSRYLYTLVITDKEKAEKLKQSLPPGLAVKELK

SEQ ID NO: 862270 - protein, 109 aa, Homo sapiens
  misc_feature (11)..(11): Xaa can be any naturally occurring amino acid
LFGPLFSVCCXARERTRGVYTVGRDKVLVRARAQRASSPCLGKLRKSRTSCSQPDRKDAKSVKIKKNKDNVKFKVRCSRYLYTLVITDKEKAEKLKQSLPPGLAVKELK

SEQ ID NO: 862271 - protein, 90 aa, Homo sapiens
AAAYYYYYCSEFKLLTMYGDSLGKLRKSRTSCSQPDRKDAKSVKIKKNKDNVKFKVRCSRYLYTLVITDKEKAEKLKQSLPPGLAVKELK

SEQ ID NO: 862272 - protein, 149 aa, Homo sapiens
SPLFLQSESSRLLMDRSGVKVVLIMYLLIDPHKKKCEVFFYYLSFIKQRPLLGGGLGEHISNLNEMKSIFSENLLTLKKSLGKLRKSRTSCSQPDRKDAKSVKIKKNKDNVKFKVRCSRYLYTLVITDKEKAEKLKQSLPPGLAVKELK

SEQ ID NO: 862273 - protein, 116 aa, Homo sapiens
AAAYYYYYCSEFKLLTMYGDMEFQKINIQGPSFKFSSNVIHKVDNTCLGKLRKSRTSCSQPDRKDAKSVKIKKNKDNVKFKVRCSRYLYTLVITDKEKAEKLKQSLPPGLAVKELK

SEQ ID NO: 862274 - protein, 109 aa, Homo sapiens; identical to SEQ ID NO: 862270
  misc_feature (11)..(11): Xaa can be any naturally occurring amino acid

SEQ ID NO: 862275 - protein, 173 aa, Homo sapiens
MGGPGAEGVITGFGSLAETRPLAGRVGWDRSQMLLGTYTQSSLPTLWPLERAALCRRQTALAPYCGWTAQLPVANTPGNQGWQWGVPAGPSSFMARGRTTFIRHTHALQGEGYPESAGRSRFPGCDLGQPVGGSFTAPVCAIPGWHTRRWLWYGLPRRDPQSHLPRVARRRYN

SEQ ID NO: 862276 - protein, 65 aa, Homo sapiens
IPIIHEHEEDAKSVKIKKNKDNVKFKVRCSRYLYTLVITDKEKAEPAVAQIAPLHSSLGDSETPP

SEQ ID NO: 862277 - protein, 94 aa, Homo sapiens
KFSGRVDWVRKVLVRARAQRASSPCLGKLRKSRTSCSQPDRKDAKSVKIKKNKDNVKFKVRCSRYLYTLVITDKEKAEKLKQSLPPGLAVKELK

SEQ ID NO: 862278 - protein, 117 aa, Homo sapiens
  misc_feature (3)..(3): Xaa can be any naturally occurring amino acid
  misc_feature (5)..(6): Xaa can be any naturally occurring amino acid
IDXPXXGPRAIVLKPANSAIMAGLFRPFPRLLLAVLVRARAQRASSPCLGKLRKSRTSCSQPDRKDAKSVKIKKNKDNVKFKVRCSRYLYTLVITDKEKAEKLKQSLPPGLAVKELK

SEQ ID NO: 862279 - protein, 40 aa, Homo sapiens
  misc_feature (2)..(2): Xaa can be any naturally occurring amino acid
MXDAAANSGGPRGCEKTTGGSTHADASALRILFSSLILSL

SEQ ID NO: 862280 - protein, 117 aa, Homo sapiens; identical to SEQ ID NO: 862278
  misc_feature (3)..(3): Xaa can be any naturally occurring amino acid
  misc_feature (5)..(6): Xaa can be any naturally occurring amino acid

SEQ ID NO: 862281 - protein, 97 aa, Homo sapiens
TTTKFAAARRLLLAVLVRARAQRASSPCLGKLRKSRTSCSQPDRKDAKSVKIKKNKDNVKFKVRCSRYLYTLVITDKEKAEKLKQSLPPGLAVKELK

SEQ ID NO: 862282 - protein, 94 aa, Homo sapiens; identical to SEQ ID NO: 862277

SEQ ID NO: 862283 - protein, 111 aa, Homo sapiens
FLCLLFVSDDQGVKVSAASNFKLHVVLIFLDLDRFGIASSPCLGKLRKSRTSCSQPDRKDAKSVKIKKNKDNVKFKVRCSRYLYTLVITDKEKAEKLKQSLPPGLAVKELK

SEQ ID NO: 862284 - protein, 90 aa, Homo sapiens
PCNPSSRTWVRKVLVRARAQRASSPCLGKLRKSRTSCSQPDRKDAKSVKIKKNKDNVKFKVRCSRYLYTLVITDKEKAEKLKQSLPPVAE

SEQ ID NO: 862285 - protein, 97 aa, Homo sapiens
LVLTGSLACQWVRKVLVRARAQRASSPCLGKLRKSRTSCSQPDRKDAKSVKIKKNKDNVKFKVRCSRYLYTLVITDKEKAEKLKQSLPPGLAVKELK

SEQ ID NO: 862286 - protein, 108 aa, Homo sapiens
TLQAYWEKSRKLVRQPFSGQEEGGALGAVPEPSAPRRHCLGKLRKSRTSCSQPDRKDAKSVKIKKNKDNVKFKVRCSRYLYTLVITDKEKAEKLKQSLPPGLAVKELK

SEQ ID NO: 862287 - protein, 111 aa, Homo sapiens; identical to SEQ ID NO: 862283

SEQ ID NO: 862288 - protein, 132 aa, Homo sapiens
FLCLLFVSDDQGVKVSAASNFKLHVVLIFLDLDRFGIASSPCLGKLRKSRTSCSQPDRKDAKSVRINIIQFQSVCLVHFSSFTAKPGGRELLQFLCLLFVSDDQGVKVSAASNFKLYVVLIFLDLGRRAANL

SEQ ID NO: 862289 - protein, 385 aa, Homo sapiens
MSLILNILREMLEYFGVPVEQVLLIWENKDYGSTRSIVRIIGKMLPLEPCRRPNFELIPLLNSVDSDNCGSMVPSFADILYVANDEEASYLRFRNSIWKNEEEKVEIFHPLRLVRDPLSPAVRQKETVKNDLPVNEAAIRKIAALENELTFLRSQIAAIVEMQELKNSTNSSSFGLSDERISLGQLSSSRAAHLSVDPDQLPGSVLSPPPPPPLPPQFSSLQPPCFPPVQPGSNNICDSDNPATEMSKQNPAANKTNYSHHSKSQRNKDIPNMLDVLKDMNKVKLRAIERSPGGRPIHKRKRQNSHWDPVSLISHALKQKFAFQEDDSFEKENRSWESSPFSSPETSRFGHHISQSEGQRTKEEMVNTKAVDQGISNTSLLNSRI

SEQ ID NO: 862290 - protein, 385 aa, Homo sapiens; identical to SEQ ID NO: 862289

SEQ ID NO: 862291 - protein, 234 aa, Homo sapiens
CLQLWQRTVPLDTLKGLGTCFPSGPELRGAGIAAAMERASERRTASALFAGFRALGLFSNDIPHVVRFSALKRRFYVTTCVGKSFHTYDVQKLSLVAVSNSVPQDICCMAADGRLVFAAYGNVFSAFARNKEIVHTFKGHKAEIHFLQPFGDHIISVDTDGILIIWHIYSEEEYLQLTFDKSVFKISAILHPSTYLNKILLGSEQGSLQLWNVKSNKLLYTFPGWKVGVTALQQ

SEQ ID NO: 862292 - protein, 95 aa, Homo sapiens
CLQLWQRTVPLDTLKGLGTCFPSGPELRGAGIAAAMERASERRTASALFAGFRALGLFSNDIPHVVRFSALKRRFYVTTCVGKSFHTYDVSDFFC

SEQ ID NO: 862293 - protein, 180 aa, Homo sapiens
MTTTLSHGIPREVSLRAQHTHITTNLLGSAHTSGSNLAHSEMSVGPLASLFQNKSPKTRDIQEEELEVLLEEEAAGGDEDREKEILIERIQSIKEEKEDITYRLPELDPRGSDEENLDSETSASTESLLEERAGRGASEGPPAPALPCPGAHQTQKTHKINVKRQTRGKTENKVKEKKMR

SEQ ID NO: 862294 - protein, 2022 aa, Homo sapiens
MSVKEAGSSGRREQAAYHLHIYPQLSTTESQASCRVTATKDSTTSDVIKDAIASLRLDGTKCYVLVEVKESGGEEWVLDANDSPVHRVLLWPRRAQDEHPQEDGYYFLLQERNADGTIKYVHMQLVAQATATRRLVERGLLPRQQADFDDLCNLPELTEGNLLKNLKHRFLQQKIYTYAGSILVAINPFKFLPIYNPKYVKMYENQQLGKLEPHVFALADVAYYTMLRKRVNQCIVISGESGSGKTQSTNFLIHCLTALSQKGYASGVERTILGAGPVLEAFGNAKTAHNNNSSRFGKFIQVSYLESGIVRGAVVEKYLLEKSRLVSQEKDERNYHVFYYLLLGVSEEERQEFQLKQPEDYFYLNQHNLKIEDGEDLKHDFERLKQAMEMVGFLPATKKQIFAVLSAILYLGNVTYKKRATGREEGLEVGPPEVLDTLSQLLKVKREILVEVLTKRKTVTVNDKLILPYSLSEAITARDSMAKSLYSALFDWIVLRINHALLNKKDVEEAVSCLSIGVLDIFGFEDFERNSFEQFCINYANEQLQYYFNQHIFKLEQEEYQGEGITWHNIGYTDNVGCIHLISKKPTGLFYLLDEESNFPHATSQTLLAKFKQQHEDNKYFLGTPVMEPAFIIQHFAGKVKYQIKDFREKNMDYMRPDIVALLRGSDSSYVRELIGMDPVAVFRWAVLRAAIRAMAVLREAGRLRAERAEKAAGMSSPGAQSHPEELPRGASTPSEKLYRDLHNQMIKSIKGLPWQGEDPRSLLQSLSRLQKPRAFILKSKGIKQKQIIPKNLLDSKSLKLIISMTLHDRTTKSLLHLHKKKKPPSISAQFQTSLNKLLEALGKAEPFFIRCIRSNAEKKELCFDDELVLQQLRYTGMLETVRIRRSGYSAKYTFQDFTEQFQVLLPKDAQPCREVISTLLEKMKIDKRNYQIGKTKVFLKETERQALQETLHREVVRKILLLQSWFRMVLERRHFLQMKRAAVTIQACWRSYRVRRALERTQAAVYLQASWRGYWQRKLYRHQKQSIIRLQSLCRGHLQRKSFSQMISEKQKAEEKEREALEAARAGAEEGGQGQAAGGQQVAEQGPEPAEDGGHLASEPEVQPSDRSPLEHSSPEKEAPSPEKTLPPQKTVAAESHEKVPSSREKRESRRQRGLEHVKFQNKHIQSCKEESALREPSRRVTQEQGVSLLEDKKESREDETLLVVETEAENTSQKQPTEQPQAMAVGKVSEETEKTLPSGSPRPGQLERPTSLALDSRVSPPAPGSAPETPEDKSKPCGSPRVQEKPDSPGGSTQIQRYLDAERLASAVELWRGKKLVAAASPSAMLSQSLDLSDRHRATGAALTPTEERRTSFSTSDVSKLLPSLAKAQPAAETTDGERSAKKPAVQKKKPGDASSLPDAGLSPGSQVDSKSTFKRLFLHKTKDKKYSLEGAEELENAVSGHVVLEATTMKKGLEAPSGQQHRHAAGEKRTKEPGGKGKKNRNVKIGKITVSEKWRESVFRQITNANELKYLDEFLLNKINDLRSQKTPIESLFIEATEKFRSNIKTMYSVPNGKIHVGYKDLMENYQIVVSNLATERGQKDTNLVLNLFQSLLDEFTRGYTKNDFEPVKQSKAQKKKRKQERAVQEHNGHVFASYQVSIPQSCEQCLSYIWLMDKALLCSVCKMTCHKKCVHKIQSHCSYTYGRKGEPGAEPGHFGVCVDSLTSDKASVPIVLEKLLEHVEMHGLYTEGLYRKSGAANRTRELRQALQTDPAAVKLENFPIHAITGVLKQWLRELPEPLMTFAQYGDFLRAVELPEKQEQLAAIYAVLEHLPEANHNSLERLIFHLVKVALLEDVNRMSPGALAIIFAPCLLRCPDNSDPLTSMKDVLKITTCVEMLIKEQMRKYKVKMEEISQLEAAESIAFRRLSLLRQNANKSPKTREPAGGAGRLLTTSRVSPSPSTRNLALGSWRSAALRTRGTGRPARPGRARALRRRPPRPARESPAQPPRSRPRVRTETPSPLSSGPPPSRSNTGMAPLRR

SEQ ID NO: 862295 - protein, 2022 aa, Homo sapiens [sequence omitted]

SEQ ID NO: 862296 - protein, 2014 aa, Homo sapiens
MSVKEAGSSGRREQAAYHLHIYPQLSTTESQASCRVTATKDSTTSDVIKDAIASLRLDGTKCYVLVEVKESGGEEWVLDANDSPVHRVLLWPRRAQDEHPQEDGYYFLLQERNADGTIKYVHMQLVAQATATRRLVERGLLPRQQADFDDLCNLPELTEGNLLKNLKHRFLQQKIYTYAGSILVAINPFKFLPIYNPKYVKMYENQQLGKLEPHVFALADVAYYTMLRKRVNQCIVISGESGSGKTQSTNFLIHCLTALSQKGYASGVERTILGAGPVLEAFGNAKTAHNNNSSRFGKFIQVSYLESGIVRGAVVEKYLLEKSRLVSQEKDERNYHVFYYLLLGVSEEERQEFQLKQPEDYFYLNQHNLKIEDGEDLKHDFERLKQAMEMVGFLPATKKQIFAVLSAILYLGNVTYKKRATGREEGLEVGPPEVLDTLSQLLKVKREILVEVLTKRKTVTVNDKLILPYSLSEAITARDSMAKSLYSALFDWIVLRINHALLNKKDVEEAVSCLSIGVLDIFGFEDFERNSFEQFCINYANEQLQYYFNQHIFKLEQEEYQGEGITWHNIGYTDNVGCIHLISKKPTGLFYLLDEESNFPHATSQTLLAKFKQQHEDNKYFLGTPVMEPAFIIQHFAGKVKYQIKDFREKNMDYMRPDIVALLRGSDSSYVRELIGMDPVAVFRWAVLRAAIRAMAVLREAGRLRAERAEKAAGMSSPGAQSHPEELPRGASTPSEKLYRCSMLDFSFDGSEEFDINAFEDIIAFYESKKKSKGIKQKQIIPKNLLDSKSLKLIISMTLHDRTTKSLLHLHKKKKPPSISAQFQTSLNKLLEALGKAEPFFIRCIRSNAEKKELCFDDELVLQQLRYTGMLETVRIRRSGYSAKYTFQDFTEQFQVLLPKDAQPCREVISTLLEKMKIDKRNYQIGKTKVFLKETERQALQETLHREVVRKILLLQSWFRMVLERRHFLQMKRAAVTIQACWRSYRVRRALERTQAAVYLQASWRGYWQRKLYRHQKQSIIRLQSLCRGHLQRKSFSQMISEKQKAEEKEREALEAARAGAEEGGQGQAAGGQQVAEQGPEPAEDGGHLASEPEVQPSDRSPLEHSSPEKEAPSPEKTLPPQKTVAAESHEKVPSSREKRESRRQRGLEHVKFQNKHIQSCKEESALREPSRRVTQEQGVSLLEDKKESREDETLLVVETEAENTSQKQPTEQPQAMAVGKVSEETEKTLPSGSPRPGQLERPTSLALDSRVSPPAPGSAPETPEDKSKPCGSPRVQEKPDSPGGSTQIQRYLDAERLASAVELWRGKKLVAAASPSAMLSQSLDLSDRHRATGAALTPTEERRTSFSTSDVSKLLPSLAKAQPAAETTDGERSAKKPAVQKKKPGDASSLPDAGLSPGSQVDSKSTFKRLFLHKTKDKKYSLEGAEELENAVSGHVVLEATTMKKGLEAPSGQQHRHAAGEKRTKEPGGKGKKNRNVKIGKITVSEKWRESVFRQITNANELKYLDEFLLNKINDLRSQKTPIESLFIEATEKFRSNIKTMYSVPNGKIHVGYKDLMENYQIVVSNLATERGQKDTNLVLNLFQSLLDEFTRGYTKNDFEPVKQSKAQKKKRKQERAVQEHNGHVFASYQVSIPQSCEQCLSYIWLMDKALLCSVCKMTCHKKCVHKIQSHCSYTYGRKGEPGAEPGHFGVCVDSLTSDKASVPIVLEKLLEHVEMHGLYTEGLYRKSGAANRTRELRQALQTDPAAVKLENFPIHAITGVLKQWLRELPEPLMTFAQYGDFLRAVELPEKQEQLAAIYAVLEHLPEANHNSLERLIFHLVKVALLEDVNRMSPGALAIIFAPCLLRCPDNSDPLTSMKDVLKITTCVEMLIKEQMRKYKVKMEEISQLEAAESIAFRRLSLLRQNAPWPLKLGFSSPYEGVLNKSPKTRDIQEEELEVLLEEEAAGGDEDREKEILIERIQSIKEEKEDITYRLPELDPRGSDEENLDSETSASTESLLEERAGRGASEGQY

SEQ ID NO: 862297 - protein, 2113 aa, Homo sapiens
MSVKEAGSSGRREQAAYHLHIYPQLSTTESQASCRVTATKDSTTSDVIKDAIASLRLDGTKCYVLVEVKESGGEEWVLDANDSPVHRVLLWPRRAQDEHPQEDGYYFLLQERNADGTIKYVHMQLVAQATATRRLVERGLLPRQQADFDDLCNLPELTEGNLLKNLKHRFLQQKIYTYAGSILVAINPFKFLPIYNPKYVKMYENQQLGKLEPHVFALADVAYYTMLRKRVNQCIVISGESGSGKTQSTNFLIHCLTALSQKGYASGVERTILGAGPVLEAFGNAKTAHNNNSSRFGKFIQVSYLESGIVRGAVVEKYLLEKSRLVSQEKDERNYHVFYYLLLGVSEEERQEFQLKQPEDYFYLNQHNLKIEDGEDLKHDFERLKQAMEMVGFLPATKKQIFAVLSAILYLGNVTYKKRATGREEGLEVGPPEVLDTLSQLLKVKREILVEVLTKRKTVTVNDKLILPYSLSEAITARDSMAKSLYSALFDWIVLRINHALLNKKDVEEAVSCLSIGVLDIFGFEDFERNSFEQFCINYANEQLQYYFNQHIFKLEQEEYQGEGITWHNIGYTDNVGCIHLISKKPTGLFYLLDEESNFPHATSQTLLAKFKQQHEDNKYFLGTPVMEPAFIIQHFAGKVKYQIKDFREKNMDYMRPDIVALLRGSDSSYVRELIGMDPVAVFRWAVLRAAIRAMAVLREAGRLRAERAEKAAGMSSPGAQSHPEELPRGASTPSEKLYRCSMLDFSFDGSEEFDINAFEDIIAFYESKKYSAERAFDPEATLSTVSFPQLHVLASVPGDGPNGAGNPEVAGLLLTPSSFCHCAPSTPPLSDLHNQMIKSIKGLPWQGEDPRSLLQSLSRLQKPRAFILKSKGIKQKQIIPKNLLDSKSLKLIISMTLHDRTTKSLLHLHKKKKPPSISAQFQTSLNKLLEALGKAEPFFIRCIRSNAEKKELCFDDELVLQQLRYTGMLETVRIRRSGYSAKYTFQDFTEQFQVLLPKDAQPCREVISTLLEKMKIDKRNYQIGKTKVFLKETERQALQETLHREVVRKILLLQSWFRMVLERRHFLQMKRAAVTIQACWRSYRVRRALERTQAAVYLQASWRGYWQRKLYRHQKQSIIRLQSLCRGHLQRKSFSQMISEKQKAEEKEREALEAARAGAEEGGQGQAAGGQQVAEQGPEPAEDGGHLASEPEVQPSDRSPLEHSSPEKEAPSPEKTLPPQKTVAAESHEKVPSSREKRESRRQRGLEHVKFQNKHIQSCKEESALREPSRRVTQEQGVSLLEDKKESREDETLLVVETEAENTSQKQPTEQPQAMAVGKVSEETEKTLPSGSPRPGQLERPTSLALDSRVSPPAPGSAPETPEDKSKPCGSPRVQEKPDSPGGSTQIQRYLDAERLASAVELWRGKKLVAAASPSAMLSQSLDLSDRHRATGAALTPTEERRTSFSTSDVSKLLPSLAKAQPAAETTDGERSAKKPAVQKKKPGDASSLPDAGLSPGSQVDSKSTFKRLFLHKTKDKKYSLEGAEELENAVSGHVVLEATTMKKGLEAPSGQQHRHAAGEKRTKEPGGKGKKNRNVKIGKITVSEKWRESVFRQITNANELKYLDEFLLNKINDLRSQKTPIESLFIEATEKFRSNIKTMYSVPNGKIHVGYKDLMENYQIVVSNLATERGQKDTNLVLNLFQSLLDEFTRGYTKNDFEPVKQSKAQKKKRKQERAVQEHNGHVFASYQVSIPQSCEQCLSYIWLMDKALLCSVCKMTCHKKCVHKIQSHCSYTYGRKGEPGAEPGHFGVCVDSLTSDKASVPIVLEKLLEHVEMHGLYTEGLYRKSGAANRTRELRQALQTDPAAVKLENFPIHAITGVLKQWLRELPEPLMTFAQYGDFLRAVELPEKQEQLAAIYAVLEHLPEANHNSLERLIFHLVKVALLEDVNRMSPGALAIIFAPCLLRCPDNSDPLTSMKDVLKITTCVEMLIKEQMRKYKVKMEEISQLEAAESIAFRRLSLLRQNAPWPLKLGFSSPYEGVLNKSPKTRDIQEEELEVLLEEEAAGGDEDREKEILIERIQSIKEEKEDITYRLPELDPRGSDEENLDSETSASTESLLEERAGRGASEGQY

SEQ ID NO: 862298 - protein, 2110 aa, Homo sapiens
MSVKEAGSSGRREQAAYHLHIYPQLSTTESQASCRVTATKDSTTSDVIKDAIASLRLDGTKCYVLVEVKESGGEEWVLDANDSPVHRVLLWPRRAQDEHPQEDGYYFLLQERNADGTIKYVHMQLVAQATATRRLVERGLLPRQQADFDDLCNLPELTEGNLLKNLKHRFLQQKIYTYAGSILVAINPFKFLPIYNPKYVKMYENQQLGKLEPHVFALADVAYYTMLRKRVNQCIVISGESGSGKTQSTNFLIHCLTALSQKGYASGVERTILGAGPVLEAFGNAKTAHNNNSSRFGKFIQVSYLESGIVRGAVVEKYLLEKSRLVSQEKDERNYHVFYYLLLGVSEEERQEFQLKQPEDYFYLNQHNLKIEDGEDLKHDFERLKQAMEMVGFLPATKKQIFAVLSAILYLGNVTYKKRATGREEGLEVGPPEVLDTLSQLLKVKREILVEVLTKRKTVTVNDKLILPYSLSEAITARDSMAKSLYSALFDWIVLRINHALLNKKDVEEAVSCLSIGVLDIFGFEDFERNSFEQFCINYANEQLQYYFNQHIFKLEQEEYQGEGITWHNIGYTDNVGCIHLISKKPTGLFYLLDEESNFPHATSQTLLAKFKQQHEDNKYFLGTPVMEPAFIIQHFAGKVKYQIKDFREKNMDYMRPDIVALLRGSDSSYVRELIGMDPVAVFRWAVLRAAIRAMAVLREAGRLRAERAEKAAGMSSPGAQSHPEELPRGASTPSEKLYRDLHNQMIKSIKGLPWQGEDPRSLLQSLSRLQKPRAFILKSKGIKQKQIIPKNLLDSKSLKLIISMTLHDRTTKSLLHLHKKKKPPSISAQFQTSLNKLLEALGKAEPFFIRCIRSNAEKKELCFDDELVLQQLRYTGMLETVRIRRSGYSAKYTFQDFTEQFQVLLPKDAQPCREVISTLLEKMKIDKRNYQIGKTKVFLKETERQALQETLHREVVRKILLLQSWFRMVLERRHFLQMKRAAVTIQACWRSYRVRRALERTQAAVYLQASWRGYWQRKLYRHQKQSIIRLQSLCRGHLQRKSFSQMISEKQKAEEKEREALEAARAGAEEGGQGQAAGGQQVAEQGPEPAEDGGHLASEPEVQPSDRSPLEHSSPEKEAPSPEKTLPPQKTVAAESHEKVPSSREKRESRRQRGLEHVKFQNKHIQSCKEESALREPSRRVTQEQGVSLLEDKKESREDETLLVVETEAENTSQKQPTEQPQAMAVGKVSEETEKTLPSGSPRPGQLERPTSLALDSRVSPPAPGSAPETPEDKSKPCGSPRVQEKPDSPGGSTQIQRYLDAERLASAVELWRGKKLVAAASPSAMLSQSLDLSDRHRATGAALTPTEERRTSFSTSDVSKLLPSLAKAQPAAETTDGERSAKKPAVQKKKPGDASSLPDAGLSPGSQVDSKSTFKRLFLHKTKDKKYSLEGAEELENAVSGHVVLEATTMKKGLEAPSGQQHRHAAGEKRTKEPGGKGKKNRNVKIGKITVSEKWRESVFRQITNANELKYLDEFLLNKINDLRSQKTPIESLFIEATEKFRSNIKTMYSVPNGKIHVGYKDLMENYQIVVSNLATERGQKDTNLVLNLFQSLLDEFTRGYTKNDFEPVKQSKAQKKKRKQERAVSRLHIDESPSRRTLAGACTCVSVSMCAWARLHAYVCVDTCECVFPPAYTEPYVLNKSPLRSHGSSSTSGWGGLPSPFPAQRLPLASQVQEHNGHVFASYQVSIPQSCEQCLSYIWLMDKALLCSVCKMTCHKKCVHKIQSHCSYTYGRKGEPGAEPGHFGVCVDSLTSDKASVPIVLEKLLEHVEMHGLYTEGLYRKSGAANRTRELRQALQTDPAAVKLENFPIHAITGVLKQWLRELPEPLMTFAQYGDFLRAVELPEKQEQLAAIYAVLEHLPEANHNSLERLIFHLVKVALLEDVNRMSPGALAIIFAPCLLRCPDNSDPLTSMKDVLKITTCVEMLIKEQMRKYKVKMEEISQLEAAESIAFRRLSLLRQNAPWPLKLGFSSPYEGVLNKSPKTRDIQEEELEVLLEEEAAGGDEDREKEILIERIQSIKEEKEDITYRLPELDPRGSDEENLDSETSASTESLLEERAGRGASEGQY

SEQ ID NO: 862299 - protein, 1543 aa, Homo sapiens
WRPELTLRVNSHGNVGFSRPKKQILPSSRHPETCLSIGVLDIFGFEDFERNSFEQFCINYANEQLQYYFNQHIFKLEQEEYQGEGITWHNIGYTDNVGCIHLISKKPTGLFYLLDEESNFPHATSQTLLAKFKQQHEDNKYFLGTPVMEPAFIIQHFAGKVKYQIKDFREKNMDYMRPDIVALLRGSDSSYVRELIGMDPVAVFRWAVLRAAIRAMAVLREAGRLRAERAEKAAGMSSPGAQSHPEELPRGASTPSEKLYRDLHNQMIKSIKGLPWQGEDPRSLLQSLSRLQKPRAFILKSKGIKQKQIIPKNLLDSKSLKLIISMTLHDRTTKSLLHLHKKKKPPSISAQFQTSLNKLLEALGKAEPFFIRCIRSNAEKKELCFDDELVLQQLRYTGMLETVRIRRSGYSAKYTFQDFTEQFQVLLPKDAQPCREVISTLLEKMKIDKRNYQIGKTKVFLKETERQALQETLHREVVRKILLLQSWFRMVLERRHFLQMKRAAVTIQACWRSYRVRRALERTQAAVYLQASWRGYWQRKLYRHQKQSIIRLQSLCRGHLQRKSFSQMISEKQKAEEKEREALEAARAGAEEGGQGQAAGGQQVAEQGPEPAEDGGHLASEPEVQPSDRSPLEHSSPEKEAPSPEKTLPPQKTVAAESHEKVPSSREKRESRRQRGLEHVKFQNKHIQSCKEESALREPSRRVTQEQGVSLLEDKKESREDETLLVVETEAENTSQKQPTEQPQAMAVGKVSEETEKTLPSGSPRPGQLERPTSLALDSRVSPPAPGSAPETPEDKSKPCGSPRVQEKPDSPGGSTQIQRYLDAERLASAVELWRGKKLVAAASPSAMLSQSLDLSDRHRATGAALTPTEERRTSFSTSDVSKLLPSLAKAQPAAETTDGERSAKKPAVQKKKPGDASSLPDAGLSPGSQVDSKSTFKRLFLHKTKDKKYSLEGAEELENAVSGHVVLEATTMKKGLEAPSGQQHRHAAGEKRTKEPGGKGKKNRNVKIGKITVSEKWRESVFRQITNANELKYLDEFLLNKINDLRSQKTPIESLFIEATEKFRSNIKTMYSVPNGKIHVGYKDLMENYQIVVSNLATERGQKDTNLVLNLFQSLLDEFTRGYTKNDFEPVKQSKAQKKKRKQERAVQEHNGHVFASYQVSIPQSCEQCLSYIWLMDKALLCSVCKMTCHKKCVHKIQSHCSYTYGRKGEPGAEPGHFGVCVDSLTSDKASVPIVLEKLLEHVEMHGLYTEGLYRKSGAANRTRELRQALQTDPAAVKLENFPIHAITGVLKQWLRELPEPLMTFAQYGDFLRAVELPEKQEQLAAIYAVLEHLPEANHNSLERLIFHLVKVALLEDVNRMSPGALAIIFAPCLLRCPDNSDPLTSMKDVLKITTCVEMLIKEQMRKYKVKMEEISQLEAAESIAFRRLSLLRQNAPWPLKLGFSSPYEGVLNKSPKTRDIQEEELEVLLEEEAAGGDEDREKEILIERIQSIKEEKEDITYRLPELDPRGSDEENLDSETSASTESLLEERAGRGASEGQY

SEQ ID NO: 862300 - protein, 1322 aa, Homo sapiens
MFWLQWPGDGPNGAGNPEVAGLLLTPSSFCHCAPSTPPLSDLHNQMIKSIKGLPWQGEDPRSLLQSLSRLQKPRAFILKSKGIKQKQIIPKNLLDSKSLKLIISMTLHDRTTKSLLHLHKKKKPPSISAQFQTSLNKLLEALGKAEPFFIRCIRSNAEKKELCFDDELVLQQLRYTGMLETVRIRRSGYSAKYTFQDFTEQFQVLLPKDAQPCREVISTLLEKMKIDKRNYQIGKTKVFLKETERQALQETLHREVVRKILLLQSWFRMVLERRHFLQMKRAAVTIQACWRSYRVRRALERTQAAVYLQASWRGYWQRKLYRHQKQSIIRLQSLCRGHLQRKSFSQMISEKQKAEEKEREALEAARAGAEEGGQGQAAGGQQVAEQGPEPAEDGGHLASEPEVQPSDRSPLEHSSPEKEAPSPEKTLPPQKTVAAESHEKVPSSREKRESRRQRGLEHVKFQNKHIQSCKEESALREPSRRVTQEQGVSLLEDKKESREDETLLVVETEAENTSQKQPTEQPQAMAVGKVSEETEKTLPSGSPRPGQLERPTSLALDSRVSPPAPGSAPETPEDKSKPCGSPRVQEKPDSPGGSTQIQRYLDAERLASAVELWRGKKLVAAASPSAMLSQSLDLSDRHRATGAALTPTEERRTSFSTSDVSKLLPSLAKAQPAAETTDGERSAKKPAVQKKKPGDASSLPDAGLSPGSQVDSKSTFKRLFLHKTKDKKYSLEGAEELENAVSGHVVLEATTMKKGLEAPSGQQHRHAAGEKRTKEPGGKGKKNRNVKIGKITVSEKWRESVFRQITNANELKYLDEFLLNKINDLRSQKTPIESLFIEATEKFRSNIKTMYSVPNGKIHVGYKDLMENYQIVVSNLATERGQKDTNLVLNLFQSLLDEFTRGYTKNDFEPVKQSKAQKKKRKQERAVQEHNGHVFASYQVSIPQSCEQCLSYIWLMDKALLCSVCKMTCHKKCVHKIQSHCSYTYGRKGEPGAEPGHFGVCVDSLTSDKASVPIVLEKLLEHVEMHGLYTEGLYRKSGAANRTRELRQALQTDPAAVKLENFPIHAITGVLKQWLRELPEPLMTFAQYGDFLRAVELPEKQEQLAAIYAVLEHLPEANHNSLERLIFHLVKVALLEDVNRMSPGALAIIFAPCLLRCPDNSDPLTSMKDVLKITTCVEMLIKEQMRKYKVKMEEISQLEAAESIAFRRLSLLRQNAPWPLKLGFSSPYEGVLNKSPKTRDIQEEELEVLLEEEAAGGDEDREKEILIERIQSIKEEKEDITYRLPELDPRGSDEENLDSETSASTESLLEERAGRGASEGQY

SEQ ID NO: 862301 - protein, 1322 aa, Homo sapiens; identical to SEQ ID NO: 862300

SEQ ID NO: 862302 - protein, 2157 aa, Homo sapiens [sequence omitted]

SEQ ID NO: 862303 - protein, 2038 aa, Homo sapiens
MSVKEAGSSGRREQAAYHLHIYPQLSTTESQASCRVTATKDSTTSDVIKDAIASLRLDGTKCYVLVEVKESGGEEWVLDANDSPVHRVLLWPRRAQDEHPQEDGYYFLLQERNADGTIKYVHMQLVAQATATRRLVERGLLPRQQADFDDLCNLPELTEGNLLKNLKHRFLQQKIYTYAGSILVAINPFKFLPIYNPKYVKMYENQQLGKLEPHVFALADVAYYTMLRKRVNQCIVISGESGSGKTQSTNFLIHCLTALSQKGYASGVERTILGAGPVLEAFGNAKTAHNNNSSRFGKFIQVSYLESGIVRGAVVEKYLLEKSRLVSQEKDERNYHVFYYLLLGVSEEERQEFQLKQPEDYFYLNQHNLKIEDGEDLKHDFERLKQAMEMVGFLPATKKQIFAVLSAILYLGNVTYKKRATGREEGLEVGPPEVLDTLSQLLKVKREILVEVLTKRKTVTVNDKLILPYSLSEAITARDSMAKSLYSALFDWIVLRINHALLNKKDVEEAVSCLSIGVLDIFGFEDFERNSFEQFCINYANEQLQYYFNQHIFKLEQEEYQGEGITWHNIGYTDNVGCIHLISKKPTGLFYLLDEESNFPHATSQTLLAKFKQQHEDNKYFLGTPVMEPAFIIQHFAGKVKYQIKDFREKNMDYMRPDIVALLRGSDSSYVRELIGMDPVAVFRWAVLRAAIRAMAVLREAGRLRAERAEKAAGMSSPGAQSHPEELPRGASTPSEKLYRDLHNQMIKSIKGLPWQGEDPRSLLQSLSRLQKPRAFILKSKGIKQKQIIPKNLLDSKSLKLIISMTLHDRTTKSLLHLHKKKKPPSISAQFQTSLNKLLEALGKAEPFFIRCIRSNAEKKELCFDDELVLQQLRYTGMLETVRIRRSGYSAKYTFQDFTEQFQVLLPKDAQPCREVISTLLEKMKIDKRNYQIGKTKVFLKETERQALQETLHREVVRKILLLQSWFRMVLERRHFLQMKRAAVTIQACWRSYRVRRALERTQAAVYLQASWRGYWQRKLYRHQKQSIIRLQSLCRGHLQRKSFSQMISEKQKAEEKEREALEAARAGAEEGGQGQAAGGQQVAEQGPEPAEDGGHLASEPEVQPSDRSPLEHSSPEKEAPSPEKTLPPQKTVAAESHEKVPSSREKRESRRQRGLEHVKFQNKHIQSCKEESALREPSRRVTQEQGVSLLEDKKESREDETLLVVETEAENTSQKQPTEQPQAMAVGKVSEETEKTLPSGSPRPGQLERPTSLALDSRVSPPAPGSAPETPEDKSKPCGSPRVQEKPDSPGGSTQIQRYLDAERLASAVELWRGKKLVAAASPSAMLSQSLDLSDRHRATGAALTPTEERRTSFSTSDVSKLLPSLAKAQPAAETTDGERSAKKPAVQKKKPGDASSLPDAGLSPGSQVDSKSTFKRLFLHKTKDKKYSLEGAEELENAVSGHVVLEATTMKKGLEAPSGQQHRHAAGEKRTKEPGGKGKKNRNVKIGKITVSEKWRESVFRQITNANELKYLDEFLLNKINDLRSQKTPIESLFIEATEKFRSNIKTMYSVPNGKIHVGYKDLMENYQIVVSNLATERGQKDTNLVLNLFQSLLDEFTRGYTKNDFEPVKQSKAQKKKRKQERAVQEHNGHVFASYQVSIPQSCEQCLSYIWLMDKALLCSVCKMTCHKKCVHKIQSHCSYTYGRKGEPGAEPGHFGVCVDSLTSDKASVPIVLEKLLEHVEMHGLYTEGLYRKSGAANRTRELRQALQTDPAAVKLENFPIHAITGVLKQWLRELPEPLMTFAQYGDFLRAVELPEKQEQLAAIYAVLEHLPEANHNSLERLIFHLVKVALLEDVNRMSPGALAIIFAPCLLRCPDNSDPLTSMKDVLKITTCVEMLIKEQMRKYKVKMEEISQLEAAESIAFRRLSLLRQNAPWPLKLGFSSPYEGVLNKSPKTRDIQEEELEVLLEEEAAGGDEDREKEILIERIQSIKEEKEDITYRLPELDPRGSDEENLDSETSASTESLLEERAGRGASEGPPAPALPCPRRAPNPEDP

SEQ ID NO: 862304 - protein, 142 aa, Homo sapiens [sequence omitted]

SEQ ID NO: 862305 - protein, 1686 aa, Homo sapiens
MSVKEAGSSGRREQAAYHLHIYPQLSTTESQASCRVTATKDSTTSDVIKDAIASLRLDGTKCYVLVEVKESGGEEWVLDANDSPVHRVLLWPRRAQDEHPQEDGYYFLLQERNADGTIKYVHMQLVAQATATRRLVERGLLPRQQADFDDLCNLPELTEGNLLKNLKHRFLQQKIYTYAGSILVAINPFKFLPIYNPKYVKMYENQQLGKLEPHVFALADVAYYTMLRKRVNQCIVISGESGSGKTQSTNFLIHCLTALSQKGYASGVERTILGAGPVLEAFGNAKTAHNNNSSRFGKFIQVSYLESGIVRGAVVEKYLLEKSRLVSQEKDERNYHVFYYLLLGVSEEERQEFQLKQPEDYFYLNQHNLKIEDGEDLKHDFERLKQAMEMVGFLPATKKQIFAVLSAILYLGNVTYKKRATGREEGLEVGPPEVLDTLSQLLKVKREILVEVLTKRKTVTVNDKLILPYSLSEAITARDSMAKSLYSALFDWIVLRINHALLNKKDVEEAVSCLSIGVLDIFGFEDFERNSFEQFCINYANEQLQYYFNQHIFKLEQEEYQGEGITWHNIGYTDNVGCIHLISKKPTGLFYLLDEESNFPHATSQTLLAKFKQQHEDNKYFLGTPVMEPAFIIQHFAGKVKYQIKDFREKNMDYMRPDIVALLRGSDSSYVRELIGMDPVAVFRWAVLRAAIRAMAVLREAGRLRAERAEKAAGMSSPGAQSHPEELPRGASTPSEKLYRDLHNQMIKSIKGLPWQGEDPRSLLQSLSRLQKPRAFILKSKGIKQKQIIPKNLLDSKSLKLIISMTLHDRTTKSLLHLHKKKKPPSISAQFQTSLNKLLEALGKAEPFFIRCIRSNAEKKELCFDDELVLQQLRYTGMLETVRIRRSGYSAKYTFQDFTEQFQVLLPKDAQPCREVISTLLEKMKIDKRNYQIGKTKVFLKETERQALQETLHREVVRKILLLQSWFRMVLERRHFLQMKRAAVTIQACWRSYRVRRALERTQAAVYLQASWRGYWQRKLYRHQKQSIIRLQSLCRGHLQRKSFSQMISEKQKAEEKEREALEAARAGAEEGGQGQAAGGQQVAEQGPEPAEDGGHLASEPEVQPSDRSPLEHSSPEKEAPSPEKTLPPQKTVAAESHEKVPSSREKRESRRQRGLEHVKFQNKHIQSCKEESALREPSRRVTQEQGVSLLEDKKESREDETLLVVETEAENTSQKQPTEQPQAMAVGKVSEETEKTLPSGSPRPGQLERPTSLALDSRVSPPAPGSAPETPEDKSKPCGSPRVQEKPDSPGGSTQIQRYLDAERLASAVELWRGKKLVAAASPSAMLSQSLDLSDRHRATGAALTPTEERRTSFSTSDVSKLLPSLAKAQPAAETTDGERSAKKPAVQKKKPGDASSLPDAGLSPGSQVDSKSTFKRLFLHKTKDKKYSLEGAEELENAVSGHVVLEATTMKKGLEAPSGQQHRHAAGEKRTKEPGGKGKKNRNVKIGKITVSEKWRESVFRQITNANELKYLDEFLLNKINDLRSQKTPIESLFIEATEKFRSNIKTMYSVPNGKIHVGYKDLMENYQIVVSNLATERGQKDTNLVLNLFQSLLDEFTRGYTKNDFEPVKQSKAQKKKRKQERAVSRLHIDESPSRRDNDEDKQKILDKCNEIINWLDKNQTAEKEEFEHQQKELEKVCKRITR

SEQ ID NO: 862306 - protein, 420 aa, Homo sapiens
MSVKEAGSSGRREQAAYHLHIYPQLSTTESQASCRVTATKDSTTSDVIKDAIASLRLDGTKCYVLVEVKESGGEEWVLDANDSPVHRVLLWPRRAQDEHPQEDGYYFLLQERNADGTIKYVHMQLVAQATATRRLVERGLLPRQQADFDDLCNLPELTEGNLLKNLKHRFLQQKIYTYAGSILVAINPFKFLPIYNPKYVKMYENQQLGKLEPHVFALADVAYYTMLRKRVNQCIVISGESGSGKTQSTNFLIHCLTALSQKGYASGVERTILGAGPVLEAFGNAKTAHNNNSSRFGKFIQVSYLESGIVRGAVVEKYLLEKSRLVSQEKDERNYHVFYYLLLGVSEEERQEFQLKQPEDYFYLNQHNLKIEDGEDLKHDFERLKQAMEMVGFLPATKKQIFAVLSAILYLGNRARHCFQ

SEQ ID NO: 862307 - protein, 316 aa, Homo sapiens [sequence omitted]

SEQ ID NO: 862308 - protein, 70 aa, Homo sapiens
KKDVEEAVSVSAPICFLKPGQGRPHPHYQYPWWATWNIRSRGICNQEAVSPQGQAQETGQATKFNRPRAE

SEQ ID NO: 862309 - protein, 115 aa, Homo sapiens
NLLDSKSLKLIISMTLHDRTTKSLLHLHKKKKPPSISAQFQEVEQERQKVAVSSASGLCSFTRHRAQPVSSKNTKIGRARWLKPVIPALWEAEAGGSRGQEIETILANTVKPHLY

SEQ ID NO: 862310 - protein, 162 aa, Homo sapiens
TVRIRRSGYSAKYTLQDFTEQFQVLLPKDAQPCREVISTLLEKMKITRGASTPSEKLYRDLHNQMIKSIKGLPWQGEDPRSLLQSLSRLQKPRAFILKSKGIKQKQIIPKVKKKTHPARHVPRYLASLPVLRAFTSATSFPPPSHYLPLPPRKKKCSRVEMI

SEQ ID NO: 862311 - protein, 2157 aa, Homo sapiens [sequence omitted]

SEQ ID NO: 862312 - protein, 1984 aa, Homo sapiens
MSVKEAGSSGRREQAAYHLHIYPQLSTTESQASCRVTATKDSTTSDVIKDAIASLRLDGTKCYVLVEVKESGGEEWVLDANDSPVHRVLLWPRRAQDEHPQEDGYYFLLQERNADGTIKYVHMQLVAQATATRRLVERGLLPRQQADFDDLCNLPELTEGNLLKNLKHRFLQQKIYTYAGSILVAINPFKFLPIYNPKYVKMYENQQLGKLEPHVFALADVAYYTMLRKRVNQCIVISGESGSGKTQSTNFLIHCLTALSQKGYASGVERTILGAGPVLEAFGNAKTAHNNNSSRFGKFIQVSYLESGIVRGAVVEKYLLEKSRLVSQEKDERNYHVFYYLLLGVSEEERQEFQLKQPEDYFYLNQHNLKIEDGEDLKHDFERLKQAMEMVGFLPATKKQIFAVLSAILYLGNVTYKKRATGREEGLEVGPPEVLDTLSQLLKVKREILVEVLTKRKTVTVNDKLILPYSLSEAITARDSMAKSLYSALFDWIVLRINHALLNKKDVEEAVSCLSIGVLDIFGFEDFERNSFEQFCINYANEQLQYYFNQHIFKLEQEEYQGEGITWHNIGYTDNVGCIHLISKKPTGLFYLLDEESNFPHATSQTLLAKFKQQHEDNKYFLGTPVMEPAFIIQHFAGKVKYQIKDFREKNMDYMRPDIVALLRGSDSSYVRELIGMDPVAVFRWAVLRAAIRAMAVLREAGRLRAERAEKAAGMSSPGAQSHPEELPRGASTPSEKLYRKSKGIKQKQIIPKNLLDSKSLKLIISMTLHDRTTKSLLHLHKKKKPPSISAQFQTSLNKLLEALGKAEPFFIRCIRSNAEKKELCFDDELVLQQLRYTGMLETVRIRRSGYSAKYTFQDFTEQFQVLLPKDAQPCREVISTLLEKMKIDKRNYQIGKTKVFLKETERQALQETLHREVVRKILLLQSWFRMVLERRHFLQMKRAAVTIQACWRSYRVRRALERTQAAVYLQASWRGYWQRKLYRHQKQSIIRLQSLCRGHLQRKSFSQMISEKQKAEEKEREALEAARAGAEEGGQGQAAGGQQVAEQGPEPAEDGGHLASEPEVQPSDRSPLEHSSPEKEAPSPEKTLPPQKTVAAESHEKVPSSREKRESRRQRGLEHVKFQNKHIQSCKEESALREPSRRVTQEQGVSLLEDKKESREDETLLVVETEAENTSQKQPTEQPQAMAVGKVSEETEKTLPSGSPRPGQLERPTSLALDSRVSPPAPGSAPETPEDKSKPCGSPRVQEKPDSPGGSTQIQRYLDAERLASAVELWRGKKLVAAASPSAMLSQSLDLSDRHRATGAALTPTEERRTSFSTSDVSKLLPSLAKAQPAAETTDGERSAKKPAVQKKKPGDASSLPDAGLSPGSQVDSKSTFKRLFLHKTKDKKYSLEGAEELENAVSGHVVLEATTMKKGLEAPSGQQHRHAAGEKRTKEPGGKGKKNRNVKIGKITVSEKWRESVFRQITNANELKYLDEFLLNKINDLRSQKTPIESLFIEATEKFRSNIKTMYSVPNGKIHVGYKDLMENYQIVVSNLATERGQKDTNLVLNLFQSLLDEFTRGYTKNDFEPVKQSKAQKKKRKQERAVQEHNGHVFASYQVSIPQSCEQCLSYIWLMDKALLCSVCKMTCHKKCVHKIQSHCSYTYGRKGEPGAEPGHFGVCVDSLTSDKASVPIVLEKLLEHVEMHGLYTEGLYRKSGAANRTRELRQALQTDPAAVKLENFPIHAITGVLKQWLRELPEPLMTFAQYGDFLRAVELPEKQEQLAAIYAVLEHLPEANHNSLERLIFHLVKVALLEDVNRMSPGALAIIFAPCLLRCPDNSDPLTSMKDVLKITTCVEMLIKEQMRKYKVKMEEISQLEAAESIAFRRLSLLRQNAPWPLKLGFSSPYEGVLNKSPKTRDIQEEELEVLLEEEAAGGDEDREKEILIERIQSIKEEKEDITYRLPELDPRGSDEENLDSETSASTESLLEERAGRGASEGQY

SEQ ID NO: 862313 - protein, 1635 aa, Homo sapiens
MEMVGFLPATKKQIFAVLSAILYLGNVTYKKRATGREEGLEVGPPEVLDTLSQLLKVKREILVEVLTKRKTVTVNDKLILPYSLSEAITARDSMAKSLYSALFDWIVLRINHALLNKKDVEEAVSCLSIGVLDIFGFEDFERNSFEQFCINYANEQLQYYFNQHIFKLEQEEYQGEGITWHNIGYTDNVGCIHLISKKPTGLFYLLDEESNFPHATSQTLLAKFKQQHEDNKYFLGTPVMEPAFIIQHFAGKVKYQIKDFREKNMDYMRPDIVALLRGSDSSYVRELIGMDPVAVFRWAVLRAAIRAMAVLREAGRLRAERAEKAAGMSSPGAQSHPEELPRGASTPSEKLYRDLHNQMIKSIKGLPWQGEDPRSLLQSLSRLQKPRAFILKSKGIKQKQIIPKNLLDSKSLKLIISMTLHDRTTKSLLHLHKKKKPPSISAQFQTSLNKLLEALGKAEPFFIRCIRSNAEKKELCFDDELVLQQLRYTGMLETVRIRRSGYSAKYTFQDFTEQFQVLLPKDAQPCREVISTLLEKMKIDKRNYQIGKTKVFLKETERQALQETLHREVVRKILLLQSWFRMVLERRHFLQMKRAAVTIQACWRSYRVRRALERTQAAVYLQASWRGYWQRKLYRHQKQSIIRLQSLCRGHLQRKSFSQMISEKQKAEEKEREALEAARAGAEEGGQGQAAGGQQVAEQGPEPAEDGGHLASEPEVQPSDRSPLEHSSPEKEAPSPEKTLPPQKTVAAESHEKVPSSREKRESRRQRGLEHVKFQNKHIQSCKEESALREPSRRVTQEQGVSLLEDKKESREDETLLVVETEAENTSQKQPTEQPQAMAVGKVSEETEKTLPSGSPRPGQLERPTSLALDSRVSPPAPGSAPETPEDKSKPCGSPRVQEKPDSPGGSTQIQRYLDAERLASAVELWRGKKLVAAASPSAMLSQSLDLSDRHRATGAALTPTEERRTSFSTSDVSKLLPSLAKAQPAAETTDGERSAKKPAVQKKKPGDASSLPDAGLSPGSQVDSKSTFKRLFLHKTKDKKYSLEGAEELENAVSGHVVLEATTMKKGLEAPSGQQHRHAAGEKRTKEPGGKGKKNRNVKIGKITVSEKWRESVFRQITNANELKYLDEFLLNKINDLRSQKTPIESLFIEATEKFRSNIKTMYSVPNGKIHVGYKDLMENYQIVVSNLATERGQKDTNLVLNLFQSLLDEFTRGYTKNDFEPVKQSKAQKKKRKQERAVQEHNGHVFASYQVSIPQSCEQCLSYIWLMDKALLCSVCKMTCHKKCVHKIQSHCSYTYGRKGEPGAEPGHFGVCVDSLTSDKASVPIVLEKLLEHVEMHGLYTEGLYRKSGAANRTRELRQALQTDPAAVKLENFPIHAITGVLKQWLRELPEPLMTFAQYGDFLRAVELPEKQEQLAAIYAVLEHLPEANHNSLERLIFHLVKVALLEDVNRMSPGALAIIFAPCLLRCPDNSDPLTSMKDVLKITTCVEMLIKEQMRKYKVKMEEISQLEAAESIAFRRLSLLRQNAPWPLKLGFSSPYEGVLNKSPKTRDIQEEELEVLLEEEAAGGDEDREKEILIERIQSIKEEKEDITYRLPELDPRGSDEENLDSETSASTESLLEERAGRGASEGQY

SEQ ID NO: 862314 - protein, 1531 aa, Homo sapiens
MKAGSLGVHLRAVTIFSVFSQCLSIGVLDIFGFEDFERNSFEQFCINYANEQLQYYFNQHIFKLEQEEYQGEGITWHNIGYTDNVGCIHLISKKPTGLFYLLDEESNFPHATSQTLLAKFKQQHEDNKYFLGTPVMEPAFIIQHFAGKVKYQIKDFREKNMDYMRPDIVALLRGSDSSYVRELIGMDPVAVFRWAVLRAAIRAMAVLREAGRLRAERAEKAAGMSSPGAQSHPEELPRGASTPSEKLYRDLHNQMIKSIKGLPWQGEDPRSLLQSLSRLQKPRAFILKSKGIKQKQIIPKNLLDSKSLKLIISMTLHDRTTKSLLHLHKKKKPPSISAQFQTSLNKLLEALGKAEPFFIRCIRSNAEKKELCFDDELVLQQLRYTGMLETVRIRRSGYSAKYTFQDFTEQFQVLLPKDAQPCREVISTLLEKMKIDKRNYQIGKTKVFLKETERQALQETLHREVVRKILLLQSWFRMVLERRHFLQMKRAAVTIQACWRSYRVRRALERTQAAVYLQASWRGYWQRKLYRHQKQSIIRLQSLCRGHLQRKSFSQMISEKQKAEEKEREALEAARAGAEEGGQGQAAGGQQVAEQGPEPAEDGGHLASEPEVQPSDRSPLEHSSPEKEAPSPEKTLPPQKTVAAESHEKVPSSREKRESRRQRGLEHVKFQNKHIQSCKEESALREPSRRVTQEQGVSLLEDKKESREDETLLVVETEAENTSQKQPTEQPQAMAVGKVSEETEKTLPSGSPRPGQLERPTSLALDSRVSPPAPGSAPETPEDKSKPCGSPRVQEKPDSPGGSTQIQRYLDAERLASAVELWRGKKLVAAASPSAMLSQSLDLSDRHRATGAALTPTEERRTSFSTSDVSKLLPSLAKAQPAAETTDGERSAKKPAVQKKKPGDASSLPDAGLSPGSQVDSKSTFKRLFLHKTKDKKYSLEGAEELENAVSGHVVLEATTMKKGLEAPSGQQHRHAAGEKRTKEPGGKGKKNRNVKIGKITVSEKWRESVFRQITNANELKYLDEFLLNKINDLRSQKTPIESLFIEATEKFRSNIKTMYSVPNGKIHVGYKDLMENYQIVVSNLATERGQKDTNLVLNLFQSLLDEFTRGYTKNDFEPVKQSKAQKKKRKQERAVQEHNGHVFASYQVSIPQSCEQCLSYIWLMDKALLCSVCKMTCHKKCVHKIQSHCSYTYGRKGEPGAEPGHFGVCVDSLTSDKASVPIVLEKLLEHVEMHGLYTEGLYRKSGAANRTRELRQALQTDPAAVKLENFPIHAITGVLKQWLRELPEPLMTFAQYGDFLRAVELPEKQEQLAAIYAVLEHLPEANHNSLERLIFHLVKVALLEDVNRMSPGALAIIFAPCLLRCPDNSDPLTSMKDVLKITTCVEMLIKEQMRKYKVKMEEISQLEAAESIAFRRLSLLRQNAPWPLKLGFSSPYEGVLNKSPKTRDIQEEELEVLLEEEAAGGDEDREKEILIERIQSIKEEKEDITYRLPELDPRGSDEENLDSETSASTESLLEERAGRGASEGQY

SEQ ID NO: 862315 - protein, 1218 aa, Homo sapiens
MTLHDRTTKSLLHLHKKKKPPSISAQFQTSLNKLLEALGKAEPFFIRCIRSNAEKKELCFDDELVLQQLRYTGMLETVRIRRSGYSAKYTFQDFTEQFQVLLPKDAQPCREVISTLLEKMKIDKRNYQIGKTKVFLKETERQALQETLHREVVRKILLLQSWFRMVLERRHFLQMKRAAVTIQACWRSYRVRRALERTQAAVYLQASWRGYWQRKLYRHQKQSIIRLQSLCRGHLQRKSFSQMISEKQKAEEKEREALEAARAGAEEGGQGQAAGGQQVAEQGPEPAEDGGHLASEPEVQPSDRSPLEHSSPEKEAPSPEKTLPPQKTVAAESHEKVPSSREKRESRRQRGLEHVKFQNKHIQSCKEESALREPSRRVTQEQGVSLLEDKKESREDETLLVVETEAENTSQKQPTEQPQAMAVGKVSEETEKTLPSGSPRPGQLERPTSLALDSRVSPPAPGSAPETPEDKSKPCGSPRVQEKPDSPGGSTQIQRYLDAERLASAVELWRGKKLVAAASPSAMLSQSLDLSDRHRATGAALTPTEERRTSFSTSDVSKLLPSLAKAQPAAETTDGERSAKKPAVQKKKPGDASSLPDAGLSPGSQVDSKSTFKRLFLHKTKDKKYSLEGAEELENAVSGHVVLEATTMKKGLEAPSGQQHRHAAGEKRTKEPGGKGKKNRNVKIGKITVSEKWRESVFRQITNANELKYLDEFLLNKINDLRSQKTPIESLFIEATEKFRSNIKTMYSVPNGKIHVGYKDLMENYQIVVSNLATERGQKDTNLVLNLFQSLLDEFTRGYTKNDFEPVKQSKAQKKKRKQERAVQEHNGHVFASYQVSIPQSCEQCLSYIWLMDKALLCSVCKMTCHKKCVHKIQSHCSYTYGRKGEPGAEPGHFGVCVDSLTSDKASVPIVLEKLLEHVEMHGLYTEGLYRKSGAANRTRELRQALQTDPAAVKLENFPIHAITGVLKQWLRELPEPLMTFAQYGDFLRAVELPEKQEQLAAIYAVLEHLPEANHNSLERLIFHLVKVALLEDVNRMSPGALAIIFAPCLLRCPDNSDPLTSMKDVLKITTCVEMLIKEQMRKYKVKMEEISQLEAAESIAFRRLSLLRQNAPWPLKLGFSSPYEGVLNKSPKTRDIQEEELEVLLEEEAAGGDEDREKEILIERIQSIKEEKEDITYRLPELDPRGSDEENLDSETSASTESLLEERAGRGASEGQY

SEQ ID NO: 862316 - protein, 1218 aa, Homo sapiens; identical to SEQ ID NO: 862315

SEQ ID NO: 862317 - protein, 2141 aa, Homo sapiens
MSVKEAGSSGRREQAAYHLHIYPQLSTTESQASCRVTATKDSTTSDVIKDAIASLRLDGTKCYVLVEVKESGGEEWVLDANDSPVHRVLLWPRRAQDEHPQEDGYYFLLQERNADGTIKYVHMQLVAQATATRRLVERGLLPRQQADFDDLCNLPELTEGNLLKNLKHRFLQQKIYTYAGSILVAINPFKFLPIYNPKYVKMYENQQLGKLEPHVFALADVAYYTMLRKRVNQCIVISGESGSGKTQSTNFLIHCLTALSQKGYASGVERTILGAGPVLEAFGNAKTAHNNNSSRFGKFIQVSYLESGIVRGAVVEKYLLEKSRLVSQEKDERNYHVFYYLLLGVSEEERQEFQLKQPEDYFYLNQHNLKIEDGEDLKHDFERLKQAMEMVGFLPATKKQIFAVLSAILYLGNVTYKKRATGREEGLEVGPPEVLDTLSQLLKVKREILVEVLTKRKTVTVNDKLILPYSLSEAITARDSMAKSLYSALFDWIVLRINHALLNKKDVEEAVSCLSIGVLDIFGFEDFERNSFEQFCINYANEQLQYYFNQHIFKLEQEEYQGEGITWHNIGYTDNVGCIHLISKKPTGLFYLLDEESNFPHATSQTLLAKFKQQHEDNKYFLGTPVMEPAFIIQHFAGKVKYQIKDFREKNMDYMRPDIVALLRGSDSSYVRELIGMDPVAVFRWAVLRAAIRAMAVLREAGRLRAERAEKAAGMSSPGAQSHPEELPRGASTPSEKLYRDLHNQMIKSIKGLPWQGEDPRSLLQSLSRLQKPRAFILKSKGIKQKQIIPKNLLDSKSLKLIISMTLHDRTTKSLLHLHKKKKPPSISAQFQTSLNKLLEALGKAEPFFIRCIRSNAEKKELCFDDELVLQQLRYTGMLETVRIRRSGYSAKYTFQDFTEQFQVLLPKDAQPCREVISTLLEKMKIDKRNYQIGKTKVFLKETERQALQETLHREVVRKILLLQSWFRMVLERRHFLQMKRAAVTIQACWRSYRVRRALERTQAAVYLQASWRGYWQRKLYRHQKQSIIRLQSLCRGHLQRKSFSQMISEKQKAEEKEREALEAARAGAEEGGQGQAAGGQQVAEQGPEPAEDGGHLASEPEVQPSDRSPLEHSSPEKEAPSPEKTLPPQKTVAAESHEKVPSSREKRESRRQRGLEHVKFQNKHIQSCKEESALREPSRRVTQEQGVSLLEDKKESREDETLLVVETEAENTSQKQPTEQPQAMAVGKVSEETEKTLPSGSPRPGQLERPTSLALDSRVSPPAPGSAPETPEDKSKPCGSPRVQEKPDSPGGSTQIQRYLDAERLASAVELWRGKKLVAAASPSAMLSQSLDLSDRHRATGAALTPTEERRTSFSTSDVSKLLPSLAKAQPAAETTDGERSAKKPAVQKKKPGDASSLPDAGLSPGSQVDSKSTFKRLFLHKTKDKKYSLEGAEELENAVSGHVVLEATTMKKGLEAPSGQQHRHAAGEKRTKEPGGKGKKNRNVKIGKITVSEKWRESVFRQITNANELKYLDEFLLNKINDLRSQKTPIESLFIEATEKFRSNIKTMYSVPNGKIHVGYKDLMENYQIVVSNLATERGQKDTNLVLNLFQSLLDEFTRGYTKNDFEPVKQSKAQKKKRKQERAVQEHNGHVFASYQVSIPQSCEQCLSYIWLMDKALLCSVCKMTCHKKCVHKIQSHCSYTYGRKGEPGAEPGHFGVCVDSLTSDKASVPIVLEKLLEHVEMHGLYTEGLYRKSGAANRTRELRQALQTDPAAVKLENFPIHAITGVLKQWLRELPEPLMTFAQYGDFLRAVELPEKQEQLAAIYAVLEHLPEANHNSLERLIFHLVKVALLEDVNRMSPGALAIIFAPCLLRCPDNSDPLTSMKDVLKITTCVEMLIKEQMRKYKVKMEEISQLEAAESIAFRRLSLLRQNANKSPKTRDIQEEELEVLLEEEAAGGDEDREKEILIERIQSIKEEKEDITYRLPELDPRGSDEENLDSETSASTESLLEERAGRGASEGPPAPALPCPGAPTPSPLPTVAAPPRRRPSSFVTVRVKTPRRTPIMPTANIKLPPGLPSHLPRWAPGAREAAAPVRRREPPARRPDQIHSVYITPGADLPVQGALEPLEEDGQPPGAKRRYSDPPTYCLPPASGQTNG

SEQ ID NO: 862318 - protein, 1298 aa, Homo sapiens
PATRCPGHDARGTQRSVYGSLTAKTPPLSPWQGEDPRSLLQSLSRLQKPRAFILKSKGIKQKQIIPKNLLDSKSLKLIISMTLHDRTTKSLLHLHKKKKPPSISAQFQTSLNKLLEALGKAEPFFIRCIRSNAEKKELCFDDELVLQQLRYTGMLETVRIRRSGYSAKYTFQDFTEQFQVLLPKDAQPCREVISTLLEKMKIDKRNYQIGKTKVFLKETERQALQETLHREVVRKILLLQSWFRMVLERRHFLQMKRAAVTIQACWRSYRVRRALERTQAAVYLQASWRGYWQRKLYRHQKQSIIRLQSLCRGHLQRKSFSQMISEKQKAEEKEREALEAARAGAEEGGQGQAAGGQQVAEQGPEPAEDGGHLASEPEVQPSDRSPLEHSSPEKEAPSPEKTLPPQKTVAAESHEKVPSSREKRESRRQRGLEHVKFQNKHIQSCKEESALREPSRRVTQEQGVSLLEDKKESREDETLLVVETEAENTSQKQPTEQPQAMAVGKVSEETEKTLPSGSPRPGQLERPTSLALDSRVSPPAPGSAPETPEDKSKPCGSPRVQEKPDSPGGSTQIQRYLDAERLASAVELWRGKKLVAAASPSAMLSQSLDLSDRHRATGAALTPTEERRTSFSTSDVSKLLPSLAKAQPAAETTDGERSAKKPAVQKKKPGDASSLPDAGLSPGSQVDSKSTFKRLFLHKTKDKKYSLEGAEELENAVSGHVVLEATTMKKGLEAPSGQQHRHAAGEKRTKEPGGKGKKNRNVKIGKITVSEKWRESVFRQITNANELKYLDEFLLNKINDLRSQKTPIESLFIEATEKFRSNIKTMYSVPNGKIHVGYKDLMENYQIVVSNLATERGQKDTNLVLNLFQSLLDEFTRGYTKNDFEPVKQSKAQKKKRKQERAVQEHNGHVFASYQVSIPQSCEQCLSYIWLMDKALLCSVCKMTCHKKCVHKIQSHCSYTYGRKGEPGAEPGHFGVCVDSLTSDKASVPIVLEKLLEHVEMHGLYTEGLYRKSGAANRTRELRQALQTDPAAVKLENFPIHAITGVLKQWLRELPEPLMTFAQYGDFLRAVELPEKQEQLAAIYAVLEHLPEANHNSLERLIFHLVKVALLEDVNRMSPGALAIIFAPCLLRCPDNSDPLTSMKDVLKITTCVEMLIKEQMRKYKVKMEEISQLEAAESIAFRRLSLLRQNAPWPLKLGFSSPYEGVLNKSPKTRDIQEEELEVLLEEEAAGGDEDREKEILIERIQSIKEEKEDITYRLPELDPRGSDEENLDSETSASTESLLEERAGRGASEGQY

SEQ ID NO: 862319 - protein, 1380 aa, Homo sapiens
MSVKEAGSSGRREQAAYHLHIYPQLSTTESQASCRVTATKDSTTSDVIKDAIASLRLDGTKCYVLVEVKESGGEEWVLDANDSPVHRVLLWPRRAQDEHPQEDGYYFLLQERNADGTIKYVHMQLVAQATATRRLVERGLLPRQQADFDDLCNLPELTEGNLLKNLKHRFLQQKIYTYAGSILVAINPFKFLPIYNPKYVKMYENQQLGKLEPHVFALADVAYYTMLRKRVNQCIVISGESGSGKTQSTNFLIHCLTALSQKGYASGVERTILGAGPVLEAFGNAKTAHNNNSSRFGKFIQVSYLESGIVRGAVVEKYLLEKSRLVSQEKDERNYHVFYYLLLGVSEEERQEFQLKQPEDYFYLNQHNLKIEDGEDLKHDFERLKQAMEMVGFLPATKKQIFAVLSAILYLGNVTYKKRATGREEGLEVGPPEVLDTLSQLLKVKREILVEVLTKRKTVTVNDKLILPYSLSEAITARDSMAKSLYSALFDWIVLRINHALLNKKDVEEAVSCLSIGVLDIFGFEDFERNSFEQFCINYANEQLQYYFNQHIFKLEQEEYQGEGITWHNIGYTDNVGCIHLISKKPTGLFYLLDEESNFPHATSQTLLAKFKQQHEDNKYFLGTPVMEPAFIIQHFAGKVKYQIKDFREKNMDYMRPDIVALLRGSDSSYVRELIGMDPVAVFRWAVLRAAIRAMAVLREAGRLRAERAEKAAGMSSPGAQSHPEELPRGASTPSEKLYRDLHNQMIKSIKGLPWQGEDPRSLLQSLSRLQKPRAFILKSKGIKQKQIIPKNLLDSKSLKLIISMTLHDRTTKSLLHLHKKKKPPSISAQFQTSLNKLLEALGKAEPFFIRCIRSNAEKKELCFDDELVLQQLRYTGMLETVRIRRSGYSAKYTFQDFTEQFQVLLPKDAQPCREVISTLLEKMKIDKRNYQIGKTKVFLKETERQALQETLHREVVRKILLLQSWFRMVLERRHFLQMKRAAVTIQACWRSYRVRRALERTQAAVYLQASWRGYWQRKLYRHQKQSIIRLQSLCRGHLQRKSFSQMISEKQKAEEKEREALEAARAGAEEGGQGQAAGGQQVAEQGPEPAEDGGHLASEPEVQPSDRSPLEHSSPEKEAPSPEKTLPPQKTVAAESHEKVPSSREKRESRRQRGLEHVKFQNKHIQSCKEESALREPSRRVTQEQGVSLLEDKKESREDETLLVVETEAENTSQKQPTEQPQAMAVGKVSEETEKTLPSGSPRPGQLERPTSLALDSRVSPPAPGSAPETPEDKSKPCGSPRVQEKPDSPGGSTQIQRYLDAERLASAVELWRGKKLVAAASPSAMLSQSLDLSDRHRATGAALTPTEERRTSFSTSDVSKLLPSLAKAQVTTTRQNPV

SEQ ID NO: 862320 - protein, 340 aa, Homo sapiens [sequence omitted]

SEQ ID NO: 862321 - protein, 340 aa, Homo sapiens [sequence omitted]

SEQ ID NO: 862322 - protein, 96 aa, Homo sapiens
MDYMRPDIVALLRGSDSSYVRELIGMDPVAVFRWAVLRAAIRAMAVLREAGRLRAERAEKAAGGSWGVNPQKRHCREGGTSWVHLKVNTSVAFSTF

SEQ ID NO: 862323 - protein, 112 aa, Homo sapiens
MDPPFAVNRFSADSQVPFCACSHVHLPVVAATGKARGAQDANGHVKSLGKVLPILCDAPTSDAPEVVRNEEEVVGCVGIQGHIHCEKEKKLIRKWTEANPMPLLYFKGPNIS

SEQ ID NO: 862324 - protein, 112 aa, Homo sapiens; identical to SEQ ID NO: 862323

SEQ ID NO: 862325 - protein, 626 aa, Homo sapiens
MVAPWRVSVRVCLSHLRCFELRQGLSLLRPSECPRDARLCWLLLGTLPKVVSLCGDVGEGAPDVLSRRRVRCSGAAGAGPAESLPRAGPLGGVFLHLRLWLRAGALLVKFFPLLLLYPLTYLAPSVSTLWLHLLLKATETSGPTYIKLGQWASTRRDLFSEAFCAQFSKLHVRVTPHPWTHTERFLRQAFGDDWGSILSFENREPVGSGCVAQVYKAYANTAFLETDSVQRLGRASCLPPFSHTGAVGGLRELFGYLGNGRKPPENLADQSFLERLLLPKADLVGSNAGVSRAQVPGHQPEATNLISVAVKVLHPGLLAQVHMDLLLMKIGSRVLGVLPGIKWLSLPEIVEEFEKLMVQQIDLRYEAQNLEHFQVNFRNVKAVKFPTPLRPFVTREVLVETYEESVPVSSYQQAGIPVDLKRKIARLGINMLLKMIFVDNFVHADLHPGNILVQGANGLSSSQEAQLQQADICDTLVVAVPSSLCPLRLVLLDAGIVAELQAPDLRNFRAVFMAVVMGQGQRVAELILHHARASECRDVEGFKTEMAMLVTQARKNTITLEKLHVSSLLSSVFKLLMTHKVKLESNFASIVFAIMVLEGLGRSLDPKLDILEAARPFLLTGPVCPP

SEQ ID NO: 862326 - protein, 626 aa, Homo sapiens; identical to SEQ ID NO: 862325

SEQ ID NO: 862327 - protein, 590 aa, Homo sapiens
MVAPWRVSVRVCLSHLRCFELRQGLSLLRPSECPRDARLCWLLLGTLPKVVSLCGDVGEGAPDVLSRRRVRCSGAAGAGPAESLPRAGPLGGVFLHLRLWLRAGALLVKFFPLLLLYPLTYLAPSVSTLWLHLLLKATETSGPTYIKLGQWASTRRDLFSEAFCAQFSKLHVRVTPHPWTHTERFLRQAFGDDWGSILSFENREPVGSGCVAQVYKAYANTAFLETDSVQRLGRASCLPPFSHTGAVGGLRELFGYLGNGRKPPENLADQSFLERLLLPKADLVGSNAGVSRAQVPGHQPEATNLISVAVKVLHPGLLAQVHMDLLLMKIGSRVLGVLPGIKWLSLPEIVEEFEKLMVQQIDLRYEAQNLEHFQVNFRNVKAVKFPTPLRPFVTREVLVETYEESVPVSSYQQAGIPVDLKRKIARLGINMLLKMIFVDNFVHADLHPGNILVQGANGLSSSQEAQLQQADICDTLVVAVPSSLCPLRLVLLDAGIVAELQAPDLRNFRAVFMAVVMGQGQRVAELILHHARASECRDVEGFKTEMAMLVTQARKNTITLEKLHVSSLLSSVFKLLMTHKVKSQFIPAPS

SEQ ID NO: 862328 - protein, 304 aa, Homo sapiens [sequence omitted]

SEQ ID NO: 862329 - protein, 626 aa, Homo sapiens; identical to SEQ ID NO: 862325

SEQ ID NO: 862330 - protein, 643 aa, Homo sapiens
MVAPWRVSVRVCLSHLRCFELRQGLSLLRPSECPRDARLCWLLLGTLPKVVSLCGDVGEGAPDVLSRRRVRCSGAAGAGPAESLPRAGPLGGVFLHLRLWLRAGALLVKFFPLLLLYPLTYLAPSVSTLWLHLLLKATETSGPTYIKLGQWASTRRDLFSEAFCAQFSKLHVRVTPHPWTHTERFLRQAFGDDWGSILSFENREPVGSGCVAQVYKAYANTAFLETDSVQRLGRASCLPPFSHTGAVGGLRELFGYLGNGRKPPENLADQSFLERLLLPKADLVGSNAGVSRAQVPGHQPEATNLISVAVKVLHPGLLAQVHMDLLLMKIGSRVLGVLPGIKWLSLPEIVEEFEKLMVQQIDLRYEAQNLEHFQVNFRNVKAVKFPTPLRPFVTREVLVETYEESVPVSSYQQAGIPVDLKRKIARLGINMLLKMIFVDNFVHADLHPGNILVQGANGLSSSQEAQLQQADICDTLVVAVPSSLCPLRLVLLDAGIVAELQAPDLRNFRAVFMAVVMGQGQRVAELILHHARASECRDVEGFKTEMAMLVTQARKNTITLEKLHVSSLLSSVFKLLMTHKVKLESNFASIVFAIMVLEGLGRQCAPRDGAVASVGPCQELEATPKSLSYGSWDVLKLGHQFQM

SEQ ID NO: 862331 - protein, 407 aa, Homo sapiens
MVAPWRVSVRVCLSHLRCFELRQGLSLLRPSECPRDARLCWLLLGTLPKVVSLCGDVGEGAPDVLSRRRVRCSGAAGAGPAESLPRAGPLGGVFLHLRLWLRAGALLVKFFPLLLLYPLTYLAPSVSTLWLHLLLKATETSGPTYIKLGQWASTRRDLFSEAFCAQFSKLHVRVTPHPWTHTERFLRQAFGDDWGSILSFENREPVGSGCVAQVYKAYANTAFLETDSVQRLGRASCLPPFSHTGAVGGLRELFGYLGNGRKPPENLADQSFLERLLLPKADLVGSNAGVSRAQVPGHQPEATNLISVAVKVLHPGLLAQVHMDLLLMKIGSRVLGVLPGIKWLSLPEIVEEFEKLMVQQIDLRYEAQNLEHFQVNFRNVKAVKFPTPKSLSYGSWDVLKLGHQFQM

SEQ ID NO: 862332 - protein, 590 aa, Homo sapiens; identical to SEQ ID NO: 862327

SEQ ID NO: 862333 - protein, 109 aa, Homo sapiens
FLATSFNPPNRKKSLGAPRPEASTTKRKAVDTYCLDYKPSKGRRWAARAPSTRITYGTITKERDYCAEDQTIESWREEGFPVGLKLAVLGIFIIVVFVYLTVENKSLFG

SEQ ID NO: 862334 - protein, 174 aa, Homo sapiens
SGSAGNCEADCEGKGALLSPPGFYHQKRGQTSIIMVDVKCLSDCKLQNQLEKLGFSPGPILQLNIILQGNIILSTEKSKKLKKWPEASTTKRKAVDTYCLDYKPSKGRRWAARAPSTRITYGTITKERDYCAEDQTIESWREEGFPVGLKLAVLGIFIIVVFVYLTVENKSLFG

SEQ ID NO: 862335 - protein, 101 aa, Homo sapiens
SGSAGNCEADCEGKGALLSPPGFYHQKRGQTSIIMVDVKCLSDCKLQNQLEKLGFSPGPILRGLQEHQAPESHMGLSPKRETTARKTRLSRAGEKKVSQWA

SEQ ID NO: 862336 - protein, 142 aa, Homo sapiens
SGSAGNCEADCEGKGALLSPPGFYHQKRGQTSIIMVDVKCLSDCKLQNQLEKLGFSPGPILPSTRKLYEKKLVQLLVSPPCAPPVMNGPRELDGAQDSDDSEGGLQEHQAPESHMGLSPKRETTARKTRLSRAGEKKVSQWA

SEQ ID NO: 862337 - protein, 181 aa, Homo sapiens
MVDVKCLSDCKLQNQLEKLGFSPGPILPSTRKLYEKKLVQLLVSPPCAPPVMNGPRELDGAQDSDDSEELNIILQGNIILSTEKSKKLKKWPEASTTKRKAVDTYCLDYKPSKGRRWAARAPSTRITYGTITKERDYCAEDQTIESWREEGFPVGLKLAVLGIFIIVVFVYLTVENKSLFG

SEQ ID NO: 862338 - protein, 112 aa, Homo sapiens [sequence omitted]

SEQ ID NO: 862339 - protein, 438 aa, Homo sapiens
MQNSHMDEYRNSSNGSTGNSSEVVVEHPTDFSTEIMNVTEMEQSPDDSPNVNASTEETEMASAVDLPVTLTETEANFPPEYEKFWKTVENNPQDFTGWVYLLQYVEQENHLMAARKAFDRFFIHYPYCYGYWKKYADLEKRHDNIKPSDEVYRRGLQAIPLSVDLWIHYINFLKETLDPGDPETNNTIRGTFEHAVLAAGTDFRSDRLWEMYINWENEQGNLREVTAIYDRILGIPTQLYSHHFQRFKEHVQNNLPRDLLTGEQFIQLRRELASVNGHSGDDGPPGDDLPSGIEDITDPAKLITEIENMRHRIIEIHQEMFNYNEHEVSKRWTFEEGIKRPYFHVKPLEKAQLKNWKEYLEFEIENGTHERVVVLFERCVISCALYEEFWIKVRKSCALKLEYIINIDLVTNLFCTSVECCSYNYICCIRRWSACNQI

SEQ ID NO: 862340 - protein, 217 aa, Homo sapiens [sequence omitted]

SEQ ID NO: 862341 - protein, 247 aa, Homo sapiens
LECGQKGVARVWELLSQVAGNAKSTWLNVLSTVGLISIIISNAPFPLYPGEVDLVPNSARGNAKSNNESSFYAVKLARHLFKIQKNLPKSRKVLLEAIERDKENTKLYLNLLEMEYSGDLKQNEENILNCFDKAVHGSLPIKMRITFSQRKVEFLEDFGSDVNKLLNAYDEHQTLLKEQDSLKRKAENGSEEPEEKKAHTEDTTSSSTQMIDGDLQANQAVYNYSAWYQYNYQNPWNYGQYYPPPPT

SEQ ID NO: 862342 - protein, 217 aa, Homo sapiens [sequence omitted]

SEQ ID NO: 862343 - protein, 548 aa, Homo sapiens
MQGLLRFEDQDSARGDQNIAMFYPTSTQMVYRRGLQAIPLSVDLWIHYINFLKETLDPGDPETNNTIRGTFEHAVLAAGTDFRSDRLWEMYINWENEQGNLREVTAIYDRILGIPTQLYSHHFQRFKEHVQNNLPRDLLTGEQFIQLRRELASVNGHSGDDGPPGDDLPSGIEDITDPAKLITEIENMRHRIIEIHQEMFNYNEHEVSKRWTFEEGIKRPYFHVKPLEKAQLKNWKEYLEFEIENGTHERVVVLFERCVISCALYEEFWIKYAKYMENHSIEGVRHVFSRACTIHLPKKPMVHMLWAAFEEQQGNINEARNILKTFEECVLGLAMVRLRRVSLERRHGNLEEAEHLLQDAIKNAKSNNESSFYAVKLARHLFKIQKNLPKSRKVLLEAIERDKENTKLYLNLLEMEYSGDLKQNEENILNCFDKAVHGSLPIKMRITFSQRKVEFLEDFGSDVNKLLNAYDEHQTLLKEQDSLKRKAENGSEEPEEKKAHTEDTTSSSTQMIDGDLQANQAVYNYSAWYQYNYQNPWNYGQYYPPPPT

SEQ ID NO: 862344 - protein, 217 aa, Homo sapiens [sequence omitted]

SEQ ID NO: 862345 - protein, 217 aa, Homo sapiens [sequence omitted]

SEQ ID NO: 862346 - protein, 1006 aa, Homo sapiens
MPDQISVSEFVAETHEDYKAPTASSFTTRTAQCRNTVAAIEEALDVDRMVLYKMKKSVKAINSSGLAHVENEEQYTQALEKFGGNCVCRDDPDLGSAFLKFSVFTKELTALFKNLIQNMNNIISFPLDSLLKGDLKGVKGDLKKPFDKAWKDYETKITKIEKEKKEHAKLHGMIRTEISGAEIAEEMEKERRFFQLQMCEYLLKVNEIKIKKGVDLLQNLIKYFHAQCNFFQDGLKAVESLKPSIETLSTDLHTIKQAQDEERRQLIQLRDILKSALQVEQKEDSQIRQSTAYSLHQPQGNKEHGTERNGSLYKKSDGIRKVWQKRKCSVKNGFLTISHGTANRPPAKLNLLTCQVKTNPEEKKCFDLISHDRTYHFQAEDEQECQIWMSVLQNSKEEALNNAFKGDDNTGENNIVQELTKEIISEVQRMTGNDVCCDCGAPDPTWLSTNLGILTCIECSGIHRELGVHYSRMQSLTLDVLGTSELLLAKNIGNAGFNEIMECCLPAEDSVKPNPGSDMNARKDYITAKYIERRYARKKHADNAAKLHSLCEAVKTRDIFGLLQAYADGVDLTEKIPLANGHEPDETALHLAVRSVDRTSLHIVDFLVQNSGNLDKQTGKGSTALHYCCLTDNAECLKLLLRGKASIEIANESGETPLDIAKRLKHEHCEELLTQALSGRFNSHVHVEYEWRLLHEDLDESDDDMDEKLQPSPNRREDRPISFYQLGSNQLQSNAVSLARDAANLAKEKQRAFMPSILQNETYGALLSGSPPPAQPAAPSTTSAPPLPPRNVGKVQTASSANTLWKTNSVSVDGGSRQRSSSDPPAVHPPLPPLRVTSTNPLTPTPPPPVAKTPSVMEALSQPSKPAPPGISQIRPPPLPPQPPSRLPQKKPAPGADKSTPLTNKGQPRGPVDLSATEALGPLSNAMVLQPPAPMPRKSQATKLKPKRVKALYNCVADNPDELTFSEGDVIIVDGEEDQEWWIGHIDGDPGRKGAFPVSFVHFIAD

SEQ ID NO: 862347 - protein, 91 aa, Homo sapiens
MECCLPAEDSVKPNPGSDMNARKDYITAKYIERRYARKKHADNAAKLHSLCEAVKTRDIFGLLQAYADGVDLTEKIPLANGHVRVWVVATL

SEQ ID NO: 862348 - protein, 1006 aa, Homo sapiens; identical to SEQ ID NO: 862346

SEQ ID NO: 862349 - protein, 805 aa, Homo sapiens
MPDQISVSEFVAETHEDYKAPTASSFTTRTAQCRNTVAAIEEALDVDRMVLYKMKKSVKAINSSGLAHVENEEQYTQALEKFGGNCVCRDDPDLGSAFLKFSVFTKELTALFKNLIQNMNNIISFPLDSLLKGDLKGVKGDLKKPFDKAWKDYETKITKIEKEKKEHAKLHGMIRTEISGAEIAEEMEKERRFFQLQMCEYLLKVNEIKIKKGVDLLQNLIKYFHAQCNFFQDGLKAVESLKPSIETLSTDLHTIKQAQDEERRQLIQLRDILKSALQVEQKEDSQIRQSTAYSLHQPQGNKEHGTERNGSLYKKSDGIRKVWQKRKCSVKNGFLTISHGTANRPPAKLNLLTCQVKTNPEEKKCFDLISHDRTYHFQAEDEQECQIWMSVLQNSKEEALNNAFKGDDNTGENNIVQELTKEIISEVQRMTGNDVCCDCGAPDPTWLSTNLGILTCIECSGIHRELGVHYSRMQSLTLDVLGTSELLLAKNIGNAGFNEIMECCLPAEDSVKPNPGSDMNARKDYITAKYIERRYARKKHADNAAKLHSLCEAVKTRDIFGLLQAYADGVDLTEKIPLANGHEPDETALHLAVRSVDRTSLHIVDFLVQNSGNLDKQTGKGSTALHYCCLTDNAECLKLLLRGKASIEIANESGETPLDIAKRLKHEHCEELLTQALSGRFNSHVHVEYEWRLLHEDLDESDDDMDEKLQPSPNRREDRPISFYQLGSNQLQSNAVSLARDAANLAKEKQRAFMPSILQNETYGALLSGSPPPAQPAAPSTTSAPPLPPRNVGKDPLTPKPSPMQ

SEQ ID NO: 862350 - protein, 127 aa, Homo sapiens
DIAKHTDREVRRARCGGGDMGVPCPPWVPPSRTLCVVCHPEAREPVLFDFYGSFLVSASLPPGYRVRPSLGRALRPTVRKVGDDKSPALGQEKFREILSPEALTLHVITEDCNKGFESYEPGTVDEN

SEQ ID NO: 862351 - protein, 1027 aa, Homo sapiens
RTSLHIVDFLVQNSGNLDKQTGKGSTALHYCCLTDNAECLKLLLRGKASIEIANESGETPLDIAKRLKHEHCEELLTQALSGRFNSHAHVENEEQYTQALEKFGGNCVCRDDPDLGSAFLKFSVFTKELTALFKNLIQNMNNIISFPLDSLLKGDLKGVKGDLKKPFDKAWKDYETKITKIEKEKKEHAKLHGMIRTEISGAEIAEEMEKERRFFQLQMCEYLLKVNEIKIKKGVDLLQNLIKYFHAQCNFFQDGLKAVESLKPSIETLSTDLHTIKQAQDEERRQLIQLRDILKSALQVEQKEDSQIRQSTAYSLHQPQGNKEHGTERNGSLYKKSDGIRKVWQKRKCSVKNGFLTISHGTANRPPAKLNLLTCQVKTNPEEKKCFDLISHDRTYHFQAEDEQECQIWMSVLQNSKEEALNNAFKGDDNTGENNIVQELTKEIISEVQRMTGNDVCCDCGAPDPTWLSTNLGILTCIECSGIHRELGVHYSRMQSLTLDVLGTSELLLAKNIGNAGFNEIMECCLPAEDSVKPNPGSDMNARKDYITAKYIERRYARKKHADNAAKLHSLCEAVKTRDIFGLLQAYADGVDLTEKIPLANGHEPDETALHLAVRSVDRTSLHIVDFLVQNSGNLDKQTGKGSTALHYCCLTDNAECLKLLLRGKASIEIANESGETPLDIAKRLKHEHCEELLTQALSGRFNSHVHVEYEWRLLHEDLDESDDDMDEKLQPSPNRREDRPISFYQLGSNQLQSNAVSLARDAANLAKEKQRAFMPSILQNETYGALLSGSPPPAQPAAPSTTSAPPLPPRNVGKVQTASSANTLWKTNSVSVDGGSRQRSSSDPPAVHPPLPPLRVTSTNPLTPTPPPPVAKTPSVMEALSQPSKPAPPGISQIRPPPLPPQPPSRLPQKKPAPGADKSTPLTNKGQPRGPVDLSATEALGPLSNAMVLQPPAPMPRKSQATKLKPKRVKALYNCVADNPDELTFSEGDVIIVDGEEDQEWWIGHIDGDPGRKGAFPVSFVHFIAD

SEQ ID NO: 862352 - protein, 1006 aa, Homo sapiens; identical to SEQ ID NO: 862346

SEQ ID NO: 862353 - protein, 1006 aa, Homo sapiens; identical to SEQ ID NO: 862346

SEQ ID NO: 862354 - protein, 711 aa, Homo sapiens
MPDQISVSEFVAETHEDYKAPTASSFTTRTAQCRNTVAAIEEALDVDRMVLYKMKKSVKAINSSGLAHVENEEQYTQALEKFGGNCVCRDDPDLGSAFLKFSVFTKELTALFKNLIQNMNNIISFPLDSLLKGDLKGVKGDLKKPFDKAWKDYETKITKIEKEKKEHAKLHGMIRTEISGAEIAEEMEKERRFFQLQMCEYLLKVNEIKIKKGVDLLQNLIKYFHAQCNFFQDGLKAVESLKPSIETLSTDLHTIKQAQDEERRQLIQLRDILKSALQVEQKEDSQIRQSTAYSLHQPQGNKEHGTERNGSLYKKSDGIRKVWQKRKCSVKNGFLTISHGTANRPPAKLNLLTCQVKTNPEEKKCFDLISHDRTYHFQAEDEQECQIWMSVLQNSKEEALNNAFKGDDNTGENNIVQELTKEIISEVQRMTGNDVCCDCGAPDPTWLSTNLGILTCIECSGIHRELGVHYSRMQSLTLDVLGTSELLLAKNIGNAGFNEIMECCLPAEDSVKPNPGSDMNARKDYITAKYIERRYARKKHADNAAKLHSLCEAVKTRDIFGLLQAYADGVDLTEKIPLANGHEPDETALHLAVRSVDRTSLHIVDFLVQNSGNLDKQTGKGSTALHYCCLTDNAECLKLLLRGKASIEIANESGETPLDIAKRLKHEHCEELLTQALSGRFNSHVHVEYEWRLLHEDLDESDDDMDEKLQG

SEQ ID NO: 862355 - protein, 110 aa, Homo sapiens [sequence omitted]

SEQ ID NO: 862356 - protein, 583 aa, Homo sapiens
MTFYLFGIRSFPKLWKSPYLGLGPGHSYVSLFLADRCGIRNQQRLFSLKTMSPQNTKATNLIAKARYLRKDEGSNKQVYSVPHFFLAGAAKERSQMNSQTEDHALAPVRNTIQLPTQPLNSEEWDKLKEDLKENTGKTSFESWIISQMAGCHSSIDVAKSLLAWVAAKNNGIVSYDLLVKYLYLCVFHMQTSEVIDVFEIMKARYKTLEPRGYSLLIRGLIHSDRWREALLLLEDIKKVITPSKKNYNDCIQGALLHQDVNTAWNLYQELLGHDIVPMLETLKAFFDFGKDIKDDNYSNKLLDILSYLRNNQLYPGESFAHSIKTWFESVPGKQWKGQFTTVRKSGQCSGCGKTIESIQLSPEEYECLKGKIMRDVIDGGDQYRKTTPQELKRFENFIKSRPPFDVVIDGLNVAKMFPKVRESQLLLNVVSQLAKRNLRLLVLGRKHMLRRSSQWSRDEMEEVQKQASCFFADDISEDDPFLLYATLHSGNHCRFITRDLMRDHKACLPDAKTQRLFFKWQQGHQLAIVNRFPGSKLTFQRILSYDTVVQTTGDSWHIPYDEDLVERCSCEVPTKWLCLHQKT

SEQ ID NO: 862357 - protein, 490 aa, Homo sapiens
MVEPGCKSAEGLAPVRNTIQLPTQPLNSEEWDKLKEDLKENTGKTSFESWIISQMAGCHSSIDVAKSLLAWVAAKNNGIVSYDLLVKYLYLCVFHMQTSEVIDVFEIMKARYKTLEPRGYSLLIRGLIHSDRWREALLLLEDIKKVITPSKKNYNDCIQGALLHQDVNTAWNLYQELLGHDIVPMLETLKAFFDFGKDIKDDNYSNKLLDILSYLRNNQLYPGESFAHSIKTWFESVPGKQWKGQFTTVRKSGQCSGCGKTIESIQLSPEEYECLKGKIMRDVIDGGDQYRKTTPQELKRFENFIKSRPPFDVVIDGLNVAKMFPKVRESQLLLNVVSQLAKRNLRLLVLGRKHMLRRSSQWSRDEMEEVQKQASCFFADDISEDDPFLLYATLHSGNHCRFITRDLMRDHKACLPDAKTQRLFFKWQQGHQLAIVNRFPGSKLTFQRILSYDTVVQTTGDSWHIPYDEDLVERCSCEVPTKWLCLHQKT

SEQ ID NO: 862358 - protein, 565 aa, Homo sapiens
MTFYLFGIRSFPKLWKSPYLGLGPGHSYVSLFLADRCGIRNQQRLFSLKTMSPQNTKATNLIAKARYLRKDEGSNKQVYSVPHFFLAGAAKERSQMNSQTEDHALAPVRNTIQLPTQPLNSEEWDKLKEDLKENTGKTSFESWIISQMAGCHSSIDVAKSLLAWVAAKNNGIVSYDLLVKYLYLCVFHMQTSEVIDVFEIMKARYKTLEPRGYSLLIRGLIHSDRWREALLLLEDIKKVITPSKKNYNDCIQGALLHQDVNTAWNLYQELLGHDIVPMLETLKAFFDFGKDIKDDNYSNKLLDILSYLRNNQLYPGESFAHSIKTWFESVPGKQWKGQFTTVRKSGQCSGCGKTIESIQLSPEEYECLKGKIMRDVIDGGDQYRKTTPQELKRFENFIKSRPPFDVVIDGLNVAIAKRNLRLLVLGRKHMLRRSSQWSRDEMEEVQKQASCFFADDISEDDPFLLYATLHSGNHCRFITRDLMRDHKACLPDAKTQRLFFKWQQGHQLAIVNRFPGSKLTFQRILSYDTVVQTTGDSWHIPYDEDLVERCSCEVPTKWLCLHQKT

SEQ ID NO: 862359 - protein, 123 aa, Homo sapiens
SSAVLDCVLSYAWFSSEDDPFLLYATLHSGNHCRFITRDLMRDHKACLPDAKTQRLFFKWQQGHQLAIVNRFPGSKLTFQRILSYDTVVQTTGDSWHIPYDEDLVERCSCEVPTKWLCLHQKT

SEQ ID NO: 862360 - protein, 567 aa, Homo sapiens
MTFYLFGIRSFPKLWKSPYLGLGPGHSYVSLFLADRCGIRNQQRLFSLKTMSPQNTKATNLIAKARYLRKDEGSNKQVYSVPHFFLAGAAKERSQMNSQTEDHALAPVRNTIQLPTQPLNSEEWDKLKEDLKENTGKTSFESWIISQMAGCHSSIDVAKSLLAWVAAKNNGIVSYDLLVKYLYLCVFHMQTSEVIDVFEIMKARYKTLEPRGYSLLIRGLIHSDRWREALLLLEDIKKVITPSKKNYNDCIQGALLHQDVNTAWNLYQELLGHDIVPMLETLKAFFDFGKDIKDDNYSNKLLDILSYLRNNQLYPGESFAHSIKTWFESGQCSGCGKTIESIQLSPEEYECLKGKIMRDVIDGGDQYRKTTPQELKRFENFIKSRPPFDVVIDGLNVAKMFPKVRESQLLLNVVSQLAKRNLRLLVLGRKHMLRRSSQWSRDEMEEVQKQASCFFADDISEDDPFLLYATLHSGNHCRFITRDLMRDHKACLPDAKTQRLFFKWQQGHQLAIVNRFPGSKLTFQRILSYDTVVQTTGDSWHIPYDEDLVERCSCEVPTKWLCLHQKT

SEQ ID NO: 862361 - protein, 583 aa, Homo sapiens; identical to SEQ ID NO: 862356

SEQ ID NO: 862362 - protein, 211 aa, Homo sapiens
MRDVIDGGDQYRKTTPQELKRFENFIKSRPPFDVVIDGLNVAKMFPKVRESQLLLNVVSQLAKRNLRLLVLGRKHMLRRSSQWSRDEMEEVQKQASCFFADDISEDDPFLLYATLHSGNHCRFITRDLMRDHKACLPDAKTQRLFFKWQQGHQLAIVNRFPGSKLTFQRILSYDTVVQTTGDSWHIPYDEDLVERCSCEVPTKWLCLHQKT

SEQ ID NO: 862363 - protein, 211 aa, Homo sapiens; identical to SEQ ID NO: 862362

SEQ ID NO: 862364 - protein, 328 aa, Homo sapiens
GSQRSSGPRSLCVLRGRRRGEAASAAGEGGGAEAQTEARRLGERRRGGRDRAWTAVDTASCAGKRAARSRRRAPGTEKGSPGDLRPSMHRAPSPTAEQPPGGGDSARRTLQPRLKPSARAMALPRTLGELQLYRVLQRANLLSYYETFIQQGGDDVQQLCEAGEEEFLEIMALVGMATKPLHVRRLQKALREWATNPGLFSQPVPAVPVSSIPLFKISETAGTRKGSMSNGHGSPGEKAGSARSFSPKSPLELGEKLSPLPGGPGAGDPRIWPGRSTPESDVGAGGEEEAGAGGTGGGPDRLEPEMVPPACLGRVWMDICRLWGHVQG

SEQ ID NO: 862365 - protein, 612 aa, Homo sapiens
GSQRSSGPRSLCVLRGRRRGEAASAAGEGGGAEAQTEARRLGERRRGGRDRAWTAVDTASCAGKRAARSRRRAPGTEKGSPGDLRPSMHRAPSPTAEQPPGGGDSARRTLQPRLKPSARAMALPRTLGELQLYRVLQRANLLSYYETFIQQGGDDVQQLCEAGEEEFLEIMALVGMATKPLHVRRLQKALREWATNPGLFSQPVPAVPVSSIPLFKISETAGTRKGSMSNGHGSPGEKAGSARSFSPKSPLELGEKLSPLPGGPGAGDPRIWPGRSTPESDVGAGGEEEAGSPPFSPPAGGGVPEGTGAGGLAAGGTGGGPDRLEPEMVRMVVESVERIFRSFPRGDAGEVTSLLKLNKKLARSVGHIFEMDDNDSQKEEEIRKYSIIYGRFDSKRREGKQLSLHELTINEAAAQFCMRDNTLLLRRVELFSLSRQVARESTYLSSLKGSRLHPEELGGPPLKKLKQEVGEQSHPEIQQPPPGPESYVPPYRPSLEEDSASLSGESLDGHLQAVGSCPRLTPPPADLPLALPAHGLWSRHILQQTLMDEGLRLARLVSHDRVGRLSPCVPAKPPLAEFEEGLLDRCPAPGPHPALVEGRRSSVKVEAEASRQ

SEQ ID NO: 862366 - protein, 446 aa, Homo sapiens
GSQRSSGPRSLCVLRGRRRGEAASAAGEGGGAEAQTEARRLGERRRGGRDRAWTAVDTASCAGKRAARSRRRAPGTEKGSPGDLRPSMHRAPSPTAEQPPGGGDSARRTLQPRLKPSARAMALPRTLGELQLYRVLQRANLLSYYETFIQQGGDDVQQLCEAGEEEFLEIMALVGMATKPLHVRRLQKALREWATNPGLFSQPVPAVPVSSIPLFKISETAGTRKGSMSNGHGSPGEKAGSARSFSPKSPLELGEKLSPLPGGPGAGDPRIWPGRSTPESDVGAGGEEEAGSPPFSPPAGGGVPEGTGAGGLAAGGTGGGPDRLEPEMVRMVVESVERIFRSFPRGDAGEVTSLLKLNKKLARSVGHIFEMDDNDSQKEEEIRKYSIIYGRFDSKRREGKQLSLHEVRTPRPPRIALDFQVSSRLPLRVSTVSDYLSLSLDQDPRP

SEQ ID NO: 862367 - protein, 492 aa, Homo sapiens
GSQRSSGPRSLCVLRGRRRGEAASAAGEGGGAEAQTEARRLGERRRGGRDRAWTAVDTASCAGKRAARSRRRAPGTEKGSPGDLRPSMHRAPSPTAEQPPGGGDSARRTLQPRLKPSARAMALPRTLGELQLYRVLQRANLLSYYETFIQQGGDDVQQLCGGRELKRWTFLGRIIAHYVRDIGHNTEGTHSQMSGDRPCDERHLDEDVGHYHTFQRGTRYMVQTLVSLVLAILGSSQSRVALALVKGFVVEAMSGGTRRGEMRDVELEGKNGGGNLGSGPGGEKAGSARSFSPKSPLELGEKLSPLPGGPGAGDPRIWPGRSTPESDVGAGGEEEAGSPPFSPPAGGGVPEGTGAGGLAAGGTGGGPDRLEPEMVRMVVESVERIFRSFPRGDAGEVTSLLKLNKKLARSVGHIFEMDDNDSQKEEEIRKYSIIYGRFDSKRREGKQLSLHEVRTPRPPRIALDFQVSSRLPLRVSTVSDYLSLSLDQDPRP

SEQ ID NO: 862368 - protein, 548 aa, Homo sapiens
GSQRSSGPRSLCVLRGRRRGEAASAAGEGGGAEAQTEARRLGERRRGGRDRAWTAVDTASCAGKRAARSRRRAPGTEKGSPGDLRPSMHRAPSPTAEQPPGGGDSARRTLQPRLKPSARAMALPRTLGELQLYRVLQRANLLSYYETFIQQGGDDVQQLCEAGEEEFLEIMALVGMATKPLHVRRLQKALREWATNPGLFSQPVPAVPVSSIPLFKISETAGTRKGSMSNGHGSPGEKAGSARSFSPKSPLELGEKLSPLPGGPGAGDPRIWPGRSTPESDVGAGGEEEAGSPPFSPPAGGGVPEGTGAGGLAAGGTGGGPDRLEPEMVRMVVESVERIFRSFPRGDAGEVTSLLKLNKKLARSVGHIFEMDDNDSQKEEEIRKYSIIYGRFDSKRREGKQLSLHELTINEAAAQFCMRDNTLLLRRVELFSLSRQVARESTYLSSLKGSRLHPEELGGPPLKKLKQEVGEQSHPEIQQPPPGPESYVPPYRPSLEEDSASLSGESLDGHLQEFEEGLLDRCPAPGPHPALVEGRRSSVKVEAEASRQ

SEQ ID NO: 862369 - protein, 138 aa, Homo sapiens
  misc_feature (116)..(116): Xaa can be any naturally occurring amino acid
  misc_feature (120)..(120): Xaa can be any naturally occurring amino acid
  misc_feature (123)..(125): Xaa can be any naturally occurring amino acid
  misc_feature (129)..(129): Xaa can be any naturally occurring amino acid
GSQRSSGPRSLCVLRGRRRGEAASAAGEGGGAEAQTEARRLGERRRGGRDRAWTAVDTASCAGKRAARSRRRAPGTEKGSPGDLRPSMHRAPSPTAEQPPGGGDSARRTLQPRLKXSARXMAXXXKIPXSYSVSRSYI

SEQ ID NO: 862370 - protein, 446 aa, Homo sapiens; identical to SEQ ID NO: 862366

SEQ ID NO: 862371 - protein, 92 aa, Homo sapiens
SRALAELRDRAGQRQEHDEQDELPRAAALLQPADQRQLAQGHGSGAPLRARCAVPFISKGETNRCPLTSLELCRPSEGTVGARAVFLKSYLE

SEQ ID NO: 862372 - protein, 200 aa, Homo sapiens
PGVSRPLRDVELRKMSPKPRASGPPAKATEAGKRKSSSQPSPSDPKKKTTKVAKKGKAVRRGRRGKKGAATKMAAVTAPEAESGPAAPGPSDQPSQELPQHELPPEEPVSEGTQHDPLSQEAELEEPLSQESEVEEPLSQESQVEEPLSQESEVEEPLSQESQVEEPLSQESEVEEPLSQESQVEEPLSQESEMEELPSV

SEQ ID NO: 862373 - protein, 172 aa, Homo sapiens
PGVSRPLRDVELRKMSPKPRASGPPAKATEAGKRKSSSQPSPSDPKKKTTKVAKKGKAVRRGRRGKKGAATKMAAVTAPEAESGPAAPGPSDQPSQELPQHELPPEEPVSEGTQHDPLSQEAELEEPLSQESEVEEPLMCRRPATPLSPRAATKFRPSRQTSEISPAGCLPF

SEQ ID NO: 862374 - protein, 284 aa, Homo sapiens
MAVDIEYRYNCMAPSLRQERFAFKISPKPSKPLRPCIQLSSKNEASGMVAPAVQEKKVKKRVSFADNQGLALTMVKVFSEFDDPLDMPFNITELLDNIVSLTTAESESFVLDFSQPSADYLDFRNRLQADHVCLENCVLKDKAIAGTAKVQNLAFEKTVKIRMTFDTWKSYTDFPCQYVKDTYAGSDRDTFSFDISLPEKIQSYERMEFAVYYECNGQTYWDSNRGKNYRIIRAELKSTQGMTKPHSGPDLGISFDQFGSPRCSYGLFPEWPSYLGYEKLGPYY

SEQ ID NO: 862375 - protein, 284 aa, Homo sapiens; identical to SEQ ID NO: 862374

SEQ ID NO: 862376 - protein, 284 aa, Homo sapiens; identical to SEQ ID NO: 862374

SEQ ID NO: 862377 - protein, 284 aa, Homo sapiens; identical to SEQ ID NO: 862374

SEQ ID NO: 862378 - protein, 284 aa, Homo sapiens; identical to SEQ ID NO: 862374

SEQ ID NO: 862379 - protein, 437 aa, Homo sapiens
MASPSSFTYYCPPSSSPVWSEPLYSLRPEHARERLQDDSVETVTSIEQAKVEEKIQEVFSSYKFNHLVPRLVLQREKHFHYLKRGLRQLTDAYECLDASRPWLCYWILHSLELLDEPIPQIVATDVCQFLELCQSPEGGFGGGPGQYPHLAPTYAAVNALCIIGTEEAYDIINREKLLQYLYSLKQPDGSFLMHVGGEVDVRSAYCAASVASLTNIITPDLFEGTAEWIARCQNWEGGIGGVPGMEAHGGYTFCGLAALVILKRERSLNLKSLLQWVTSRQMRFEGGFQGRCNKLVDGCYSFWQAGLLPLLHRALHAQGDPALSMSHWMFHQQALQEYILMCCQCPAGGLLDKPGKSRDFYHTCYCLSGLSIAQHFGSGAMLHDVVLGVPENALQPTHPVYNIGPDKVIQATTYFLQKPVPGFEELKDETSAEPATD

SEQ ID NO: 862380 - protein, 96 aa, Homo sapiens
MASPSSFTYYCPPSSSPVWSEPLYSLRPEHARERLQDDSVETVTSIEQKMCQRNFKNHFTQISMTRNTSNHLLLICFYRLNYTVVLGVSFSRVMLQ

SEQ ID NO: 862381 - protein, 437 aa, Homo sapiens; identical to SEQ ID NO: 862379

SEQ ID NO: 862382 - protein, 505 aa, Homo sapiens
AVPFLWEAPGAQAWASSWSVCAASLGKGRFKVGLGGEGSSRVPSALKNEKNRVLCLEDRGSPCGSDSPLCSASTSGGSGVHSALFPTCPQLLEAESRARLLSCRFTICLIFDLQCQAKVEEKIQEVFSSYKFNHLVPRLVLQREKHFHYLKRGLRQLTDAYECLDASRPWLCYWILHSLELLDEPIPQIVATDVCQFLELCQSPEGGFGGGPGQYPHLAPTYAAVNALCIIGTEEAYDIINREKLLQYLYSLKQPDGSFLMHVGGEVDVRSAYCAASVASLTNIITPDLFEGTAEWIARCQNWEGGIGGVPGMEAHGGYTFCGLAALVILKRERSLNLKSLLQWVTSRQMRFEGGFQGRCNKLVDGCYSFWQAGLLPLLHRALHAQGDPALSMSHWMFHQQALQEYILMCCQCPAGGLLDKPGKSRDFYHTCYCLSGLSIAQHFGSGAMLHDVVLGVPENALQPTHPVYNIGPDKVIQATTYFLQKPVPGFEELKDETSAEPATD

SEQ ID NO: 862383 - protein, 424 aa, Homo sapiens
MASPSSFTYYCPPSSSPVWSEPLYSLRPEHARERLQDDSVETVTSIEQAKVEEKIQEVFSSYKFNHLVPRLVLQREKHFHYCLDASRPWLCYWILHSLELLDEPIPQIVATDVCQFLELCQSPEGGFGGGPGQYPHLAPTYAAVNALCIIGTEEAYDIINREKLLQYLYSLKQPDGSFLMHVGGEVDVRSAYCAASVASLTNIITPDLFEGTAEWIARCQNWEGGIGGVPGMEAHGGYTFCGLAALVILKRERSLNLKSLLQWVTSRQMRFEGGFQGRCNKLVDGCYSFWQAGLLPLLHRALHAQGDPALSMSHWMFHQQALQEYILMCCQCPAGGLLDKPGKSRDFYHTCYCLSGLSIAQHFGSGAMLHDVVLGVPENALQPTHPVYNIGPDKVIQATTYFLQKPVPGFEELKDETSAEPATD

SEQ ID NO: 862384 - protein, 334 aa, Homo sapiens
GIWCFDMNALLTLFLPFGCVPSVCQFLELCQSPEGGFGGGPGQYPHLAPTYAAVNALCIIGTEEAYDIINREKLLQYLYSLKQPDGSFLMHVGGEVDVRSAYCAASVASLTNIITPDLFEGTAEWIARCQNWEGGIGGVPGMEAHGGYTFCGLAALVILKRERSLNLKSLLQWVTSRQMRFEGGFQGRCNKLVDGCYSFWQAGLLPLLHRALHAQGDPALSMSHWMFHQQALQEYILMCCQCPAGGLLDKPGKSRDFYHTCYCLSGLSIAQHFGSGAMLHDVVLGVPENALQPTHPVYNIGPDKVIQATTYFLQKPVPGFEELKDETSAEPATD

SEQ ID NO: 862385 - protein, 367 aa, Homo sapiens
MRDFSASVCQFLELCQSPEGGFGGGPGQYPHLAPTYAAVNALCIIGTEEAYDIINREKLLQYLYSLKQPDGSFLMHVGGEVDVRLDHVEVGRIECHVLSLKPCREQLYPNRMSHLSVGDPGGLTVCQEEDRRSAYCAASVASLTNIITPDLFEGTAEWIARCQNWEGGIGGVPGMEAHGGYTFCGLAALVILKRERSLNLKSLLQWVTSRQMRFEGGFQGRCNKLVDGCYSFWQAGLLPLLHRALHAQGDPALSMSHWMFHQQALQEYILMCCQCPAGGLLDKPGKSRDFYHTCYCLSGLSIAQHFGSGAMLHDVVLGVPENALQPTHPVYNIGPDKVIQATTYFLQKPVPGFEELKDETSAEPATD

SEQ ID NO: 862386 - protein, 69 aa, Homo sapiens
  misc_feature (5)..(8): Xaa can be any naturally occurring amino acid
  misc_feature (16)..(16): Xaa can be any naturally occurring amino acid
  misc_feature (26)..(26): Xaa can be any naturally occurring amino acid
VPAVXXXXDIVVPQEXQGIGTCRKRXQPTHPVYNIGPDKVIQATTYFLQKPVPGFEELKDETSAEPATD

SEQ ID NO: 862387 - protein, 170 aa, Homo sapiens
AVPFLWEAPGAQAWASSWSVCAASLGKGRFKVGLGGEGSSRVPSALKNEKNRVLCLEDRGSPCGSDSPLCSASTSGGSGVHSALFPTCPQLLEAESRARLLSCRFTICLIFDLQCQVWGPASWVGILVVIQPFEHQLRVGHNIKRWKYKEIKQLLTRSLVGGQAGKQFGK

SEQ ID NO: 862388 - protein, 437 aa, Homo sapiens; identical to SEQ ID NO: 862379

SEQ ID NO: 862389 - protein, 359 aa, Homo sapiens
VIVNKGCFLSCLSPSVCLDASRPWLCYWILHSLELLDEPIPQIVATDVCQFLELCQSPEGGFGGGPGQYPHLAPTYAAVNALCIIGTEEAYDIINREKLLQYLYSLKQPDGSFLMHVGGEVDVRSAYCAASVASLTNIITPDLFEGTAEWIARCQNWEGGIGGVPGMEAHGGYTFCGLAALVILKRERSLNLKSLLQWVTSRQMRFEGGFQGRCNKLVDGCYSFWQAGLLPLLHRALHAQGDPALSMSHWMFHQQALQEYILMCCQCPAGGLLDKPGKSRDFYHTCYCLSGLSIAQHFGSGAMLHDVVLGVPENALQPTHPVYNIGPDKVIQATTYFLQKPVPGFEELKDETSAEPATD

SEQ ID NO: 862390 - protein, 407 aa, Homo sapiens
KRSSAAYKFMHALERGLCERCREKHVSTISDKEAVLTNRVPVCRNRRMSCDAKGCPSGIVVVIAIHATSSVERCYTMKPNLPPWISVLSRVDRRSSSPRKLVVKSPEGGFGGGPGQYPHLAPTYAAVNALCIIGTEEAYDIINREKLLQYLYSLKQPDGSFLMHVGGEVDVRSAYCAASVASLTNIITPDLFEGTAEWIARCQNWEGGIGGVPGMEAHGGYTFCGLAALVILKRERSLNLKSLLQWVTSRQMRFEGGFQGRCNKLVDGCYSFWQAGLLPLLHRALHAQGDPALSMSHWMFHQQALQEYILMCCQCPAGGLLDKPGKSRDFYHTCYCLSGLSIAQHFGSGAMLHDVVLGVPENALQPTHPVYNIGPDKVIQATTYFLQKPVPGFEELKDETSAEPATD

SEQ ID NO: 862391 - protein, 533 aa, Homo sapiens
MAAPRAGRGAGWSLRAWRALGGIRWGRRPRLTPDLRALLTSGTSDPRARVTYGTPSLWARLSVGVTEPRACLTSGTPGPRAQLTAVTPDTRTREASENSGTRSRAWLAVALGAGGAVLLLLWGGGRGPPAVLAAVPSPPPASPRSQYNFIADVVEKTAPAVVYIEILDRHPFLGREVPISNGSGFVVAADGLIVTNAHVVADRRRVRVRLLSGDTYEAVVTAVDPVADIATLRIQTKEPLPTLPLGRSADVRQGEFVVAMGSPFALQNTITSGIVSSAQRPARDLGLPQTNVEYIQTDAAIDFGNSGGPLVNLVSETSFLPRIPAPGQCGKGRFPLIQGCLVKFLSSSLLAISQYPTRSPQHLLVLLFGCPHPLLFVLARELGAVSLQDGEVIGVNTMKVTAGISFAIPSDRLREFLHRGEKKNSSSGISGSQRRYIGVMMLTLSPSILAELQLREPSFPDVQHGVLIHKVILGSPAHRAGLRPGDVILAIGEQMVQNAEDVYEAVRTQSQLAVQIRRGRETLTLYVTPEVTE

SEQ ID NO: 862392 - protein, 426 aa, Homo sapiens
MAAPRAGRGAGWSLRAWRALGGIRWGRRPRLTPDLRALLTSGTSDPRARVTYGTPSLWARLSVGVTEPRACLTSGTPGPRAQLTAVTPDTRTREASENSGTRSRAWLAVALGAGGAVLLLLWGGGRGPPAVLAAVPSPPPASPRSQYNFIADVVEKTAPAVVYIEILDRHPFLGREVPISNGSGFVVAADGLIVTNAHVVADRRRVRVRLLSGDTYEAVVTAVDPVADIATLRIQTKEPLPTLPLGRSADVRQGEFVVAMGSPFALQNTITSGIVSSAQRPARDLGLPQTNVEYIQTDAAIDFGNSGGPLVNLDGEVIGVNTMKVTAGISFAIPSDRLREFLHRGEKKNSSSGISGSQRRYIGVMMLTLSPRAGLRPGDVILAIGEQMVQNAEDVYEAVRTQSQLAVQIRRGRETLTLYVTPEVTE

SEQ ID NO: 862393 - protein, 536 aa, Homo sapiens
MAAPRAGRGAGWSLRAWRALGGIRWGRRPRLTPDLRALLTSGTSDPRARVTYGTPSLWARLSVGVTEPRACLTSGTPGPRAQLTAVTPDTRTREASENSGTRSRAWLAVALGAGGAVLLLLWGGGRGPPAVLAAVPSPPPASPRSQYNFIADVVEKTAPAVVYIEILDRHPFLGREVPISNGSGFVVAADGLIVTNAHVVADRRRVRVRLLSGDTYEAVVTAVDPVADIATLRIQTKEPLPTLPLGRSADVRQGEFVVAMGSPFALQNTITSGIVSSAQRPARDLGLPQTNVEYIQTDAAIDVRPDRREMTNDGGGGRGCVVQAPTDIWWMSLYRASGCKNVATYSWAEKEENLEKVPTSWYAPRLRIPRSLSCFLLVLQFGNSGGPLVNLDGEVIGVNTMKVTAGISFAIPSDRLREFLHRGEKKNSSSGISGSQRRYIGVMMLTLSPSILAELQLREPSFPDVQHGVLIHKVILGSPAHRAGLRPGDVILAIGEQMVQNAEDVYEAVRTQSQLAVQIRRGRETLTLYVTPEVTE

SEQ ID NO: 862394 - protein, 336 aa, Homo sapiens
MAAPRAGRGAGWSLRAWRALGGIRWGRRPRLTPDLRALLTSGTSDPRARVTYGTPSLWARLSVGVTEPRACLTSGTPGPRAQLTAVTPDTRTREASENSGTRSRAWLAVALGAGGAVLLLLWGGGRGPPAVLAAVPSPPPASPRSQYNFIADVVEKTAPAVVYIEILDRHPFLGREVPISNGSGFVVAADGLIVTNAHVVADRRRVRVRLLSGDTYEAVVTAVDPVADIATLRIQTKEPLPTLPLGRSADVRQGEFVVAMGSPFALQNTITSGIVSSAQRPARDLGLPQTNVEYIQTDAAIDVRPDRREMTNDGGGGRGCVVQAPTDIWWMSLYRA

SEQ ID NO: 862395 - protein, 199 aa, Homo sapiens
MGSPFALQNTITSGIVSSAQRPARDLGLPQTNVEYIQTDAAIDFGNSGGPLVNLDGEVIGVNTMKVTAGISFAIPSDRLREFLHRGEKKNSSSGISGSQRRYIGVMMLTLSPSILAELQLREPSFPDVQHGVLIHKVILGSPAHRAGLRPGDVILAIGEQMVQNAEDVYEAVRTQSQLAVQIRRGRETLTLYVTPEVTE

SEQ ID NO: 862396 - protein, 136 aa, Homo sapiens
MKVTAGISFAIPSDRLREFLHRGEKKNSSSGISGSQRRYIGVMMLTLSPSILAELQLREPSFPDVQHGVLIHKVILGSPAHRAGLRPGDVILAIGEQMVQNAEDVYEAVRTQSQLAVQIRRGRETLTLYVTPEVTE

SEQ ID NO: 862397 - protein, 458 aa, Homo sapiens
MAAPRAGRGAGWSLRAWRALGGIRWGRRPRLTPDLRALLTSGTSDPRARVTYGTPSLWARLSVGVTEPRACLTSGTPGPRAQLTAVTPDTRTREASENSGTRSRAWLAVALGAGGAVLLLLWGGGRGPPAVLAAVPSPPPASPRSQYNFIADVVEKTAPAVVYIEILDRHPFLGREVPISNGSGFVVAADGLIVTNAHVVADRRRVRVRLLSGDTYEAVVTAVDPVADIATLRIQTKEPLPTLPLGRSADVRQGEFVVAMGSPFALQNTITSGIVSSAQRPARDLGLPQTNVEYIQTDAAIDFGNSGGPLVNLDGEVIGVNTMKVTAGISFAIPSDRLREFLHRGEKKNSSSGISGSQRRYIGVMMLTLSPSILAELQLREPSFPDVQHGVLIHKVILGSPAHRAGLRPGDVILAIGEQMVQNAEDVYEAVRTQSQLAVQIRRGRETLTLYVTPEVTE

SEQ ID NO: 862398 - protein, 458 aa, Homo sapiens; identical to SEQ ID NO: 862397

SEQ ID NO: 862399 - protein, 436 aa, Homo sapiens
MAAPRAGRGAGWSLRAWRALGGIRWGRRPRLTPDLRALLTSGTSDPRARVTYGTPSLWARLSVGVTEPRACLTSGTPGPRAQLTAVTPDTRTREASENSGTRSRAWLAVALGAGGAVLLLLWGGGRGPPAVLAAVPSPPPASPRSQYNFIADVVEKTAPAVVYIEILDRHPFLGREVPISNGSGFVVAADGLIVTNAHVVADRRRVRVRLLSGDTYEAVVTAVDPVADIATLRIQTKEPLPTLPLGRSADVRQGEFVVAMGSPFALQNTITSGIVSSAQRPARDLGLPQTNVEYIQTDAAIDFGNSGGPLVNLARELGAVSLQDGEVIGVNTMKVTAGISFAIPSDRLREFLHRGEKKNSSSGISGSQRRYIGVMMLTLSPRAGLRPGDVILAIGEQMVQNAEDVYEAVRTQSQLAVQIRRGRETLTLYVTPEVTE

SEQ ID NO: 862400 - protein, 440 aa, Homo sapiens
MAAPRAGRGAGWSLRAWRALGGIRWGRRPRLTPDLRALLTSGTSDPRARVTYGTPSLWARLSVGVTEPRACLTSGTPGPRAQLTAVTPDTRTREASENSGTRSRAWLAVALGAGGAVLLLLWGGGRGPPAVLAAVPSPPPASPRSQYNFIADVVEKTAPAVVYIEILDRHPFLGREVPISNGSGFVVAADGLIVTNAHVVADRRRVRVRLLSGDTYEAVVTAVDPVADIATLRIQTKEPLPTLPLGRSADVRQGEFVVAMGSPFALQNTITSGIVSSAQRPARDLGLPQTNVEYIQTDAAIDFGNSGGPLVNLDGEVIGVNTMKVTAGISFAIPSDRLREFLHRGEKKNSSSGISGSQRRYIGVMMLTLSPSILAELQLREPSFPDVQHGVLIHKVILGSPAHRAGLRPGDVILAIGEQMVQIRRGRETLTLYVTPEVTE

SEQ ID NO: 862401 - protein, 369 aa, Homo sapiens
MGPEVLRRAGRASGPSIPRGPLGRLTTRVRRRPQFPAFVGQGGVGLPESWSRRALLKDFSIADVVEKTAPAVVYIEILDRHPFLGREVPISNGSGFVVAADGLIVTNAHVVADRRRVRVRLLSGDTYEAVVTAVDPVADIATLRIQTKEPLPTLPLGRSADVRQGEFVVAMGSPFALQNTITSGIVSSAQRPARDLGLPQTNVEYIQTDAAIDFGNSGGPLVNLDGEVIGVNTMKVTAGISFAIPSDRLREFLHRGEKKNSSSGISGSQRRYIGVMMLTLSPSILAELQLREPSFPDVQHGVLIHKVILGSPAHRAGLRPGDVILAIGEQMVQNAEDVYEAVRTQSQLAVQIRRGRETLTLYVTPEVTE

SEQ ID NO: 862402 - protein, 361 aa, Homo sapiens
MAAPRAGRGAGWSLRAWRALGGIRWGRRPRLTPDLRALLTSGTSDPRARVTYGTPSLWARLSVGVTEPRACLTSGTPGPRAQLTAVTPDTRTREASENSGTRSRAWLAVALGAGGAVLLLLWGGGRGPPAVLAAVPSPPPASPRSQYNFIADVVEKTAPAVVYIEILDRHPFLGREVPISNGSGFVVAADGLIVTNAHVVADRRRVRVRLLSGDTYEAVVTAVDPVADIATLRIQTKFGNSGGPLVNLDGEVIGVNTMKVTAGISFAIPSDRLREFLHRGEKKNSSSGISGSQRRYIGVMMLTLSPRAGLRPGDVILAIGEQMVQNAEDVYEAVRTQSQLAVQIRRGRETLTLYVTPEVTE

SEQ ID NO: 862403 - protein, 88 aa, Homo sapiens
LEGDPLNSSCLDLVGLPASSPQLRNTVQLYFGFSFLHCNLEVVSRWEQWQKPLMKHFPLRQQRQYLKTMKHLLSPFVPSSFFLILIAP

SEQ ID NO: 862404 - protein, 249 aa, Homo sapiens
MKITRQKHAKKHLGFFRNNFGVREPYQILLDGTFCQAALRGRIQLREQLPRYLMGETQLCTTRCVLKELETLGKDLYGAKLIAQKCQVRNCPHFKNAVSGSECLLSMVEEGNPHHYFVATQDQNLSVKVKKKPGVPLMFIIQNTMVLDKPSPKTIAFVKAVESGQLVSVHEKESIKHLKEEQGLVKNTEQSRRKKRKKISGPNPLSCLKKKKKAPDTQSSASEKKRKRKRIRNRSNPKVLSEKQNAEGE

SEQ ID NO: 862405 - protein, 105 aa, Homo sapiens
MKITRQKHAKKHLGFFRNNFGVREPYQILLDGTFCQAALRGRIQLREQLPRYLMGETQLCTTREQWQKPLMKHFPLRQQRQYLKTMKHLLSPFVPSSFFLILIAP

SEQ ID NO: 862406 - protein, 249 aa, Homo sapiens; identical to SEQ ID NO: 862404

SEQ ID NO: 862407 - protein, 249 aa, Homo sapiens; identical to SEQ ID NO: 862404

SEQ ID NO: 862408 - protein, 205 aa, Homo sapiens
FCPPQSAGDSGTSAFLLPGRNRKLGKGWGGKEEPQEDGSGSPHSLEDLPPPSPWAAFSRDSSLSHPPGKVAQQGLLFTVRPLLWPGPGLMTSHAAFTSQVYCGITYTHKAHPFSMYSRRLGKGLEWGTSAPTEAAHILPLCSQAPSRPPTTTCLSSLLQLCVLQNCPVSDSRRMETFVSGFLHFAAGFAGPVWWHQRPALGTAEL

SEQ ID NO: 862409 - protein, 1024 aa, Homo sapiens
AASSPAPRGGDASAPPTAARTPSTGHLRRRPGRRPRFNARPGDPQAGPTPPSPPASRGAGRANMLAPRGAAVLLLHLVLQRWLAAGAQATPQVFDLLPSSSQRLNPGALLPVLTDPALNDLYVISTFKLQTKSSATIFGLYSSTDNSKYFEFTVMGRLNKAILRYLKNDGKVHLVVFNNLQLADGRRHRILLRLSNLQRGAGSLELYLDCIQVDSVHNLPRAFAGPSQKPETIELRTFQRKPQDFLEELKLVVRGSLFQVASLQDCFLQQSEPLAATGTGDFNRQFLGQMTQLNQLLGEVKDLLRQQVKETSFLRNTIAECQACGPLKFQSPTPSTVVAPAPPAPPTRPPRRCDSNPCFRGVQCTDSRDGFQCGPCPEGYTGNGITCIDVDECKYHPCYPGVHCINLSPGFRCDACPVGFTGPMVQGVGISFAKSNKQVCTDIDECRNGACVPNSICVNTLGSYRCGPCKPGYTGDQIRGCKAERNCRNPELNPCSVNAQCIEERQGDVTCVCGVGWAGDGYICGKDVDIDSYPDEELPCSARNCKKDNCKYVPNSGQEDADRDGIGDACDEDADGDGILNEQDNCVLIHNVDQRNSDKDIFGDACDNCLSVLNNDQKDTDGDGRGDACDDDMDGDGIKNILDNCPKFPNRDQRDKDGDGVGDACDSCPDVSNPNQSDVDNDLVGDSCDTNQDSDGDGHQDSTDNCPTVINSAQLDTDKDGIGDECDDDDDNDGIPDLVPPGPDNCRLVPNPAQEDSNSDGVGDICESDFDQDQVIDRIDVCPENAEVTLTDFRAYQTVVLDPEGDAQIDPNWVVLNQGMEIVQTMNSDPGLAVGYTAFNGVDFEGTFHVNTQTDDDYAGFIFGYQDSSSFYVVMWKQTEQTYWQATPFRAVAEPGIQLKAVKSKTGPGEHLRNSLWHTGDTSDQVRLLWKDSRNVGWKDKVSYRWFLQHRPQVGYIRVRFYEGSELVADSGVTIDTTMRGGRLGVFCFSQENIIWSNLKYRCNDTIPEDFQEFQTQNFDRFDN

SEQ ID NO: 862410 - protein, 246 aa, Homo sapiens
CVGRACFAFAFHHDLFDLLPSSSQRLNPGALLPVLTDPALNDLYVISTFKLQTKSSATIFGLYSSTDNSKYFEFTVMGRLNKAILRYLKNDGKVHLVVFNNLQLADGRRHRILLRLSNLQRGAGSLELYLDCIQVDSVHNLPRAFAGPSQKPETIELRTFQRKPQDFLEELKLVVRGSLFQVASLQDCFLQQSEPLAATGTGDFNRQFLGQMTQLNQLLGEVKDLLRQQVRTHHFAKNHSECRVAA

SEQ ID NO: 862411 - protein, 649 aa, Homo sapiens
AASSPAPRGGDASAPPTAARTPSTGHLRRRPGRRPRFNARPGDPQAGPTPPSPPASRGAGRANMLAPRGAAVLLLHLVLQRWLAAGAQATPQVFDLLPSSSQRLNPGALLPVLTDPALNDLYVISTFKLQTKSSATIFGLYSSTDNSKYFEFTVMGRLNKAILRYLKNDGKVHLVVFNNLQLADGRRHRILLRLSNLQRGAGSLELYLDCIQVDSVHNLPRAFAGPSQKPETIELRTFQRKPQDFLEELKLVVRGSLFQVASLQDCFLQQSEPLAATGTGDFNRQFLGQMTQLNQLLGEVKDLLRQQVKETSFLRNTIAECQACGPLKFQSPTPSTVVAPAPPAPPTRPPRRCDSNPCFRGVQCTDSRDGFQCGPCPEGYTGNGITCIDVDECKYHPCYPGVHCINLSPGFRCDACPVGFTGPMVQGVGISFAKSNKQVCTDIDECRNGACVPNSICVNTLGSYRCGPCKPGYTGDQIRGCKAERNCRNPELNPCSVNAQCIEERQGDVTCVCGVGWAGDGYICGKDVDIDSYPDEELPCSARNCKKDNCKYVPNSGQEDADRDGIGDACDEDADGDGILNEQDNCVLIHNVDQRNSDKDIFGDACDNCLSVLNNDQKDTDGDGRGDACDDDMDGDGLYLTPRDPLDSS

SEQ ID NO: 862412 - protein, 791 aa, Homo sapiens
AASSPAPRGGDASAPPTAARTPSTGHLRRRPGRRPRFNARPGDPQAGPTPPSPPASRGAGRANMLAPRGAAVLLLHLVLQRWLAAGAQATPQVFDLLPSSSQRLNPGALLPVLTDPALNDLYVISTFKLQTKSSATIFGLYSSTDNSKYFEFTVMGRLNKAILRYLKNDGKVHLVVFNNLQLADGRRHRILLRLSNLQRGAGSLELYLDCIQVDSVHNLPRAFAGPSQKPETIELRTFQRKPQDFLEELKLVVRGSLFQVASLQDCFLQQSEPLAATGTGDFNRQFLGQMTQLNQLLGEVKDLLRQQVKETSFLRNTIAECQACGPLKFQSPTPSTVVAPAPPAPPTRPPRRCDSNPCFRGVQCTDSRDGFQCGPCPEGYTGNGITCIDVDECKYHPCYPGVHCINLSPGFRCDACPVGFTGPMVQGVGISFAKSNKQVCTDIDECRNGACVPNSICVNTLGSYRCGPCKPGYTGDQIRGCKAERNCRNPELNPCSVNAQCIEERQGDVTCVCGVGWAGDGYICGKDVDIDSYPDEELPCSARNCKKDNCKYVPNSGQEDADRDGIGDACDEDADGDGILNEQDNCVLIHNVDQRNSDKDIFGDACDNCLSVLNNDQKDTDGDGRGDACDDDMDGDGIKNILDNCPKFPNRDQRDKDGDGVGDACDSCPDVSNPNQSDVDNDLVGDSCDTNQDRLLWKDSRNVGWKDKVSYRWFLQHRPQVGYIRVRFYEGSELVADSGVTIDTTMRGGRLGVFCFSQENIIWSNLKYRCNDTIPEDFQEFQTQNFDRFDN

SEQ ID NO: 862413 - protein, 559 aa, Homo sapiens
MATALSEEELDNEDYYSLLNVRREASSEELKAAYRRLCMLYHPDKHRDPELKSQAERLFNLVHQAYEVLSDPQTRAIYDIYGKRGLEMEGWEVVERRRTPAEIREEFERLQREREERRLQQRTNPKGTISVGVDATDLFDRYDEEYEDVSGSSFPQIEINKMHISQSIEAPLTATDTAILSGSLSTQNGNGGGSINFALRRVTSAKGWGELEFGAGDLQGPLFGLKLFRNLTPRCFVTTNCALQFSSRGIRPGLTTVLARNLDKNTVGYLQWRWGIQSAMNTSIVRDTKTSHFTVALQLGIPHSFALISYQHKFQDDDQTRVKGSLKAGFFGTVVEYGAERKISRHSVLGAAVSVGVPQGVSLKVKLNRASQTYFFPIHLTDQLLPSAMFYATVGPLVVYFAMHRLIIKPYLRAQKEKELEKQRESAATDVLQKKQEAESAVRLMQESVRRIIEAEESRMGLIIVNAWYGKFVNDKSRKSEKVKVIDVTVPLQCLVKDSKLILTEASKAGLPGFYDPCVGEEKNLKVLYQFRGVLHQVMVLDSEALRIPKQSHRIDTDG

SEQ ID NO: 862414 - protein, 316 aa, Homo sapiens [sequence omitted]

SEQ ID NO: 862415 - protein, 576 aa, Homo sapiens
EDYRRLLVVFMRGRCYDVDGCVVSRQLDNEDYYSLLNVRREASSEELKAAYRRLCMLYHPDKHRDPELKSQAERLFNLVHQAYEVLSDPQTRAIYDIYGKRGLEMEGWEVVERRRTPAEIREEFERLQREREERRLQQRTNPKGTISVGVDATDLFDRYDEEYEDVSGSSFPQIEINKMHISQSIEAPLTATDTAILSGSLSTQNGNGGGSINFALRRVTSAKGWGELEFGAGDLQGPLFGLKLFRNLTPRCFVTTNCALQFSSRGIRPGLTTVLARNLDKNTVGYLQWRWGIQSAMNTSIVRDTKTSHFTVALQLGIPHSFALISYQHKFQDDDQTRVKGSLKAGFFGTVVEYGAERKISRHSVLGAAVSVGVPQGVSLKVKLNRASQTYFFPIHLTDQLLPSAMFYATVGPLVVYFAMHRLIIKPYLRAQKEKELEKQRESAATDVLQKKQEAESAVRLMQESVRRIIEAEESRMGLIIVNAWYGKFVNDKSRKSEKVKVIDVTVPLQCLVKDSKLILTEASKAGLPGFYDPCVGEEKNLKVLYQFRGVLHQVMVLDSEALRIPKQSHRIDTDG

SEQ ID NO: 862416 - protein, 280 aa, Homo sapiens [sequence omitted]

SEQ ID NO: 862417 - protein, 343 aa, Homo sapiens
MDAWVRFSAQSQARERLCSFVTTNCALQFSSRGIRPGLTTVLARNLDKNTVGYLQWRWGIQSAMNTSIVRDTKTSHFTVALQLGIPHSFALISYQHKFQDDDQTRVKGSLKAGFFGTVVEYGAERKISRHSVLGAAVSVGVPQGVSLKVKLNRASQTYFFPIHLTDQLLPSAMFYATVGPLVVYFAMHRLIIKPYLRAQKEKELEKQRESAATDVLQKKQEAESAVRLMQESVRRIIEAEESRMGLIIVNAWYGKFVNDKSRKSEKVKVIDVTVPLQCLVKDSKLILTEASKAGLPGFYDPCVGEEKNLKVLYQFRGVLHQVMVLDSEALRIPKQSHRIDTDG

SEQ ID NO: 862418 - protein, 496 aa, Homo sapiens
MATALSEEELDNEDYYSLLNVRREASSEELKAAYRRLCMLYHPDKHRDPELKSQAERLFNLVHQAYEVLSDPQTRAIYDIYGKRGLEMEGWEVVERRRTPAEIREEFERLQREREERRLQQRTNPKGTISVGVDATDLFDRYDEEYEDVSGSSFPQIEINKMHISQSIEAPLTATDTAILSGSLSTQNGNGGGSINFALRRVTSAKGWGELEFGAGDLQGPLFGLKLFRNLTPRCFVTTNCALQFSSRGIRPGLTTVLARNLDKNTVGYLQWRWGIQSAMNTSIVRDTKTSHFTVALQLGIPHSFALISYQHKFQDDDQTRVKGSLKAGFFGTVVEYGAERKISRHSVLGAAVSVGVPQGVSLKVKLNRASQTYFFPIHLTDQLLPSAMFYATVGPLVVYFAMHRLIIKPYLRAQKEKELEKQRESAATDVLQKKQEAESAVSAAPPFPSEGCRGHTPDPTCWSQGLRGQTSLLQQLGSPLSLYCGMRHWALQSLP

SEQ ID NO: 862419 - protein, 461 aa, Homo sapiens
MATALSEEELDNEDYYSLLNVRREASSEELKAAYRRLCMLYHPDKHRDPELKSQAERLFNLVHQAYEVLSDPQTRAIYDIYGKRGLEMEGWEVVERRRTPAEIREEFERLQREREERRLQQRTNPKGTISVGVDATDLFDRYDEEYEDVSGSSFPQIEINKMHISQSIEAPLTATDTAILSGSLSTQNGNGGGSINFALRRVTSAKGWGELEFGAGDLQGPLFGLKLFRNLTPRCFVTTNCALQFSSRGIRPGLTTVLARNLDKNTVGYLQWRWGIQSAMNTSIVRDTKTSHFTVALQLGIPHSFALISYQHKFQDDDQTRVKGSLKAGFFGTVVEYGAERKISRHSVLGAAVSVGVPQGVSLKVKLNRASQTYFFPIHLTDQLLPSAMFYATVGPLVVYFAMHRLIIKPYLRAQKEKCLWSTLPSPQEREPLLQSTLNMGNNLKSRQASRSGSLCCAGFP

SEQ ID NO: 862420 - protein, 507 aa, Homo sapiens
MATALSEEELDNEDYYSLLNVRREASSEELKAAYRRLCMLYHPDKHRDPELKSQAERLFNLVHQAYEVLSDPQTRAIYDIYGKRGLEMEGWEVVERRRTPAEIREEFERLQREREERRLQQRTNPKGTISVGVDATDLFDRYDEEYEDVSGSSFPQIEINKMHISQSIEAPLTATDTAILSGSLSTQNGNGGGSINFALRRVTSAKGWGELEFGAGDLQGPLFGLKLFRNLTPRCFVTTNCALQFSSRGIRPGLTTVLARNLDKNTVGYLQWRWGIQSAMNTSIVRDTKTSHFTVALQLGIPHSFALISYQHKFQDDDQTRVKGSLKAGFFGTVVEYGAERKISRHSVLGAAVSVGVPQGVSLKVKELEKQRESAATDVLQKKQEAESAVRLMQESVRRIIEAEESRMGLIIVNAWYGKFVNDKSRKSEKVKVIDVTVPLQCLVKDSKLILTEASKAGLPGFYDPCVGEEKNLKVLYQFRGVLHQVMVLDSEALRIPKQSHRIDTDG

SEQ ID NO: 862421 - protein, 496 aa, Homo sapiens; identical to SEQ ID NO: 862418

SEQ ID NO: 862422 - protein, 438 aa, Homo sapiens
MATALSEEELDNEDYYSLLNVRREASSEELKAAYRRLCMLYHPDKHRDPELKSQAERLFNLVHQAYEVLSDPQTRAIYDIYGKRGLEMEGWEVVERRRTPAEIREEFERLQREREERRLQQRTNPKGTISVGVDATDLFDRYDEEYEDVSGSSFPQIEINKMHISQSIEAPLTATDTAILSGSLSTQNGNGGGSINFALRRVTSAKGWGELEFGAGDLQGPLFGLKLFRNLTPRCFVTTNCALQFSSRGIRPGLTTVLARNLDKNTVGYLQWRWGIQSAMNTSIVRDTKTSHFTVALQLGIPHSFALISYQHKFQDDDQTRVKGSLKAGFFGTVRWPNWANAPSSSSLSSFTVNCCVRWPNVGPTHRRLLEEIFRDEGGKAFFKGAWSNVLRGMGGAFVLVLYDELTKVISGPRPPPHTHTHQATQENHENPKRARQR

SEQ ID NO: 862423 - protein, 108 aa, Homo sapiens
AEGSREVTRKILARTLPLCVDRGLTSCFFFYWELAQGCIDVTVSEVLARQRGSNRTAESRCYPGPILSLCLSSFVTTNCALQFSSRGIRPGLTTVLARNLDKNTVGYL

SEQ ID NO: 862424 - protein, 571 aa, Homo sapiens
MSIEEAGVLYRTMATALSEEELDNEDYYSLLNVRREASSEELKAAYRRLCMLYHPDKHRDPELKSQAERLFNLVHQAYEVLSDPQTRAIYDIYGKRGLEMEGWEVVERRRTPAEIREEFERLQREREERRLQQRTNPKGTISVGVDATDLFDRYDEEYEDVSGSSFPQIEINKMHISQSIEAPLTATDTAILSGSLSTQNGNGGGSINFALRRVTSAKGWGELEFGAGDLQGPLFGLKLFRNLTPRCFVTTNCALQFSSRGIRPGLTTVLARNLDKNTVGYLQWRWGIQSAMNTSIVRDTKTSHFTVALQLGIPHSFALISYQHKFQDDDQTRVKGSLKAGFFGTVVEYGAERKISRHSVLGAAVSVGVPQGVSLKVKLNRASQTYFFPIHLTDQLLPSAMFYATVGPLVVYFAMHRLIIKPYLRAQKEKELEKQRESAATDVLQKKQEAESAVRLMQESVRRIIEAEESRMGLIIVNAWYGKFVNDKSRKSEKVKVIDVTVPLQCLVKDSKLILTEASKAGLPGFYDPCVGEEKNLKVLYQFRGVLHQVMVLDSEALRIPKQSHRIDTDG

SEQ ID NO: 862425 - protein, 566 aa, Homo sapiens
VFQYGAWALIEVYDGCLGYTHIYSLLNVRREASSEELKAAYRRLCMLYHPDKHRDPELKSQAERLFNLVHQAYEVLSDPQTRAIYDIYGKRGLEMEGWEVVERRRTPAEIREEFERLQREREERRLQQRTNPKGTISVGVDATDLFDRYDEEYEDVSGSSFPQIEINKMHISQSIEAPLTATDTAILSGSLSTQNGNGGGSINFALRRVTSAKGWGELEFGAGDLQGPLFGLKLFRNLTPRCFVTTNCALQFSSRGIRPGLTTVLARNLDKNTVGYLQWRWGIQSAMNTSIVRDTKTSHFTVALQLGIPHSFALISYQHKFQDDDQTRVKGSLKAGFFGTVVEYGAERKISRHSVLGAAVSVGVPQGVSLKVKLNRASQTYFFPIHLTDQLLPSAMFYATVGPLVVYFAMHRLIIKPYLRAQKEKELEKQRESAATDVLQKKQEAESAVRLMQESVRRIIEAEESRMGLIIVNAWYGKFVNDKSRKSEKVKVIDVTVPLQCLVKDSKLILTEASKAGLPGFYDPCVGEEKNLKVLYQFRGVLHQVMVLDSEALRIPKQSHRIDTDG

SEQ ID NO: 862426 - protein, 469 aa, Homo sapiens
MKVVERRRTPAEIREEFERLQREREERRLQQRTNPKGTISVGVDATDLFDRYDEEYEDVSGSSFPQIEINKMHISQSIEAPLTATDTAILSGSLSTQNGNGGGSINFALRRVTSAKGWGELEFGAGDLQGPLFGLKLFRNLTPRCFVTTNCALQFSSRGIRPGLTTVLARNLDKNTVGYLQWRWGIQSAMNTSIVRDTKTSHFTVALQLGIPHSFALISYQHKFQDDDQTRVKGSLKAGFFGTVVEYGAERKISRHSVLGAAVSVGVPQGVSLKVKLNRASQTYFFPIHLTDQLLPSAMFYATVGPLVVYFAMHRLIIKPYLRAQKEKELEKQRESAATDVLQKKQEAESAVRLMQESVRRIIEAEESRMGLIIVNAWYGKFVNDKSRKSEKVKVIDVTVPLQCLVKDSKLILTEASKAGLPGFYDPCVGEEKNLKVLYQFRGVLHQVMVLDSEALRIPKQSHRIDTDG

SEQ ID NO: 862427 - protein, 434 aa, Homo sapiens
MGTISVGVDATDLFDRYDEEYEDVSGSSFPQIEINKMHISQSIEAPLTATDTAILSGSLSTQNGNGGGSINFALRRVTSAKGWGELEFGAGDLQGPLFGLKLFRNLTPRCFVTTNCALQFSSRGIRPGLTTVLARNLDKNTVGYLQWRWGIQSAMNTSIVRDTKTSHFTVALQLGIPHSFALISYQHKFQDDDQTRVKGSLKAGFFGTVVEYGAERKISRHSVLGAAVSVGVPQGVSLKVKLNRASQTYFFPIHLTDQLLPSAMFYATVGPLVVYFAMHRLIIKPYLRAQKEKELEKQRESAATDVLQKKQEAESAVRLMQESVRRIIEAEESRMGLIIVNAWYGKFVNDKSRKSEKVKVIDVTVPLQCLVKDSKLILTEASKAGLPGFYDPCVGEEKNLKVLYQFRGVLHQVMVLDSEALRIPKQSHRIDTDG

SEQ ID NO: 862428 - protein, 559 aa, Homo sapiens; identical to SEQ ID NO: 862413

SEQ ID NO: 862429 - protein, 559 aa, Homo sapiens; identical to SEQ ID NO: 862413

SEQ ID NO: 862430 - protein, 356 aa, Homo sapiens
MATALSEEELDNEDYYSLLNVRREASSEELKAAYRRLCMLYHPDKHRDPELKSQAERLFNLVHQAYEVLSDPQTRAIYDIYGKRGLEMEGWEVVERRRTPAEIREEFERLQREREERRLQQRTNPKGTISVGVDATDLFDRYDEEYEDVSGSSFPQIEINKMHISQSIEAPLTATDTAILSGSLSTQNGNGGGSINFALRRVTSAKGWGELEFGAGDLQGPLFGLKLFRNLTPRCFVTTNCALQFSSRGIRPGLTTVLARNLDKNTVGYLQWHCSSPLLQVQRPHRNTRACAPEPSFRPFLHVPTWDAECSGARTPSTAWTSAAVKLREACLSGPGSGSHQLLLLTPRSKRRTGGG

SEQ ID NO: 862431 - protein, 216 aa, Homo sapiens
MATALSEEELDNEDYYSLLNVRREASSEELKAAYRRLCMLYHPDKHRDPELKSQAERLFNLVHQAYEVLSDPQTRAIYDIYGKRGLEMEGWEVVERRRTPAEIREEFERLQREREERRLQQRTNPKGTISVGVDATDLFDRYDEEYEDVSGSSFPQIEINKMHISQSIEAPLTATDTAILSGSLSTQNGNGGGSINFALRRVTSAKGWGEVRMSIG

SEQ ID NO: 862432 - protein, 101 aa, Homo sapiens
MGVPTFFCHESAPWGSRRLEGGKGRYLASSQMTAAPEVMNEGHRHRPRSLPAEQASLGRWWSTELRGRSPGTAFWVQLSALEFHRAFLSKSSKLNLGLSGQ

SEQ ID NO: 862433 - protein, 133 aa, Homo sapiens
MEPVRGGAVTLRDKQAGYISFRRLGSTQIFSSSCCLPERRLQRPSAYTIPTMSQAGAQEAPIKKKRPPVKEEDLKGARGNLTKNQEIKSKTYQVMRECEQAGSAAPSVFSRTRTGTETVFEKPKAGPTKSVFG

SEQ ID NO: 862434 - protein, 769 aa, Homo sapiens
SPLAVEFRSLLADTGATMKPPRPVRTCSKVLVLLSLLAIHQTTTAEKNGIDIYSLTVDSRVSSRFAHTVVTSRVVNRANTVQEATFQMELPKKAFITNFSMIIDGMTYPGIIKEKAEAQAQYSAAVAKGKSAGLVKATGRNMEQFQVSVSVAPNAKITFELVYEELLKRRLGVYELLLKVRPQQLVKHLQMDIHIFEPQGISFLETESTFMTNQLVDALTTWQNKTKAHIRFKPTLSQQQKSPEQQETVLDGNLIIRYDVDRAISGGSIQIENGYFVHYFAPEGLTTMPKNVVFVIDKSGSMSGRKIQQTREALIKILDDLSPRDQFNLIVFSTEATQWRPSLVPASAENVNKARSFAAGIQALGGTNINDAMLMAVQLLDSSNQEERLPEGSVSLIILLTDGDPTVGETNPRSIQNNVREAVSGRYSLFCLGFGFDVSYAFLEKLALDNGGLARRIHEDSDSALQLQDFYQEVANPLLTAVTFEYPSNAVEEVTQNNFRLLFKGSEMVVAGKLQDRGPDVLTATVSGKLPTQNITFQTESSVAEQEAEFQSPKYIFHNFMERLWAYLTIQQLLEQTVSASDADQQALRNQALNLSLAYSFVTPLTSMVVTKPDDQEQSQVAEKPMEGESRNRNVHSGSTFFKYYLQGAKIPKPEASFSPRRGWNRQAGAAGSRMNFRPGVLSSRQLGLPGPPDVPDHAAYHPFRRLAILPASAPPATSNPDPAVSRVMNMKKTTMTTQTPDRLPLPSCHCLGRVWSGSVWTPDTARGQ

SEQ ID NO: 862435 - protein, 752 aa, Homo sapiens
MKPPRPVRTCSKVLVLLSLLAIHQTTTAEKNGIDIYSLTVDSRVSSRFAHTVVTSRVVNRANTVQEATFQMELPKKAFITNFSMIIDGMTYPGIIKEKAEAQAQYSAAVAKGKSAGLVKATGRNMEQFQVSVSVAPNAKITFELVYEELLKRRLGVYELLLKVRPQQLVKHLQMDIHIFEPQGISFLETESTFMTNQLVDALTTWQNKTKAHIRFKPTLSQQQKSPEQQETVLDGNLIIRYDVDRAISGGSIQIENGYFVHYFAPEGLTTMPKNVVFVIDKSGSMSGRKIQQTREALIKILDDLSPRDQFNLIVFSTEATQWRPSLVPASAENVNKARSFAAGIQALGGTNINDAMLMAVQLLDSSNQEERLPEGSVSLIILLTDGDPTVGETNPRSIQNNVREAVSGRYSLFCLGFGFDVSYAFLEKLALDNGGLARRIHEDSDSALQLQDFYQEVANPLLTAVTFEYPSNAVEEVTQNNFRLLFKGSEMVVAGKLQDRGPDVLTATVSGKLPTQNITFQTESSVAEQEAEFQSPKYIFHNFMERLWAYLTIQQLLEQTVSASDADQQALRNQALNLSLAYSFVTPLTSMVVTKPDDQEQSQVAEKPMEGESRNRNVHSGSTFFKYYLQGAKIPKPEASFSPRRGWNRQAGAAGSRMNFRPGVLSSRQLGLPGPPDVPDHAAYHPFRRLAILPASAPPATSNPDPAVSRVMNMKKTTMTTQTPDRLPLPSCHCLGRVWSGSVWTPDTARGQ

SEQ ID NO: 862436 - protein, 647 aa, Homo sapiens
MPKNVVFVIDKSGSMSGRKIQQTREALIKILDDLSPRDQFNLIVFSTEATQWRPSLVPASAENVNKARSFAAGIQALGGTNINDAMLMAVQLLDSSNQEERLPEGSVSLIILLTDGDPTVGETNPRSIQNNVREAVSGRYSLFCLGFGFDVSYAFLEKLALDNGGLARRIHEDSDSALQLQDFYQEVANPLLTAVTFEYPSNAVEEVTQNNFRLLFKGSEMVVAGKLQDRGPDVLTATVSGKLPTQNITFQTESSVAEQEAEFQSPKYIFHNFMERLWAYLTIQQLLEQTVSASDADQQALRNQALNLSLAYSFVTPLTSMVVTKPDDQEQSQVAEKPMEGESRNRNVHSAGAAGSRMNFRPGVLSSRQLGLPGPPDVPDHAAYHPFRRLAILPASAPPATSNPDPAVSRVMNMKSSQPPWPLSTSLPPACPSCSRSRAPAVPAPIQAPSAILPLPGQSVERLCVDPRHRQGPVNLLSDPEQGVEVTGQYEREKAGFSWIEVTFKNPLVWVHASPEHVVVTRNRRSSAYKWKETLFSVMPGLKMTMDKTGLLLLSDPDKVTIGLLFWDGRGEGLRLLLRDTDRFSSHVGGTLGQFYQEVLWGSPAASDDGRRTLRVQGNDHSATRERRLDYQEGPPGVEISCWSVEL

SEQ ID NO: 862437 - protein, 89 aa, Homo sapiens
NTTKFAAASPAGAQEAPIKKKRPPVKEEDLKGARGNLTKNQEIKSKTYQVMRECEQAGSAAPSVFSRTRTGTETVFEKPKAGPTKSVFG

SEQ ID NO: 862438 - protein, 648 aa, Homo sapiens
MKPPRPVRTCSKVLVLLSLLAIHQTTTAEKNGIDIYSLTVDSRVSSRFAHTVVTSRVVNRANTVQEATFQMELPKKAFITNFSMIIDGMTYPGIIKEKAEAQAQYSAAVAKGKSAGLVKATGRNMEQFQVSVSVAPNAKITFELVYEELLKRRLGVYELLLKVRPQQLVKHLQMDIHIFEPQGISFLETESTFMTNQLVDALTTWQNKTKAHIRFKPTLSQQQKSPEQQETVLDGNLIIRYDVDRAISGGSIQIENGYFVHYFAPEGLTTMPKNVVFVIDKSGSMSGRKIQQTREALIKILDDLSPRDQFNLIVFSTEATQWRPSLVPASAENVNKARSFAAGIQALGGTNINDAMLMAVQLLDSSNQEERLPEGSVSLIILLTDGDPTVGETNPRSIQNNVREAVSGRYSLFCLGFGFDVSYAFLEKLALDNGGLARRIHEDSDSALQLQDFYQEVANPLLTAVTFEYPSNAVEEVTQNNFRLLFKGSEMVVAGKLQDRGPDVLTATVSGKLPTQNITFQTESSVAEQEAEFQSPKYIFHNFMERLWAYLTIQQLLEQTVSASDADQQALRNQALNLSLAYSFVTPLTSMVVTKPDDQEQSQVAEKPMEGESRNRNVHSGSTFFKYYLQGAKIPKPGDKVGGGGRGD

SEQ ID NO: 862439 - protein, 722 aa, Homo sapiens
MKPPRPVRTCSKVLVLLSLLAIHQTTTAEKNGIDIYSLTVDSRVSSRFAHTVVTSRVVNRANTVQEATFQMELPKKAFITNFSMIIDGMTYPGIIKEKAEAQAQYSAAVAKGKSAGLVKATGRNMEQFQVSVSVAPNAKITFELVYEELLKRRLGVYELLLKVRPQQLVKHLQMDIHIFEPQGISFLETESTFMTNQLVDALTTWQNKTKAHIRFKPTLSQQQKSPEQQETVLDGNLIIRYDVDRAISGGSIQIENGYFVHYFAPEGLTTMPKNVVFVIDKSGSMSGRKIQQTREALIKILDDLSPRDQFNLIVFSTEATQWRPSLVPASAENVNKARSFAAGIQALGGTNINDAMLMAVQLLDSSNQEERLPEGSVSLIILLTDGDPTVGETNPRSIQNNVREAVSGRYSLFCLGFGFDVSYAFLEKLALDNGGLARRIHEDSDSALQLQDFYQEVANPLLTAVTFEYPSNAVEEVTQNNFRLLFKGSEMVVAGKLQDRGPDVLTATVSGKLPTQNITFQTESSVAEQEAEFQSPKYIFHNFMERLWAYLTIQQLLEQTVSASDADQQALRNQALNLSLAYSFVTPLTSMVVTKPDDQEQSQVAEKPMEGESRNRNVHSAGAAGSRMNFRPGVLSSRQLGLPGPPDVPDHAAYHPFRRLAILPASAPPATSNPDPAVSRVMNMKKTTMTTQTPDRLPLPSCHCLGRVWSGSVWTPDTARGQ

SEQ ID NO: 862440 - protein, 648 aa, Homo sapiens; identical to SEQ ID NO: 862438

SEQ ID NO: 862441 - protein, 701 aa, Homo sapiens
MKPPRPVRTCSKVLVLLSLLAIHQTTTAEKNGIDIYSLTVDSRVSSRFAHTVVTSRVVNRANTVQEATFQMELPKKAFITNFSMIIDGMTYPGIIKEKAEAQAQYSAAVAKGKSAGLVKATGRNMEQFQVSVSVAPNAKITFELVYEELLKRRLGVYELLLKVRPQQLVKHLQMDIHIFEPQGISFLETESTFMTNQLVDALTTWQNKTKAHIRFKPTLSQQQKSPEQQETVLDGNLIIRYDVDRAISGGSIQIENGYFVHYFAPEGLTTMPKNVVFVIDKSGSMSGRKIQQTREALIKILDDLSPRDQFNLIVFSTEATQWRPSLVPASAENVNKARSFAAGIQALGGTNINDAMLMAVQLLDSSNQEERLPEGSVSLIILLTDGDPTVGETNPRSIQNNVREAVSGRYSLFCLGFGFDVSYAFLEKLALDNGGLARRIHEDSDSALQLQDFYQEVANPLLTAVTFEYPSNAVEEVTQNNFRLLFKGSEMVVAGKLQDRGPDVLTATVSGKLPTQNITFQTESSVAEQEAEFQSPKYIFHNFMERLWAYLTIQQLLEQTVSASDADQQALRNQALNLSLAYSFVTPLTSMVVTKPDDQEQSQVAEKPMEGESRNRNVHSGSTFFKYYLQGAKIPKPEASFSPRRGWNRQAGAAGSRMNFRPGVLSSRQLGLPGPPDVPDHAAYHPFRRLAISAQPGWTYP

SEQ ID NO: 862442 - protein, 701 aa, Homo sapiens; identical to SEQ ID NO: 862441

SEQ ID NO: 862443 - protein, 648 aa, Homo sapiens; identical to SEQ ID NO: 862438

SEQ ID NO: 862444 - protein, 639 aa, Homo sapiens
MKPPRPVRTCSKVLVLLSLLAIHQTTTAEKNGIDIYSLTVDSRVSSRFAHTVVTSRVVNRANTVQEATFQMELPKKAFITNFSMIIDGMTYPGIIKEKAEAQAQYSAAVAKGKSAGLVKATGRNMEQFQVSVSVAPNAKITFELVYEELLKRRLGVYELLLKVRPQQLVKHLQMDIHIFEPQGISFLETESTFMTNQLVDALTTWQNKTKAHIRFKPTLSQQQKSPEQQETVLDGNLIIRYDVDRAISGGSIQIENGYFVHYFAPEGLTTMPKNVVFVIDKSGSMSGRKIQQTREALIKILDDLSPRDQFNLIVFSTEATQWRPSLVPASAENVNKARSFAAGIQALGGTNINDAMLMAVQLLDSSNQEERLPEGSVSLIILLTDGDPTVGETNPRSIQNNVREAVSGRYSLFCLGFGFDVSYAFLEKLALDNGGLARRIHEDSDSALQLQDFYQEVANPLLTAVTFEYPSNAVEEVTQNNFRLLFKGSEMVVAGKLQDRGPDVLTATVSGKLPTQNITFQTESSVAEQEAEFQSPKYIFHNFMERLWAYLTIQQLLEQTVSASDADQQALRNQALNLSLAYSFVTPLTSMVVTKPDDQEQSQVAEKPMEGESRNRCATQVPLSSNIISREHKYLLAPG

SEQ ID NO: 862445 - protein, 657 aa, Homo sapiens
MKPPRPVRTCSKVLVLLSLLAIHQTTTAEKNGIDIYSLTVDSRVSSRFAHTVVTSRVVNRANTVQEATFQMELPKKAFITNFSMIIDGMTYPGIIKEKAEAQAQYSAAVAKGKSAGLVKATGRNMEQFQVSVSVAPNAKITFELVYEELLKRRLGVYELLLKVRPQQLVKHLQMDIHIFEPQGISFLETESTFMTNQLVDALTTWQNKTKAHIRFKPTLSQQQKSPEQQETVLDGNLIIRYDVDRAISGGSIQIENGYFVHYFAPEGLTTMPKNVVFVIDKSGSMSGRKIQQTREALIKILDDLSPRDQFNLIVFSTEATQWRPSLVPASAENVNKARSFAAGIQALGGTNINDAMLMAVQLLDSSNQEERLPEGSVSLIILLTDGDPTVGETNPRSIQNNVREAVSGRYSLFCLGFGFDVSYAFLEKLALDNGGLARRIHEDSDSALQLQDFYQEVANPLLTAVTFEYPSNAVEEVTQNNFRLLFKGSEMVVAGKLQDRGPDVLTATVSGKLPTQNITFQTESSVAEQEAEFQSPKYIFHNFMERLWAYLTIQQLLEQTVSASDADQQALRNQALNLSLAYSFVTPLTSMVVTKPDDQEQSQVAEKPMEGGGCGVEISASQVAEFGPSVLPDLPCILTKTPTVPPTDSPWEIQPIH

SEQ ID NO: 862446 - protein, 332 aa, Homo sapiens
  misc_feature (9)..(9): Xaa can be any naturally occurring amino acid
AGWYALELXDGCGFGGAAPAGSEAGRALGPRAPPARPVMQGPAGNASRGLPGGPPSTVASGAGRCESGALMHSFGIFLQGLLGVVAFSTLMLKRFREPKHERRPWRIWFLDTSKQAIGMLFIHFANVYLADLTEEDPCSLYLINFLLDATVGMLLIYVGVRAVSVLVEWQQWESLRFGEYGDPLQCGAWVGQCALYIVIMIFEKSVVFIVLLILQWKKVALLNPIENPDLKLAIVMLIVPFFVNALMFWVVDNFLMRKGKTKAKLEERGANQDSRNGSKVRYRRAASHEESESEILISADDEMEESDVEEDLRRLTPLKPVKKKKHRFGLPV

SEQ ID NO: 862447 - protein, 508 aa, Homo sapiens
MKPPRPVRTCSKVLVLLSLLAIHQTTTAEKNGIDIYSLTVDSRVSSRFAHTVVTSRVVNRANTVQEATFQMELPKKAFITNFSMIIDGMTYPGIIKEKAEAQAQYSAAVAKGKSAGLVKATGRNMEQFQVSVSVAPNAKITFELVYEELLKRRLGVYELLLKVRPQQLVKHLQMDIHIFEPQGISFLETESTFMTNQLVDALTTWQNKTKAHIRFKPTLSQQQKSPEQQETVLDGNLIIRYDVDRAISGGSIQIENGYFVHYFAPEGLTTMPKNVVFVIDKSGSMSGRKIQQTREALIKILDDLSPRDQFNLIVFSTEATQWRPSLVPASAENVNKARSFAAGIQALGGTNINDAMLMAVQLLDSSNQEERLPEGSVSLIILLTDGDPTVGETNPRSIQNNVREAVSGRYSLFCLGFGFDVSYAFLEKLALDNGGLARRIHEDSDSALQLQDFYQEVANPLLTAVTFEYPSNAVEEVTQNNFRLLFKGSEMVVAGGGPPLFGGGGGGG

SEQ ID NO: 862448 - protein, 238 aa, Homo sapiens
MTTQTPGSQPPWPLSTSLPPACPSCSRSRAPAVPAPIQAPSAILPLPGQSVERLCVDPRHRQGPVNLLSDPEQGVEVTGQYEREKAGFSWIEVTFKNPLVWVHASPEHVVVTRNRRSSAYKWKETLFSVMPGLKMTMDKTGLLLLSDPDKVTIGLLFWDGRGEGLRLLLRDTDRFSSHVGGTLGQFYQEVLWGSPAASDDGRRTLRVQGNDHSATRERRLDYQEGPPGVEISCWSVEL

SEQ ID NO: 862449 - protein, 396 aa, Homo sapiens
  misc_feature (9)..(9): Xaa can be any naturally occurring amino acid
AGWYALELXDGCGFGGAAPAGSEAGRALGPRAPPARPVMQGPAGNASRGLPGGPPSTVASGAGRCESGALMHSFGIFLQGLLGVVAFSTLMLKRFREPKHERRPWRIWFLDTSKQAIGMLFIHFANVYLADLTEEDPCSLYLINFLLDATVGMLLIYVGVRAVSVLVEWQQWESLRFGEYGDPLQCGAWVGQCALYIVIMIFEKSVVFIVLLILQWKKVALLNPIENPDLKLAIVMLIVPFFVNALMFWVVDNFLMRKGKTKAKLEERGANQDSRNGSKVRYRRAASHEESESEILISADDEMEESDVEEDLRRLTPLKPVKKKKHRFGLPLLPAREAPSETQRLHNTHHVPGWCSGSPYQEEAPPCEGGGPEGGPRKPDQEPGNQVQDLPGHARV

SEQ ID NO: 862450 - protein, 196 aa, Homo sapiens
  misc_feature (9)..(9): Xaa can be any naturally occurring amino acid
AGWYALELXDGCGFGGAAPAGSEAGRALGPRAPPARPVMQGPAGNASRGLPGGPPSTVASGAGRCESGALMHSFGIFLQGLLGVVAFSTLMLKRFREPKHERRPWRIWFLDTSKQAIGMLFIHFANVYLADLTEEDPCSLYLINFLLDATVGMLLIYVGVRAVSVLVEWQQWESLRFGEYEEKAKSLLMRMRDSGK

SEQ ID NO: 862451 - protein, 648 aa, Homo sapiens; identical to SEQ ID NO: 862438

SEQ ID NO: 862452 - protein, 701 aa, Homo sapiens; identical to SEQ ID NO: 862441

SEQ ID NO: 862453 - protein, 996 aa, Homo sapiens
MKPPRPVRTCSKVLVLLSLLAIHQTTTAEKNGIDIYSLTVDSRVSSRFAHTVVTSRVVNRANTVQEATFQMELPKKAFITNFSMIIDGMTYPGIIKEKAEAQAQYSAAVAKGKSAGLVKATGRNMEQFQVSVSVAPNAKITFELVYEELLKRRLGVYELLLKVRPQQLVKHLQMDIHIFEPQGISFLETESTFMTNQLVDALTTWQNKTKAHIRFKPTLSQQQKSPEQQETVLDGNLIIRYDVDRAISGGSIQIENGYFVHYFAPEGLTTMPKNVVFVIDKSGSMSGRKIQQTREALIKILDDLSPRDQFNLIVFSTEATQWRPSLVPASAENVNKARSFAAGIQALGGTNINDAMLMAVQLLDSSNQEERLPEGSVSLIILLTDGDPTVGETNPRSIQNNVREAVSGRYSLFCLGFGFDVSYAFLEKLALDNGGLARRIHEDSDSALQLQDFYQEVANPLLTAVTFEYPSNAVEEVTQNNFRLLFKGSEMVVAGKLQDRGPDVLTATVSGKLPTQNITFQTESSVAEQEAEFQSPKYIFHNFMERLWAYLTIQQLLEQTVSASDADQQALRNQALNLSLAYSFVTPLTSMVVTKPDDQEQSQVAEKPMEGESRNRNVHSGSTFFKYYLQGAKIPKPGDKVGGGEEGRLTDWAQSWLWRVVPCPAPLAGDSPRASVQLYLIRTDHTEASFSPRRGWNRQAGAAGSRMNFRPGVLSSRQLGLPGPPDVPDHAAYHPFRRLAILPASAPPATSNPDPAVSRVMNMKSSQPPWPLSTSLPPACPSCSRSRAPAVPAPIQAPSAILPLPGQSVERLCVDPRHRQGPVNLLSDPEQGVEVTGQYEREKAGFSWIEVTFKNPLVWVHASPEHVVVTRNRRSSAYKWKETLFSVMPGLKMTMDKTGLLLLSDPDKVTIGLLFWDGRGEGLRLLLRDTDRFSSHVGGTLGQFYQEVLWGSPAASDDGRRTLRVQGNDHSATRERRLDYQEGPPGVEISCWSVEL

SEQ ID NO: 862454 - protein, 713 aa, Homo sapiens
MKPPRPVRTCSKVLVLLSLLAIHQTTTAEKNGIDIYSLTVDSRVSSRFAHTVVTSRVVNRANTVQEATFQMELPKKAFITNFSMIIDGMTYPGIIKEKAEAQAQYSAAVAKGKSAGLVKATGRNMEQFQVSVSVAPNAKITFELVYEELLKRRLGVYELLLKVRPQQLVKHLQMDIHIFEPQGISFLETESTFMTNQLVDALTTWQNKTKAHIRFKPTLSQQQKSPEQQETVLDGNLIIRYDVDRAISGGSIQIENGYFVHYFAPEGLTTMPKNVVFVIDKSGSMSGRKIQQTREALIKILDDLSPRDQFNLIVFSTEATQWRPSLVPASAENVNKARSFAAGIQALGGTNINDAMLMAVQLLDSSNQEERLPEGSVSLIILLTDGDPTVGETNPRSIQNNVREAVSGRYSLFCLGFGFDVSYAFLEKLALDNGGLARRIHEDSDSALQLQDFYQEVANPLLTAVTFEYPSNAVEEVTQNNFRLLFKGSEMVVAGKLQDRGPDVLTATVSGKLPTQNITFQTESSVAEQEAEFQSPKYIFHNFMERLWAYLTIQQLLEQTVSASDADQQALRNQALNLSLAYSFVTPLTSMVVTKPDDQEQSQVAEKPMEGESRNRNVHSAGAAGSRMNFRPGVLSSRQLGLPGPPDVPDHAAYHPFRRLAILPASAPPATSNPDPAVSRVMNMKNRLPLPSCHCLGRVWSGSVWTPDTARGQ

SEQ ID NO: 862455 - protein, 850 aa, Homo sapiens
MKPPRPVRTCSKVLVLLSLLAIHQTTTAEKNGIDIYSLTVDSRVSSRFAHTVVTSRVVNRANTVQEATFQMELPKKAFITNFSMIIDGMTYPGIIKEKAEAQAQYSAAVAKGKSAGLVKATGRNMEQFQVSVSVAPNAKITFELVYEELLKRRLGVYELLLKVRPQQLVKHLQMDIHIFEPQGISFLETESTFMTNQLVDALTTWQNKTKAHIRFKPTLSQQQKSPEQQETVLDGNLIIRYDVDRAISGGSIQIENGYFVHYFAPEGLTTMPKNVVFVIDKSGSMSGRKIQQTREALIKILDDLSPRDQFNLIVFSTEATQWRPSLVPASAENVNKARSFAAGIQALGGTNINDAMLMAVQLLDSSNQEERLPEGSVSLIILLTDGDPTVGETNPRSIQNNVREAVSGRYSLFCLGFGFDVSYAFLEKLALDNGGLARRIHEDSDSALQLQDFYQEVANPLLTAVTFEYPSNAVEEVTQNNFRLLFKGSEMVVAGKLQDRGPDVLTATVSGKLPTQNITFQTESSVAEQEAEFQSPKYIFHNFMERLWAYLTIQQLLEQTVSASDADQQALRNQALNLSLAYSFVTPLTSMVVTKPDDQEQSQVAEKPMEGESRNRNVHSAGAAGSRMNFRPGVLSSRQLGLPGPPDVPDHAAYHPFRRLAILPASAPPATSNPDPAVSRVMNMKRVEVTGQYEREKAGFSWIEVTFKNPLVWVHASPEHVVVTRNRRSSAYKWKETLFSVMPGLKMTMDKTGLLLLSDPDKVTIGLLFWDGRGEGLRLLLRDTDRFSSHVGGTLGQFYQEVLWGSPAASDDGRRTLRVQGNDHSATRERRLDYQEGPPGVEISCWSVEL

SEQ ID NO: 862456 - protein, 648 aa, Homo sapiens; identical to SEQ ID NO: 862438

SEQ ID NO: 862457 - protein, 648 aa, Homo sapiens; identical to SEQ ID NO: 862438

SEQ ID NO: 862458 - protein, 648 aa, Homo sapiens; identical to SEQ ID NO: 862438

SEQ ID NO: 862459 - protein, 396 aa, Homo sapiens; identical to SEQ ID NO: 862449
  misc_feature (9)..(9): Xaa can be any naturally occurring amino acid

SEQ ID NO: 862460 - protein, 722 aa, Homo sapiens; identical to SEQ ID NO: 862439

SEQ ID NO: 862461 - protein, 510 aa, Homo sapiens
MKPPRPVRTCSKVLVLLSLLAIHQTTTAEKNGIDIYSLTVDSRVSSRFAHTVVTSRVVNRANTVQEATFQMELPKKAFITNFSMIIDGMTYPGIIKEKAEAQAQYSAAVAKGKSAGLVKATGRNMEQFQVSVSVAPNAKITFELVYEELLKRRLGVYELLLKVRPQQLVKHLQMDIHIFEPQGISFLETESTFMTNQLVDALTTWQNKTKAHIRFKPTLSQQQKSPEQQETVLDGNLIIRYDVDRAISGGSIQIENGYFVHYFAPEGLTTMPKNVVFVIDKSGSMSGRKIQQTREALIKILDDLSPRDQFNLIVFSTEATQWRPSLVPASAENVNKARSFAAGIQALGGTNINDAMLMAVQLLDSSNQEERLPEGSVSLIILLTDGDPTVGETNPRSIQNNVREAVSGRYSLFCLGFGFDVSYAFLEKLALDNGGLARRIHEDSDSALQLQDFYQEVANPLLTAVTFEYPSNAVEEVTQNNFRLLFKGSRFGGGFLGRGGGFSGGGGGAP

SEQ ID NO: 862462 - protein, 114 aa, Homo sapiens
MDKTGLLLLSDPDKVTIGLLFWDGRGEGLRLLLRDTDRFSSHVGGTLGTEPITGAQAFLRNQLCLGTGSAPPLRVSPRLPLSLTLTDPPFVSQASFTRRCSGDLQQHQMTADAR

SEQ ID NO: 862463 - protein, 71 aa, Homo sapiens
MGPGETNPRSIQNNVREAVSGRYSLFCLGFGFDVSYAFLEKLALDNGGLARRIHEDSDSALQLQVPVCPRW

SEQ ID NO: 862464 - protein, 300 aa, Homo sapiens
MATSVGHRCLGLLHGVAPWRSSLHPCEITALSQSLQPLRKLPFRAFRTDARKIHTAPARTMFLLRPLPILLVTGGGYAGYRQYEKYRERELEKLGLEIPPKLAGHWEVALYKSVPTRLLSRAWGRLNQVELPHWLRRPVYSLYIWTFGVNMKEAAVEDLHHYRNLSEFFRRKLKPQARPVCGLHSVISPSDGRILNFGQVKNCEVEQVKGVTYSLESFLGPRMCTEDLPFPPGGGGLQNSGPGGWLFTGSSRPGVTVIPVVSPASGRWTAAGALSRGAAKVYPGGAIGKQANEEGGFSSV

SEQ ID NO: 862465 - protein, 93 aa, Homo sapiens
MCQSEARQGPELRAAKWLHFPQLALRRRLGQLSCMSRPALKLRSWPLTVLYYLLPFGALRPLSRVGWRPVSRGLSSQCNALAVRLGPPRGSPV

SEQ ID NO: 862466 - protein, 409 aa, Homo sapiens
MATSVGHRCLGLLHGVAPWRSSLHPCEITALSQSLQPLRKLPFRAFRTDARKIHTAPARTMFLLRPLPILLVTGGGYAGYRQYEKYRERELEKLGLEIPPKLAGHWEVALYKSVPTRLLSRAWGRLNQVELPHWLRRPVYSLYIWTFGVNMKEAAVEDLHHYRNLSEFFRRKLKPQARPVCGLHSVISPSDGRILNFGQVKNCEVEQVKGVTYSLESFLGPRMCTEDLPFPPAASCDSFKNQLVTREGNELYHCVIYLAPGDYHCFHSPTDWTVSHRRHFPGSLMSVNPGMARWIKELFCHNERVVLTGDWKHGFFSLTAVGATNVGSIRIYFDRDLHTNSPRHSKGSYNDFSFVTHTNREGVPMRKGEHLGEFNLGSTIVLIFEAPKDFNFQLKTGQKIRFGEALGSL

SEQ ID NO: 862467 - protein, 433 aa, Homo sapiens
MCQSEARQGPELRAAKWLHFPQLALRRRLGQLSCMSRPALKLRSWPLTVLYYLLPFGALRPLSRVGWRPVSRVALYKSVPTRLLSRAWGRLNQVELPHWLRRPVYSLYIWTFGVNMKEAAVEDLHHYRNLSEFFRRKLKPQARPVCGLHSVVRPDPFLLQETGLFPASPAQPPWSPAYLEGAGMTRGGGGCLLGGGDPALPGSKPLLPFQISPSDGRILNFGQVKNCEVEQVKGVTYSLESFLGPRMCTEDLPFPPAASCDSFKNQLVTREGNELYHCVIYLAPGDYHCFHSPTDWTVSHRRHFPGSLMSVNPGMARWIKELFCHNERVVLTGDWKHGFFSLTAVGATNVGSIRIYFDRDLHTNSPRHSKGSYNDFSFVTHTNREGVPMRKGEHLGEFNLGSTIVLIFEAPKDFNFQLKTGQKIRFGEALGSL

SEQ ID NO: 862468 - protein, 433 aa, Homo sapiens; identical to SEQ ID NO: 862467

SEQ ID NO: 862469 - protein, 433 aa, Homo sapiens; identical to SEQ ID NO: 862467

SEQ ID NO: 862470 - protein, 433 aa, Homo sapiens; identical to SEQ ID NO: 862467

SEQ ID NO: 862471 - protein, 340 aa, Homo sapiens [sequence omitted]

SEQ ID NO: 862472 - protein, 149 aa, Homo sapiens
MCHGVDTPGSGRGVAAFPASAGSLMSVNPGMARWIKELFCHNERVVLTGDWKHGFFSLTAVGATNVGSIRIYFDRDLHTNSPRHSKGSYNDFSFVTHTNREGVPMRKGEHLGEFNLGSTIVLIFEAPKDFNFQLKTGQKIRFGEALGSL

SEQ ID NO: 862473 - protein, 470 aa, Homo sapiens
MATSVGHRCLGLLHGVAPWRSSLHPCEITALSQSLQPLRKLPFRAFRTDARKIHTAPARTMFLLRPLPILLVTGGGYAGYRQYEKYRERELEKLGLEIPPKLAGHWEVALYKSVPTRLLSRAWGRLNQVELPHWLRRPVYSLYIWTFGVNMKEAAVEDLHHYRNLSEFFRRKLKPQARPVCGLHSVVRPDPFLLQETGLFPASPAQPPWSPAYLEGAGMTRGGGGCLLGGGDPALPGSKPLLPFQISPSDGRILNFGQVKNCEVEQVKGVTYSLESFLGPRMCTEDLPFPPGGSLHSGARQPCCCVAGPGGRGMLGKELRLACGASLRIHVQTTLGLRAGCSLFGGPHVCSYSTAASCDSFKNQLVTREGNELYHCVIYLAPGDYHCFHSPTDWTVSHRRHFPGSLMSVNPGMARWIKELFCHNERVVLTGDWKHGFFSLTAVGATNVGSIRIYFDRDLHTNSPRTSISS

SEQ ID NO: 862474 - protein, 197 aa, Homo sapiens
MRGQHSQVCCPPCPQGLPFWVSVCDQRPWLPRVLLSQHHAWRPLGPTVPCPPWAQFTAGVKAVCEIWLEQAHLALRCHPHLPFGAGLGGGGDKQQREWDSNTCGGDTVHLVAWAPLTPSLSPQDLHTNSPRHSKGSYNDFSFVTHTNREGVPMRKGEHLGEFNLGSTIVLIFEAPKDFNFQLKTGQKIRFGEALGSL

SEQ ID NO: 862475 - protein, 374 aa, Homo sapiens
MCQSEARQGPELRAAKWLHFPQLALRRRLGQLSCMSRPALKLRSWPLTVLYYLLPFGALRPLSRVGWRPVSRVALYKSVPTRLLSRAWGRLNQVELPHWLRRPVYSLYIWTFGVNMKEAAVEDLHHYRNLSEFFRRKLKPQARPVCGLHSVISPSDGRILNFGQVKNCEVEQVKGVTYSLESFLGPRMCTEDLPFPPAASCDSFKNQLVTREGNELYHCVIYLAPGDYHCFHSPTDWTVSHRRHFPGSLMSVNPGMARWIKELFCHNERVVLTGDWKHGFFSLTAVGATNVGSIRIYFDRDLHTNSPRHSKGSYNDFSFVTHTNREGVPMRKGEHLGEFNLGSTIVLIFEAPKDFNFQLKTGQKIRFGEALGSL

SEQ ID NO: 862476 - protein, 374 aa, Homo sapiens; identical to SEQ ID NO: 862475

SEQ ID NO: 862477 - protein, 374 aa, Homo sapiens; identical to SEQ ID NO: 862475

SEQ ID NO: 862478 - protein, 468 aa, Homo sapiens
MATSVGHRCLGLLHGVAPWRSSLHPCEITALSQSLQPLRKLPFRAFRTDARKIHTAPARTMFLLRPLPILLVTGGGYAGYRQYEKYRERELEKLGLEIPPKLAGHWEVALYKSVPTRLLSRAWGRLNQVELPHWLRRPVYSLYIWTFGVNMKEAAVEDLHHYRNLSEFFRRKLKPQARPVCGLHSVVRPDPFLLQETGLFPASPAQPPWSPAYLEGAGMTRGGGGCLLGGGDPALPGSKPLLPFQISPSDGRILNFGQVKNCEVEQVKGVTYSLESFLGPRMCTEDLPFPPAASCDSFKNQLVTREGNELYHCVIYLAPGDYHCFHSPTDWTVSHRRHFPGSLMSVNPGMARWIKELFCHNERVVLTGDWKHGFFSLTAVGATNVGSIRIYFDRDLHTNSPRHSKGSYNDFSFVTHTNREGVPMRKGEHLGEFNLGSTIVLIFEAPKDFNFQLKTGQKIRFGEALGSL

SEQ ID NO: 862479 - protein, 78 aa, Homo sapiens
MCQSEARQGPELRAAKWLHFPQLALRRRLGQLSCMSRPALKLRSWPLTVLYYLLPFGALRPLSRVGWRPVSRGSVCTG

SEQ ID NO: 862480 - protein, 531 aa, Homo sapiens
MATSVGHRCLGLLHGVAPWRSSLHPCEITALSQSLQPLRKLPFRAFRTDARKIHTAPARTMFLLRPLPILLVTGGGYAGYRQYEKYRERELEKLGLEIPPKLAGHWEVALYKSVPTRLLSRAWGRLNQVELPHWLRRPVYSLYIWTFGVNMKEAAVEDLHHYRNLSEFFRRKLKPQARPVCGLHSVVRPDPFLLQETGLFPASPAQPPWSPAYLEGAGMTRGGGGCLLGGGDPALPGSKPLLPFQISPSDGRILNFGQVKNCEVEQVKGVTYSLESFLGPRMCTEDLPFPPGGSLHSGARQPCCCVAGPGGRGMLGKELRLACGASLRIHVQTTLGLRAGCSLFGGPHVCSYSTAASCDSFKNQLVTREGNELYHCVIYLAPGDYHCFHSPTDWTVSHRRHFPGSLMSVNPGMARWIKELFCHNERVVLTGDWKHGFFSLTAVGATNVGSIRIYFDRDLHTNSPRHSKGSYNDFSFVTHTNREGVPMRKGEHLGEFNLGSTIVLIFEAPKDFNFQLKTGQKIRFGEALGSL

SEQ ID NO: 862481 - protein, 433 aa, Homo sapiens; identical to SEQ ID NO: 862467

SEQ ID NO: 862482 - protein, 393 aa, Homo sapiens
MATSVGHRCLGLLHGVAPWRSSLHPCEITALSQSLQPLRKLPFRAFRTDARKIHTAPARTMFLLRPLPILLVTGGGYAGYRQYEKYRERELEKLGLEIPPKLAGHWEVALYKSVPTRLLSRAWGRLNQVELPHWLRRPVYSLYIWTFGVNMKEAAVEDLHHYRNLSEFFRRKLKPQARPVCGLHSVISPSDGRILNFGQVKNCEVEQVKGVTYSLESFLGPRMCTEDLPFPPAASCDSFKNQLVTREGNELYHCVIYLAPGDYHCFHSPTDWTVSHRRHFPGSLMSVNPGMARWIKELFCHNERVVLTGDWKHGFFSLTAVGATWASSLFCRLANGRRGSKGVVLAPHRGSLGGGRGYPGPRVLATVIRKRARGAGATPLGRSQGGGRRALGV

SEQ ID NO: 862483 - protein, 132 aa, Homo sapiens [sequence omitted]

SEQ ID NO: 862484 - protein, 413 aa, Homo sapiens
MAPPSVFAEVPQAQPVLVFKLTADFREDPDPRKVNLGVGAYRTDDCHPWVLPVVKKVEQKIANDNSLNHEYLPILGLAEFRSCASRLALGDDSPALKEKRVGGVQSLGGTGALRIGADFLARWYNGTNNKNTPVYVSSPTWENHNAVFSAAGFKDIRSYRYWDAEKRGLDLQGFLNDLENAPEFSIVVLHACAHNPTGIDPTPEQWKQIASVMKHRFLFPFFDSAYQGFASGNLERDAWAIRYFVSEGFEFFCAQSFSKNFGLYNERVGNLTVVGKEPESILQVLSQMEKIVRITWSNPPAQGARIVASTLSNPELFEEWTGNVKTMADRILTMRSELRARLEALKTPGTWNHITDQIGMFSFTGLNPKQVEYLVNEKHIYLLPSGRINVSGLTTKNLDYVATSIHEAVTKIQ

SEQ ID NO: 862485 - protein, 413 aa, Homo sapiens; identical to SEQ ID NO: 862484

SEQ ID NO: 862486 - protein, 413 aa, Homo sapiens; identical to SEQ ID NO: 862484

SEQ ID NO: 862487 - protein, 442 aa, Homo sapiens
MAPPSVFAEVPQAQPVLVFKLTADFREDPDPRKVNLGVGAYRTDDCHPWVLPVVKKVEQKIANDNSLNHEYLPILGLAEFRSCASRLALGDDSPALKEKRVGGVQSLGGTGALRIGADFLARWYNGTNNKNTPVYVSSPTWENHNAVFSAAGFKDIRSYRYWDAEKRGLDLQGFLNDLENAPEFSIVVLHACAHNPTGIDPTPEQWKQIASVMKHRFLFPFFDSAYQGFASGNLERDAWAIRYFVSEGFEFFCAQSFSKNFGLYNERVGNLTVVGKEPESILQVLSQMEKIVRITWSNPPAQGARIVASTLSNPELFEEWTGNVKTMADRILTMRSELRARLEALKTPGTWNHITDQIGMFSFTGLNPKQVEYLVNEKHIYLLPSGRINVSGLTTKNLDYVATSIHEAVTMCVPCLHKPTCTYHGLETLAGLKGCSGEAASV

SEQ ID NO: 862488 - protein, 413 aa, Homo sapiens; identical to SEQ ID NO: 862484

SEQ ID NO: 862489 - protein, 224 aa, Homo sapiens
LGKEGRCLRLVPEGFPALTHFASPQHRFLFPFFDSAYQGFASGNLERDAWAIRYFVSEGFEFFCAQSFSKNFGLYNERVGNLTVVGKEPESILQVLSQMEKIVRITWSNPPAQGARIVASTLSNPELFEEWTGNVKTMADRILTMRSELRARLEALKTPGTWNHITDQIGMFSFTGLNPKQVEYLVNEKHIYLLPSGRINVSGLTTKNLDYVATSIHEAVTKIQ

SEQ ID NO: 862490 - protein, 104 aa, Homo sapiens
MAPPSVFAEVPQAQPVLVFKLTADFREDPDPRKVNLGVGAYRTDDCHPWVLPVVKKVEQKIANDNSLNHEYLPILGLAEFRSCASRLALGDDSPALKEKRVSFG

SEQ ID NO: 862491 - protein, 78 aa, Homo sapiens
HPVQKSPDSSFSCPCVCLCLLGTYMYIPTGIRDSLLDMKGVCICVERSPSDINPFPHDRVTSPLKKRNIGRTVDCDAV

SEQ ID NO: 862492 - protein, 413 aa, Homo sapiens; identical to SEQ ID NO: 862484

SEQ ID NO: 862493 - protein, 413 aa, Homo sapiens; identical to SEQ ID NO: 862484

SEQ ID NO: 862494 - protein, 443 aa, Homo sapiens
MAPPSVFAEVPQAQPVLVFKLTADFREDPDPRKVNLGVGAYRTDDCHPWVLPVVKKVEQKIANDNSLNHEYLPILGLAEFRSCASRLALGDDSPALKEKRVGGVQSLGGTGALRIGADFLARWYNGTNNKNTPVYVSSPTWENHNAVFSAAGFKDIRSYRYWDAEKRGLDLQGFLNDLENAPEFSIVVLHACAHNPTGIDPTPEQWKQIASVMKHRFLFPFFDSAYQGFASGNLERDAWAIRYFVSEGFEFFCAQSFSKNFGLYSECSPEELQPHLLASLPASAATADSGPSLSDERVGNLTVVGKEPESILQVLSQMEKIVRITWSNPPAQGARIVASTLSNPELFEEWTGNVKTMADRILTMRSELRARLEALKTPGTWNHITDQIGMFSFTGLNPKQVEYLVNEKHIYLLPSGRINVSGLTTKNLDYVATSIHEAVTKIQ

SEQ ID NO: 862495 - protein, 220 aa, Homo sapiens
MAPPSVFAEVPQAQPVLVFKLTADFREDPDPRKVNLGVGAYRTDDCHPWVLPVVKKVEQKIANDNSLNHEYLPILGLAEFRSCASRLALGDDSPALKEKRVGGVQSLGGTGALRIGADFLARWYNGTNNKNTPVYVSSPTWENHNAVFSAAGFKDIRSYRYWDAEKRGLDLQGFLNDLENAPEFSIVVLHACAHNPTGIDPTPEQWKQIASVMKMRESGI

SEQ ID NO: 862496 - protein, 400 aa, Homo sapiens
MVNRVAKLWTRLDHWRPRARPRRLGEAYRTDDCHPWVLPVVKKVEQKIANDNSLNHEYLPILGLAEFRSCASRLALGDDSPALKEKRVGGVQSLGGTGALRIGADFLARWYNGTNNKNTPVYVSSPTWENHNAVFSAAGFKDIRSYRYWDAEKRGLDLQGFLNDLENAPEFSIVVLHACAHNPTGIDPTPEQWKQIASVMKHRFLFPFFDSAYQGFASGNLERDAWAIRYFVSEGFEFFCAQSFSKNFGLYNERVGNLTVVGKEPESILQVLSQMEKIVRITWSNPPAQGARIVASTLSNPELFEEWTGNVKTMADRILTMRSELRARLEALKTPGTWNHITDQIGMFSFTGLNPKQVEYLVNEKHIYLLPSGRINVSGLTTKNLDYVATSIHEAVTKIQ

SEQ ID NO: 862497 - protein, 254 aa, Homo sapiens
LGKEGRCLRLVPEGFPALTHFASPQHRFLFPFFDSAYQGFASGNLERDAWAIRYFVSEGFEFFCAQSFSKNFGLYSECSPEELQPHLLASLPASAATADSGPSLSDERVGNLTVVGKEPESILQVLSQMEKIVRITWSNPPAQGARIVASTLSNPELFEEWTGNVKTMADRILTMRSELRARLEALKTPGTWNHITDQIGMFSFTGLNPKQVEYLVNEKHIYLLPSGRINVSGLTTKNLDYVATSIHEAVTKIQ

SEQ ID NO: 862498 - protein, 68 aa, Homo sapiens
MAPPSVFAEVPQAQPVLVFKLTADFREDPDPRKVNLGVGGKDVVLWSVSSSGSGADPTQVVETVGEAE

SEQ ID NO: 862499 - protein, 313 aa, Homo sapiens
MGAVCTSGARSERTMTPVRMQHSLAGQTYAVPLIQPDLRREEAVQQMADALQYLQKVSGDIFSRISQRVEQSRSQVQAIGEKVSLAQAKIEKIKGSKKAIKVFSSAKYPAPERLQEYGSIFTGAQDPGLQRRPRHRIQSKHRPLDERALQEKLKDFPVCVSTKPEPEDDAEEGLGGLPSNISSVSSLLLFNTTENLYKKYVFLDPLAGAVTKTHVMLGAETEEKLFDAPLSISKREQLEQQVPENYFYVPDLGQVPEIDVPSYLPDLPGIANDLMYIADLGPGIAPSAPGTIPELPTFHTEVAEPLKTYKMGY

SEQ ID NO: 862500 - protein, 233 aa, Homo sapiens
MTPVRMQHSLAGQTYAVPLIQPDLRREEAVQQMADALQYLQKVSGDIFSRISQRVEQSRSQVQAIGEKVSLAQAKIEKIKGSKKAIKVFSSAKYPAPERLQEYGSIFTGAQDPGLQRRPRHRIQSKHRPLDERALQEKLKDFPVCVSTKPEPEDDAEEGLGGLPSNISSVSSLLLFNTTENLYKKYVFLDPLAGAVTKTHVMLGAETEEKLFDAPLSISPRELLLCARPGPGA

SEQ ID NO: 862501 - protein, 214 aa, Homo sapiens
MGAVCTSGARSERTMTPVRMQHSLAGQTYAVPLIQPDLRREEAVQQMADALQYLQKVSGDIFSRISQRVEQSRSQVQAIGEKVSLAQAKIEKIKGSKKAIKVFSSAKYPAPERLQEYGSIFTGAQDPGLQRRPRHRIQSKHRPLDERALQEKLKDFPVCVSTKPEPEDDAEEGLGGLPSNISSVSSLLLFNTTENLLYGQKAGPRGVGGRPGLA

SEQ ID NO: 862502 - protein, 379 aa, Homo sapiens
MTPVRMQHSLAGQTYAVPLIQPDLRREEAVQQMADALQYLQKVSGDIFSRISQRVEQSRSQVQAIGEKVSLAQAKIEKIKGSKKAIKVFSSAKYPAPERLQEYGSIFTGAQDPGLQRRPRHRIQSKHRPLDERALQEKLKDFPVCVSTKPEPEDDAEEGLGGLPSNISSVSSLLLFNTTENLLYGQKAGPRGVGGRPGWLSGDPGHQTQVQHMGQEPGGDWGGSAREAWDPKCTLLPLMMWERNMGSGQRVSACLTPCHLCRYKKYVFLDPLAGAVTKTHVMLGAETEEKLFDAPLSISKREQLEQQVPENYFYVPDLGQVPEIDVPSYLPDLPGIANDLMYIADLGPGIAPSAPGTIPELPTFHTEVAEPLKTYKMGY

SEQ ID NO: 862503 - protein, 299 aa, Homo sapiens
MTPVRMQHSLAGQTYAVPLIQPDLRREEAVQQMADALQYLQKVSGDIFSRISQRVEQSRSQVQAIGEKVSLAQAKIEKIKGSKKAIKVFSSAKYPAPERLQEYGSIFTGAQDPGLQRRPRHRIQSKHRPLDERALQEKLKDFPVCVSTKPEPEDDAEEGLGGLPSNISSVSSLLLFNTTENLYKKYVFLDPLAGAVTKTHVMLGAETEEKLFDAPLSISKREQLEQQVPENYFYVPDLGQVPEIDVPSYLPDLPGIANDLMYIADLGPGIAPSAPGTIPELPTFHTEVAEPLKTYKMGY

SEQ ID NO: 862504 - protein, 358 aa, Homo sapiens
MGAVCTSGARSERTMTPVRMQHSLAGQTYAVPLIQPDLRREEAVQQMADALQYLQKVSGDIFSRISQRVEQSRSQVQAIGEKVSLAQAKIEKIKGSKKAIKVFSSAKYPAPERLQEYGSIFTGAQDPGLQRRPRHRIQSKHRPLDERALQEKLKDFPVCVSTKPEPEDDAEEGLGGLPSNISSVSSLLLFNTTENLTPTAPTTPPAPEVLASAPPLPPSTAAPVGQGARQDDSSSSASPSVQGAPREVVDPSGGRATLLESIRQAGGIGKAKLRSMKERKLEKKKQKEQEQVRATSQGGHLMSDLFNKLVMRRKGISGKGPGAGEGPGGAFARVSDSIPPLPPPQQPQAEEDEDDWES

SEQ ID NO: 862505 - protein, 233 aa, Homo sapiens; identical to SEQ ID NO: 862500

SEQ ID NO: 862506 - protein, 299 aa, Homo sapiens; identical to SEQ ID NO: 862503

SEQ ID NO: 862507 - protein, 317 aa, Homo sapiens
MGAVCTSGARSERTMTPVRMQHSLAGQTYAVPLIQPDLRREEAVQQMADALQYLQKVSGDIFSRISQRVEQSRSQVQAIGEKVSLAQAKIEKIKGSKKAIKVFSSAKYPAPERLQEYGSIFTGAQDPGLQRRPRHRIQSKHRPLDERALQEKLKDFPVCVSTKPEPEDDAEEGLGGLPSNISSVSSLLLFNTTENLYKKYVFLDPLAGAVTKTHVMLGAETEEKLFDAPLSISSMKERKLEKKKQKEQEQVRATSQGGHLMSDLFNKLVMRRKGISGKGPGAGEGPGGAFARVSDSIPPLPPPQQPQAEEDEDDWES

SEQ ID NO: 862508 - protein, 106 aa, Homo sapiens [sequence omitted]

SEQ ID NO: 862509 - protein, 299 aa, Homo sapiens; identical to SEQ ID NO: 862503

SEQ ID NO: 862510 - protein, 299 aa, Homo sapiens; identical to SEQ ID NO: 862503

SEQ ID NO: 862511 - protein, 299 aa, Homo sapiens; identical to SEQ ID NO: 862503

SEQ ID NO: 862512 - protein, 254 aa, Homo sapiens
MAGSPISQRVEQSRSQVQAIGEKVSLAQAKIEKIKGSKKAIKVFSSAKYPAPERLQEYGSIFTGAQDPGLQRRPRHRIQSKHRPLDERALQEKLKDFPVCVSTKPEPEDDAEEGLGGLPSNISSVSSLLLFNTTENLYKKYVFLDPLAGAVTKTHVMLGAETEEKLFDAPLSISKREQLEQQVPENYFYVPDLGQVPEIDVPSYLPDLPGIANDLMYIADLGPGIAPSAPGTIPELPTFHTEVAEPLKTYKMGY

SEQ ID NO: 862513 - protein, 217 aa, Homo sapiens
MKEKKTTAGAGVSDEGAPGGRSQVFSSAKYPAPERLQEYGSIFTGAQDPGLQRRPRHRIQSKHRPLDERALQEKLKDFPVCVSTKPEPEDDAEEGLGGLPSNISSVSSLLLFNTTENLLYGQKAGPRGVGGRPGWLSGDPGHQTQVPENYFYVPDLGQVPEIDVPSYLPDLPGIANDLMYIADLGPGIAPSAPGTIPELPTFHTEVAEPLKTYKMGY

SEQ ID NO: 862514 - protein, 168 aa, Homo sapiens
  misc_feature (4)..(4): Xaa can be any naturally occurring amino acid
MAFXASFIEGIEVAGLIKVDAKQERNKPSTAAPVGQGARQDDSSSSASPSVQGAPREVVDPSGGRATLLESIRQAGGIGKAKLRSMKERKLEKKKQKEQEQVRATSQGGHLMSDLFNKLVMRRKGISGKGPGAGEGPGGAFARVSDSIPPLPPPQQPQAEEDEDDWES

SEQ ID NO: 862515 - protein, 194 aa, Homo sapiens [sequence omitted]

SEQ ID NO: 862516 - protein, 1304 aa, Homo sapiens
LPGPGSFAALGWANPERRSGTMWGSDRLAGAGGGGAAVTVAFTNARDCFLHLPRRLVAQLHLLQNQAIEVVWSHQPAFLSWVEGRHFSDQGENVAEINRQVGQKLGLSNGGQVFLKPCSHVVSCQQVEVEPLSADDWEILELHAVSLEQHLLDQIRIVFPKAIFPVWVDQQTYIFIQIVALIPAASYGRLETDTKLLIQPKTRRAKENTFSKADAEYKKLHSYGRDQKGMMKELQTKQLQSNTVGITESNENESEIPVDSSSVASLWTMIGSIFSFQSEKKQETSWGLTEINAFKNMQSKVVPLDNIFRVCKSQPPSIYNASATSVFHKHCAIHVFPWDQEYFDVEPSFTVTYGKLVKLLSPKQQQSKTKQNVLSPEKEKQMSEPLDQKKIRSDHNEEDEKACVLQVVWNGLEELNNAIKYTKNVEVLHLGKVWIPDDLRKRLNIEMHAVVRITPVEVTPKIPRSLKLQPRENLPKDISEEDIKTVFYSWLQQSTTTMLPLVISEEEFIKLETKDGLKEFSLSIVHSWEKEKDKNIFLLSPNLLQKTTIQVLLDPMVKEENSEEIDFILPFLKLSSLGGVNSLGVSSLEHITHSLLGRPLSRQLMSLVAGLRNGALLLTGGKGSGKSTLAKAICKEAFDKLDAHVERVDCKALRGKRLENIQKTLEVAFSEAVWMQPSVVLLDDLDLIAGLPAVPEHEHSPDAVQSQRLAHALNDMIKEFISMGSLVALIATSQSQQSLHPLLVSAQGVHIFQCVQHIQPPNQEQRCEILCNVIKNKLDCDINKFTDLDLQHVAKETGGFVARDFTVLVDRAIHSRLSRQSISTREKLVLTTLDFQKALRGFLPASLRSVNLHKPRDLGWDKIGGLHEVRQILMDTIQLPAKYPELFANLPIRQRTGILLYGPPGTGKTLLAGVIARESRMNFISVKGPELLSKYIGASEQAVRDIFIRAQAAKPCILFFDEFESIAPRRGHDNTGVTDRVVNQLLTQLDGVEGLQGVYVLAATSRPDLIDPALLRPGRLDKCVYCPPPDQVSRLEILNVLSDSLPLADDVDLQHVASVTDSFTGADLKALLYNAQLEALHGMLLSSGLQDGSSSSDSDLSLSSMVFLNHSSGSDDSAGDGECGLDQSLVSLEMSEILPDESKFNMYRLYFGSSYESELGNGTSSDLSSQCLSAPSSMTQDLPGVPGKDQLFSQPPVLRTASQEGCQELTQEQRDQLRADISIIKGRYRSQSGEDESMNQPGPIKTRLAISQSHLMTALGHTRPSISEDDWKNFAELYESFQNPKRRKNQSGTMFRPGQKVTLA

SEQ ID NO: 862517 - protein, 1304 aa, Homo sapiens; identical to SEQ ID NO: 862516

SEQ ID NO: 862518 - protein, 1247 aa, Homo sapiens
LPGPGSFAALGWANPERRSGTMWGSDRLAGAGGGGAAVTVAFTNARDCFLHLPRRLVAQLHLLQNQAIEVVWSHQPAFLSWVEGRHFSDQGENVAEINRQVGQKLGLSNGGQVFLKPCSHVVSCQQVEVEPLSADDWEILELHAVSLEQHLLDQIRIVFPKAIFPVWVDQQTYIFIQIVALIPAASYGRLETDTKLLIQPKTRRAKENTFSKADAEYKKLHSYGRDQKGMMKELQTKQLQSNTVGITESNENESEIPVDSSSVASLWTMIGSIFSFQSEKKQETSWGLTEINAFKNMQSKVVPLDNIFRVCKSQPPSIYNASATSVFHKHCAIHVFPWDQEYFDVEPSFTVTYGKLVKLLSPKQQQSKTKQNVLSPEKEKQMSEPLDQKKIRSDHNEEDEKACVLQVVWNGLEELNNAIKYTKNVEVLHLGKVWIPDDLRKRLNIEMHAVVRITPVEVTPKIPRSLKLQPRENLPKDISEEDIKTVFYSWLQQSTTTMLPLVISEEEFIKLETKDGLKEFSLSIVHSWEKEKDKNIFLLSPNLLQKTTIQVLLDPMVKEENSEEIDFILPFLKLSSLGGVNSLGVSSLEHITHSLLGRPLSRQLMSLVAGLRNGALLLTGGKGSGKSTLAKAICKEAFDKLDAHVERVDCKALRALNDMIKEFISMGSLVALIATSQSQQSLHPLLVSAQGVHIFQCVQHIQPPNQEQRCEILCNVIKNKLDCDINKFTDLDLQHVAKETGGFVARDFTVLVDRAIHSRLSRQSISTREKLVLTTLDFQKALRGFLPASLRSVNLHKPRDLGWDKIGGLHEVRQILMDTIQLPAKYPELFANLPIRQRTGILLYGPPGTGKTLLAGVIARESRMNFISVKGPELLSKYIGASEQAVRDIFIRAQAAKPCILFFDEFESIAPRRGHDNTGVTDRVVNQLLTQLDGVEGLQGVYVLAATSRPDLIDPALLRPGRLDKCVYCPPPDQVSRLEILNVLSDSLPLADDVDLQHVASVTDSFTGADLKALLYNAQLEALHGMLLSSGLQDGSSSSDSDLSLSSMVFLNHSSGSDDSAGDGECGLDQSLVSLEMSEILPDESKFNMYRLYFGSSYESELGNGTSSDLSSQCLSAPSSMTQDLPGVPGKDQLFSQPPVLRTASQEGCQELTQEQRDQLRADISIIKGRYRSQSGEDESMNQPGPIKTRLAISQSHLMTALGHTRPSISEDDWKNFAELYESFQNPKRRKNQSGTMFRPGQKVTLA

SEQ ID NO: 862519 - protein, 749 aa, Homo sapiens [sequence omitted]

SEQ ID NO: 862520 - protein, 1256 aa, Homo sapiens
MWGSDRLAGAGGGGAAVTVAFTNARDCFLHLPRRLVAQLHLLQNQAIEVVWSHQPAFLSWVEGRHFSDQGENVAEINRQVGQKLGLSNGGQVFLKPCSHVVSCQQVEVEPLSADDWEILELHAVSLEQHLLDQIRIVFPKAIFPVWVDQQTYIFIQIVALIPAASYGRLETDTKLLIQPKTRRAKENTFSKADAEYKKLHSYGRDQKGMMKELQTKQLQSNTVGITESNENESEIPVDSSSVASLWTMIGSIFSFQSEKKQETSWGLTEINAFKNMQSKVVPLDNIFRVCKSQPPSIYNASATSVFHKHCAIHVFPWDQEYFDVEPSFTVTYGKLVKLLSPKQQQSKTKQNVLSPEKEKQMSEPLDQKKIRSDHNEEDEKACVLQVVWNGLEELNNAIKYTKNVEVLHLGKVWIPDDLRKRLNIEMHAVVRITPVEVTPKIPRSLKLQPRENLPKDISEEDIKTVFYSWLQQSTTTMLPLVISEEEFIKLETKDGLKEFSLSIVHSWEKEKDKNIFLLSPNLLQKTTIQVLLDPMVKEENSEEIDFILPFLKLSSLGGVNSLGVSSLEHITHSLLGRPLSRQLMSLVAGLRNGALLLTGGKGSGKSTLAKAICKEAFDKLDAHVERVDCKALRGKRLENIQKTLEVAFSEAVWMQPSVVLLDDLDLIAGLPAVPEHEHSPDAVQSQRLAHALNDMIKEFISMGSLVALIATSQSQQSLHPLLVSAQGVHIFQCVQHIQPPNQEQRCEILCNVIKNKLDCDINKFTDLDLQHVAKETGGFVARDFTVLVDRAIHSRLSRQSISTREKLVLTTLDFQKALRGFLPASLRSVNLHKPRDLGWDKIGGLHEVRQILMDTIQLPAKYPELFANLPIRQRTGILLYGPPGTGKTLLAGVIARESRMNFISVKGPELLSKYIGASEQAVRDIFIRAQAAKPCILFFDEFESIAPRRGHDNTGVTDRVVNQLLTQLDGVEGLQGVYVLAATSRPDLIDPALLRPGRLDKCVYCPPPDQVSRLEILNVLSDSLPLADDVDLQHVASVTDSFTGADLKALLYNAQLEALHGMLLSSGLQDGSSSSDSDLSLSSMVFLNHSSGSDDSAGDGECGLDQSLVSLEMSEILPDESKFNMYRLYFGSSYESELGNGTSSDLSSQCLSAPSSMTQDLPGVPGKDQLFSQPPVLRTASQEGCQELTQEQRDQLRADISIIKGRYRSQSGEDESMNQPGPIKTRLAISQSHLMTALGHTRPSISEDDWKNFAEL

SEQ ID NO: 862521 - protein, 1007 aa, Homo sapiens
LPGPGSFAALGWANPERRSGTMWGSDRLAGAGGGGAAVTVAFTNARDCFLHLPRRLVAQLHLLQNQAIEVVWSHQPAFLSWVEGRHFSDQGENVAEINRQVGQKLGLSNGGQVFLKPCSHVVSCQQVEVEPLSADDWEILELHAVSLEQHLLDQIRIVFPKAIFPVWVDQQTYIFIQIVALIPAASYGRLETDTKLLIQPKTRRAKENTFSKADAEYKKLHSYGRDQKGMMKELQTKQLQSNTVGITESNENESEIPVDSSSVASLWTMIGSIFSFQSEKKQETSWGLTEINAFKNMQSKVVPLDNIFRVCKSQPPSIYNASATSVFHKHCAIHVFPWDQEYFDVEPSFTVTYGKLVKLLSPKQQQSKTKQNVLSPEKEKQMSEPLDQKKIRSDHNEEDEKACVLQVVWNGLEELNNAIKYTKNVEVLHLGKVWIPDDLRKRLNIEMHAVVRITPVEVTPKIPRSLKLQPRENLPKDISEEDIKTVFYSWLQQSTTTMLPLVISEEEFIKLETKDGLKEFSLSIVHSWEKEKDKNIFLLSPNLLQKTTIQVLLDPMVKEENSEEIDFILPFLKLSSLGGVNSLGVSSLEHITHSLLGRPLSRQLMSLVAGLRNGALLLTGGKGSGKSTLAKAICKEAFDKLDAHVERVDCKALRGKRLENIQKTLEVAFSEAVWMQPSVVLLDDLDLIAGLPAVPEHEHSPDAVQSQRLAHALNDMIKEFISMGSLVALIATSQSQQSLHPLLVSAQGVHIFQCVQHIQPPNQEQRCEILCNVIKNKLDCDINKFTDLDLQHVAKETGGFVARDFTVLVDRAIHSRLSRQSISTREKLVLTTLDFQKALRGFLPASLRSVNLHKPRDLGWDKIGGLHEVRQILMDTIQLPAKYPELFANLPIRQRTGILLYGPPGTGKTLLAGVIARESRMNFISVKGPELLSKYIGASEQAVRDIFIRAQAAKPCILFFDEFESIAPRRGHDNTGVTDRVVNQLLTQLDGVEGLQGNNYKYRNRML

SEQ ID NO: 862522 - protein, 831 aa, Homo sapiens
LPGPGSFAALGWANPERRSGTMWGSDRLAGAGGGGAAVTVAFTNARDCFLHLPRRLVAQLHLLQNQAIEVVWSHQPAFLSWVEGRHFSDQGENVAEINRQVGQKLGLSNGGQVFLKPCSHVVSCQQVEVEPLSADDWEILELHAVSLEQHLLDQIRIVFPKAIFPVWVDQQTYIFIQIVALIPAASYGRLETDTKLLIQPKTRRAKENTFSKADAEYKKLHSYGRDQKGMMKELQTKQLQSNTVGITESNENESEIPVDSSSVASLWTMIGSIFSFQSEKKQETSWGLTEINAFKNMQSKVVPLDNIFRVCKSQPPSIYNASATSVFHKHCAIHVFPWDQEYFDVEPSFTVTYGKLVKLLSPKQQQSKTKQNVLSPEKEKQMSEPLDQKKIRSDHNEEDEKACVLQVVWNGLEELNNAIKYTKNVEVLHLGKVWIPDDLRKRLNIEMHAVVRITPVEVTPKIPRSLKLQPRENLPKDISEEDIKTVFYSWLQQSTTTMLPLVISEEEFIKLETKDGLKEFSLSIVHSWEKEKDKNIFLLSPNLLQKTTIQVLLDPMVKEENSEEIDFILPFLKLSSLGGVNSLGVSSLEHITHSLLGRPLSRQLMSLVAGLRNGALLLTGGKGSGKSTLAKAICKEAFDKLDAHVERVDCKALRGKRLENIQKTLEVAFSEAVWMQPSVVLLDDLDLIAGLPAVPEHEHSPDAVQSQRLAHALNDMIKEFISMGSLVALIATSQSQQSLHPLLVSAQGVHIFQCVQHIQPPNQEQRCEILCNVIKNKLDCDINKFTDLDLQHVAKETGGFVARDFTVLVDRAIHSRLSRQSISTRESMFYY

SEQ ID NO: 862523 - protein, 448 aa, Homo sapiens
LPGPGSFAALGWANPERRSGTMWGSDRLAGAGGGGAAVTVAFTNARDCFLHLPRRLVAQLHLLQNQAIEVVWSHQPAFLSWVEGRHFSDQGENVAEINRQVGQKLGLSNGGQVFLKPCSHVVSCQQVEVEPLSADDWEILELHAVSLEQHLLDQIRIVFPKAIFPVWVDQQTYIFIQIVALIPAASYGRLETDTKLLIQPKTRRAKENTFSKADAEYKKLHSYGRDQKGMMKELQTKQLQSNTVGITESNENESEIPVDSSSVASLWTMIGSIFSFQSEKKQETSWGLTEINAFKNMQSKVVPLDNIFRVCKSQPPSIYNASATSVFHKHCAIHVFPWDQEYFDVEPSFTVTYGKLVKLLSPKQQQSKTKQNVLSPEKEKQMSEPLDQKKIRSDHNEEDEKACVLQVVWNGLEELNNAIKYTKNVEVLHLGKVWVSINFITWEKFYVA

SEQ ID NO: 862524 - protein, 1304 aa, Homo sapiens; identical to SEQ ID NO: 862516

SEQ ID NO: 862525 - protein, 1304 aa, Homo sapiens; identical to SEQ ID NO: 862516

SEQ ID NO: 862526 - protein, 1243 aa, Homo sapiens
LPGPGSFAALGWANPERRSGTMWGSDRLAGAGGGGAAVTVAFTNARDCFLHLPRRLVAQLHLLQNQAIEVVWSHQPAFLSWVEGRHFSDQGENVAEINRQVGQKLGLSNGGQVFLKPCSHVVSCQQVEVEPLSADDWEILELHAVSLEQHLLDQIRIVFPKAIFPVWVDQQTYIFIQIVALIPAASYGRLETDTKLLIQPKTRRAKENTFSKADAEYKKLHSYGRDQKGMMKELQTKQLQSNTVGITESNENESEIPVDSSSVASLWTMIGSIFSFQSEKKQETSWGLTEINAFKNMQSKVVPLDNIFRVCKSQPPSIYNASATSVFHKHCAIHVFPWDQEYFDVEPSFTVTYGKLVKLLSPKQQQSKTKQNVLSPEKEKQMSEPLDQKKIRSDHNEEDEKACVLQVVWNGLEELNNAIKYTKNVEVLHLGKVWIPDDLRKRLNIEMHAVVRITPVEVTPKIPRSLKLQPRENLPKDISEEDIKTVFYSWLQQSTTTMLPLVISEEEFIKLETKDGLKEFSLSIVHSWEKEKDKNIFLLSPNLLQKTTIQVLLDPMVKEENSEEIDFILPFLKLSSLGGVNSLGVSSLEHITHSLLGRPLSRQLMSLVAGLRNGALLLTGGKGSGKSTLAKAICKEAFDKLDAHVERVDCKALRGKRLENIQKTLEVAFSEAVWMQPSVVLLDDLDLIAGLPAVPEHEHSPDAVQSQRLAHALNDMIKEFISMGSLVALIATSQSQQSLHPLLVSAQGVHIFQCVQHIQPPNQEQRCEILCNVIKNKLDCDINKFTDLDLQHVAKETGGFVARDFTVLVDRAIHSRLSRQSISTREKLVLTTLDFQKALRGFLPASLRSVNLHKPRDLGWDKIGGLHEVRQILMDTIQLPAKYPELFANLPIRQRTGILLYGPPGTGKTLLAGVIARESRMNFISVKGPELLSKYIGASEQAVRDIFIRAQAAKPCILFFDEFESIAPRRGHDNTGVTDRVVNQLLTQLDGVEGLQGVYVLAATSRPDLIDPALLRPGRLDKCVYCPPPDQVSRLEILNVLSDSLPLADDVDLQHVASVTDSFTGADLKALLYNAQLEALHGMLLSSGLQDGSSSSDSDLSLSSMVFLNHSSGSDDSAGDGECGLDQSLVSLEMSEILPDESKFNMYRLYFGSSYESELGNGTSSDLSSQCLSAPSSMTQDLPGVPGKDQLFSQPPVLRTASQEGCQELTQEQRDQLRADISIIKGRYRSQSGVWLFPPHYNC

SEQ ID NO: 862527 - protein, 222 aa, Homo sapiens
MLLSSGLQDGSSSSDSDLSLSSMVFLNHSSGSDDSAGDGECGLDQSLVSLEMSEILPDESKFNMYRLYFGSSYESELGNGTSSDLSSQCLSAPSSMTQDLPGVPGKDQLFSQPPVLRTASQEGCQELTQEQRDQLRADISIIKGRYRSQSGEDESMNQPGPIKTRLAISQSHLMTALGHTRPSISEDDWKNFAELYESFQNPKRRKNQSGTMFRPGQKVTLA

SEQ ID NO: 862528 - protein, 1056 aa, Homo sapiens
LPGPGSFAALGWANPERRSGTMWGSDRLAGAGGGGAAVTVAFTNARDCFLHLPRRLVAQLHLLQNQAIEVVWSHQPAFLSWVEGRHFSDQGENVAEINRQVGQKLGLSNGGQVFLKPCSHVVSCQQVEVEPLSADDWEILELHAVSLEQHLLDQIRIVFPKAIFPVWVDQQTYIFIQIVALIPAASYGRLETDTKLLIQPKTRRAKENTFSKADAEYKKLHSYGRDQKGMMKELQTKQLQSNTVGITESNENESEIPVDSSSVASLWTMIGSIFSFQSEKKQETSWGLTEINAFKNMQSKVVPLDNIFRVCKSQPPSIYNASATSVFHKHCAIHVFPWDQEYFDVEPSFTVTYGKLVKLLSPKQQQSKTKQNVLSPEKEKQMSEPLDQKKIRSDHNEEDEKACVLQVVWNGLEELNNAIKYTKNVEVLHLGKVWIPDDLRKRLNIEMHAVVRITPVEVTPKIPRSLKLQPRENLPKDISEEDIKTVFYSWLQQSTTTMLPLVISEEEFIKLETKDGLKEFSLSIVHSWEKEKDKNIFLLSPNLLQKTTIQVLLDPMVKEENSEEIDFILPFLKLSSLGGVNSLGVSSLEHITHSLLGRPLSRQLMSLVAGLRNGALLLTGGKGSGKSTLAKAICKEAFDKLDAHVERVDCKALRGKRLENIQKTLEVAFSEAVWMQPSVVLLDDLDLIAGLPAVPEHEHSPDAVQSQRLAHALNDMIKEFISMGSLVALIATSQSQQSLHPLLVSAQGVHIFQCVQHIQPPNQEQRCEILCNVIKNKLDCDINKFTDLDLQHVAKETGGFVARDFTVLVDRAIHSRLSRQSISTREKLVLTTLDFQKALRGFLPASLRSVNLHKPRDLGWDKIGGLHEVRQILMDTIQLPAKYPELFANLPIRQRTGILLYGPPGTGKTLLAGVIARESRMNFISVKGPELLSKYIGASEQAVRDIFIRAQAAKPCILFFDEFESIAPRRGHDNTGVTDRVVNQLLTQLDGVEGLQGVYVLAATSRPDLIDPALLRPGRLDKCVYCPPPDQVTISYLESKTQQMLHSFLVSFTSAR

SEQ ID NO: 862529 - protein, 1098 aa, Homo sapiens
LPGPGSFAALGWANPERRSGTMWGSDRLAGAGGGGAAVTVAFTNARDCFLHLPRRLVAQLHLLQNQAIEVVWSHQPAFLSWVEGRHFSDQGENVAEINRQVGQKLGLSNGGQVFLKPCSHVVSCQQVEVEPLSADDWEILELHAVSLEQHLLDQIRIVFPKAIFPVWVDQQTYIFIQIVALIPAASYGRLETDTKLLIQPKTRRAKENTFSKADAEYKKLHSYGRDQKGMMKELQTKQLQSNTVGITESNENESEIPVDSSSVASLWTMIGSIFSFQSEKKQETSWGLTEINAFKNMQSKVVPLDNIFRVCKSQPPSIYNASATSVFHKHCAIHVFPWDQEYFDVEPSFTVTYGKLVKLLSPKQQQSKTKQNVLSPEKEKQMSEPLDQKKIRSDHNEEDEKACVLQVVWNGLEELNNAIKYTKNVEVLHLGKVWIPDDLRKRLNIEMHAVVRITPVEVTPKIPRSLKLQPRENLPKDISEEDIKTVFYSWLQQSTTTMLPLVISEEEFIKLETKDGLKEFSLSIVHSWEKEKDKNIFLLSPNLLQKTTIQVLLDPMVKEENSEEIDFILPFLKLSSLGGVNSLGVSSLEHITHSLLGRPLSRQLMSLVAGLRNGALLLTGGKGSGKSTLAKAICKEAFDKLDAHVERVDCKALRGKRLENIQKTLEVAFSEAVWMQPSVVLLDDLDLIAGLPAVPEHEHSPDAVQSQRLAHALNDMIKEFISMGSLVALIATSQSQQSLHPLLVSAQGVHIFQCVQHIQPPNQEQRCEILCNVIKNKLDCDINKFTDLDLQHVAKETGGFVARDFTVLVDRAIHSRLSRQSISTREKLVLTTLDFQKALRGFLPASLRSVNLHKPRDLGWDKIGGLHEVRQILMDTIQLPAKYPELFANLPIRQRTGILLYGPPGTGKTLLAGVIARESRMNFISVKGPELLSKYIGASEQAVRDIFIRAQAAKPCILFFDEFESIAPRRGHDNTGVTDRVVNQLLTQLDGVEGLQGVYVLAATSRPDLIDPALLRPGRLDKCVYCPPPDQVSRLEILNVLSDSLPLADDVDLQHVASVTDSFTGADLKALLYNAQLEALHGMLLSSGLQASYMRKLL

SEQ ID NO: 862530 - protein, 846 aa, Homo sapiens
  misc_feature (829)..(829): Xaa can be any naturally occurring amino acid
  misc_feature (833)..(833): Xaa can be any naturally occurring amino acid
LPGPGSFAALGWANPERRSGTMWGSDRLAGAGGGGAAVTVAFTNARDCFLHLPRRLVAQLHLLQNQAIEVVWSHQPAFLSWVEGRHFSDQGENVAEINRQVGQKLGLSNGGQVFLKPCSHVVSCQQVEVEPLSADDWEILELHAVSLEQHLLDQIRIVFPKAIFPVWVDQQTYIFIQIVALIPAASYGRLETDTKLLIQPKTRRAKENTFSKADAEYKKLHSYGRDQKGMMKELQTKQLQSNTVGITESNENESEIPVDSSSVASLWTMIGSIFSFQSEKKQETSWGLTEINAFKNMQSKVVPLDNIFRVCKSQPPSIYNASATSVFHKHCAIHVFPWDQEYFDVEPSFTVTYGKLVKLLSPKQQQSKTKQNVLSPEKEKQMSEPLDQKKIRSDHNEEDEKACVLQVVWNGLEELNNAIKYTKNVEVLHLGKVWIPDDLRKRLNIEMHAVVRITPVEVTPKIPRSLKLQPRENLPKDISEEDIKTVFYSWLQQSTTTMLPLVISEEEFIKLETKDGLKEFSLSIVHSWEKEKDKNIFLLSPNLLQKTTIQVLLDPMVKEENSEEIDFILPFLKLSSLGGVNSLGVSSLEHITHSLLGRPLSRQLMSLVAGLRNGALLLTGGKGSGKSTLAKAICKEAFDKLDAHVERVDCKALRGKRLENIQKTLEVAFSEAVWMQPSVVLLDDLDLIAGLPAVPEHEHSPDAVQSQRLAHALNDMIKEFISMGSLVALIATSQSQQSLHPLLVSAQGVHIFQCVQHIQPPNQEQRCEILCNVIKNKLDCDINKFTDLDLQHVAKETGGFVARDFTVLVDRAIHSRLSRQSISTREKIXFEKXLEFPKKGPPRNYF

SEQ ID NO: 862531 - protein, 1208 aa, Homo sapiens
SSWPGREKGLERAWPLRGMEGTEAAAAKPAGGSPQGPKTGSGTASPVEGTSAVEWSGPEPQLDNGHPPRPWPCPQENRTSSLMAPQPPRVWGVQLQGPSVLESKVRALKEKMTVAKQGVSPCSASQEWSSPKKPQCRRGKAGRAGTPSEGSFLPGAVVAPRTQNLPDGQLDGSINEEQPARDGGPRLPRPPAPGREYCNRGSPWPPEAEWTLPDHDRGPLLGPSSLQQSPIHGVTPGRPGGPGHCNKIIHIPSPRTGRSYPFPDGVVTEADLDSTSLTSEEVFVPRTALLGERWRAGDLEALGAGSSVLSLSDRVERNRLLLQEMLNVSGQSPRKVGTPAWTPSWDTAAPERPVGDVDWASGTSLQDSGQNRTVGPNPEPVLSPRHEEATHLLQRARMKARTRPLRASHDIVPTITQGSRDGHRSPARDPRTTPACRDSLQNGHTSDSSSGESSGGHRPRRGPSPSHVRFEDESAREAEFRHLERLQQRQRQVLSTVLQAADQGPLRSKPDLADYINGAPRLRDAGQGTFHRLVGSLDRRGHPAPPAPGSERRCQACGSCIDDPRPAQGKAPPVPRTLQELQAACGMERVLGGLSSPLRLLPAEPRLHMEWIRETHIGDTVCPAEVDSALDSTDNSDNCRTDSEEAGTSQAGWACGRTQGSSPRLRLRGSRPRGHRWSKKAEAELPWGLQAQQHLPRADDVEVENEVKEGRGHTPEGTLFLREDAKPPDLELKRVSLGPQWQPGPGLGSHQPHPLDSRTPCRTAYATTAPMTPESSGPGGQAQVTESHESLEIVSPSSLQQSHAEPSAPHQAWQPTASLCPEGWAPTPPPSRKTTSPVSHRKAALAGLLRLGDQTEPVGIPRPPSRSAVLRTCELPPSQTQPSRPQVRHPLLALSTNNCNNSAPRGLQEPYGGAVHEGRVERGPCSREPEPPLENSRDGGPQGFLGSADVATINSTGITLSLSSEESESSKESEGSLQRTGSGSGGHVLSRASAGAGTGPGSPSAAPLDQNKKRSSSIASTLGLKKLFSALGQSSRPKLGKSRSYSVEQLQPAPPGLTSQSRAPSLQSLHPVSPSHQRRKAASFQNLHSLLSSKGDRSSLYLVAGPGDHSAAGRPAKTSPRRALSVEDVGAPSLARTVGRLVEVFPDGTSQLQLQRSPGGTFGFCVASGNGRPDSGMPSPLPQPHGWGGLSKQGRAFWLWSEAFLVFG

SEQ ID NO: 862532 - protein, 1239 aa, Homo sapiens
SSWPGREKGLERAWPLRGMEGTEAAAAKPAGGSPQGPKTGSGTASPVEGTSAVEWSGPEPQLDNGHPPRPWPCPQENRTSSLMAPQPPRVWGVQLQGPSVLESKVRALKEKMTVAKQGVSPCSASQEWSSPKKPQCRRGKAGRAGTPSEGSFLPGAVVAPRTQNLPDGQLDGSINEEQPARDGGPRLPRPPAPGREYCNRGSPWPPEAEWTLPDHDRGPLLGPSSLQQSPIHGVTPGRPGGPGHCNKIIHIPSPRTGRSYPFPDGVVTEADLDSTSLTSEEVFVPRTALLGERWRAGDLEALGAGSSVLSLSDRVERNRLLLQEMLNVSGQSPRKVGTPAWTPSWDTAAPERPVGDVDWASGTSLQDSGQNRTVGPNPEPVLSPRHEEATHLLQRARMKARTRPLRASHDIVPTITQGSRDGHRSPARDPRTTPACRDSLQNGHTSDSSSGESSGGHRPRRGPSPSHVRFEDESAREAEFRHLERLQQRQRQVLSTVLQAADQGPLRSKPDLADYINGAPRLRDAGQGTFHRLVGSLDRRGHPAPPAPGSERRCQACGSCIDDPRPAQGKAPPVPRTLQELQAACGMERVLGGLSSPLRLLPAEPRLHMEWIRETHIGDTVCPAEVDSALDSTDNSDNCRTDSEEAGTSQAGWACGRTQGSSPRLRLRGSRPRGHRWSKKAEAELPWGLQAQQHLPRADDVEVENEVKEGRGHTPEGTLFLREDAKPPDLELKRVSLGPQWQPGPGLGSHQPHPLDSRTPCRTAYATTAPMTPESSGPGGQAQVTESHESLEIVSPSSLQQSHAEPSAPHQAWQPTASLCPEGWAPTPPPSRKTTSPVSHRKAALAGLLRLGDQTEPVGIPRPPSRSAVLRTCELPPSQTQPSRPQVRHPLLALSTNNCNNSAPRGLQEPYGGAVHEGRVERGPCSREPEPPLENSRDGGPQGFLGSADVATINSTGITLSLSSEESESSKESEGSLQRTGSGSGGHVLSRASAGAGTGPGSPSAAPLDQNKKRSSSIASTLGLKKLFSALGQSSRPKLGKSRSYSVEQLQPAPPGLTSQSRAPSLQSLHPVSPSHQRRKAASFQNLHSLLSSKGDRSSLYLVAGPGDHSAAGRPAKTSPRRALSVEDVGAPSLARTVGRLVEVFPDGTSQLQLQRSPGGTFGFCVASGNGRPDSGIYVQEMADMSMAKLYSGLLGVGDEILEVNGAKVAGLGLAHIKELLAHSESLSIRVLRQRPVPR

SEQ ID NO: 862533 - protein, 720 aa, Homo sapiens
SSWPGREKGLERAWPLRGMEGTEAAAAKPAGGSPQGPKTGSGTASPVEGTSAVEWSGPEPQLDNGHPPRPWPCPQENRTSSLMAPQPPRVWGVQLQGPSVLESKVRALKEKMTVAKQGVSPCSASQEWSSPKKPQCRRGKAGRAGTPSEGSFLPGAVVAPRTQNLPDGQLDGSINEEQPARDGGPRLPRPPAPGREYCNRGSPWPPEAEWTLPDHDRGPLLGPSSLQQSPIHGVTPGRPGGPGHCNKIIHIPSPRTGRSYPFPDGVVTEADLDSTSLTSEEVFVPRTALLGERWRAGDLEALGAGSSVLSLSDRVERNRLLLQEMLNVSGQSPRKVGTPAWTPSWDTAAPERPVGDVDWASGTSLQDSGQNRTVGPNPEPVLSPRHEEATHLLQRARMKARTRPLRASHDIVPTITQGSRGPQGFLGSADVATINSTGITLSLSSEESESSKESEGSLQRTGSGSGGHVLSRASAGAGTGPGSPSAAPLDQNKKRSSSIASTLGLKKLFSALGQSSRPKLGKSRSYSVEQLQPAPPGLTSQSRAPSLQSLHPVSPSHQRRKAASFQNLHSLLSSKGDRSSLYLVAGPGDHSAAGRPAKTSPRRALSVEDVGAPSLARTVGRLVEVFPDGTSQLQLQRSPGGTFGFCVASGNGRPDSGIYVQEMADMSMAKLYSGLLGVGDEILEVNGAKVAGLGLAHIKELLAHSESLSIRVLRQRPVPR

SEQ ID NO: 862534 - protein, 218 aa, Homo sapiens
MVVPVEFLEAMIKACAVTFLQGPQVHGGAKSSVSTSQVAFLTRNIVPFSSGVTLSPASESCLFSEPPFSAEQQGGPVQPLPGSRARGPQCSWQAGQDFTTACPQCGGVGAPSLARTVGRLVEVFPDGTSQLQLQRSPGGTFGFCVASGNGRPDSGIYVQEMADMSMAKLYSGLLGVGDEILEVNGAKVAGLGLAHIKELLAHSESLSIRVLRQRPVPR

SEQ ID NO: 862535 - protein, 623 aa, Homo sapiens
MTAQSRSPTTPTFPGPSQRTPLTPCPVQTPRLGKALIHCWTDPGQPLGEQQRVRRQRTETSEPTMRLHRLRARLSAVACGLLLLLVRGQGQDSASPIRTTHTGQVLGSLVHVKGANAGVQTFLGIPFAKPPLGPLRFAPPEPPESWSGVRDGTTHPAMCLQDLTAVESEFLSQFNMTFPSDSMSEDCLYLSIYTPAHSHEGSNLPVMVWIHGGALVFGMASLYDGSMLAALENVVVVIIQYRLGVLGFFSTGDKHATGNWGYLDQVAALRWVQQNIAHFGGNPDRVTIFGESAGGTSVSSLVVSPISQGLFHGAIMESGVALLPGLIASSADVISTVVANLSACDQVDSEALVGCLRGKSKEEILAINKPFKMIPGVVDGVFLPRHPQELLASADFQPVPSIVGVNNNEFGWLIPKVMRIYDTQKEMDREASQAALQKMLTLLMLPPTFGDLLREEYIGDNGDPQTLQAQFQEMMADSMFVIPALQVAHFQCSRAPVYFYEFQHQPSWLKNIRPPHMKADHGDELPFVFRSFFGGNYIKFTEEEEQLSRKMMKYWANFARNGNPNGEGLPHWPLFDQEEQYLQLNLQPAVGRALKAHRLQFWKKALPQKIQELEEPEERHTEL

SEQ ID NO: 862536 - protein, 592 aa, Homo sapiens
EPRPADTLLFDPGQPLGEQQRVRRQRTETSEPTMRLHRLRARLSAVACGLLLLLVRGQGQDSASPIRTTHTGQVLGSLVHVKGANAGVQTFLGIPFAKPPLGPLRFAPPEPPESWSGVRDGTTHPAMCLQDLTAVESEFLSQFNMTFPSDSMSEDCLYLSIYTPAHSHEGSNLPVMVWIHGGALVFGMASLYDGSMLAALENVVVVIIQYRLGVLGFFSTGDKHATGNWGYLDQVAALRWVQQNIAHFGGNPDRVTIFGESAGGTSVSSLVVSPISQGLFHGAIMESGVALLPGLIASSADVISTVVANLSACDQVDSEALVGCLRGKSKEEILAINKPFKMIPGVVDGVFLPRHPQELLASADFQPVPSIVGVNNNEFGWLIPKVMRIYDTQKEMDREASQAALQKMLTLLMLPPTFGDLLREEYIGDNGDPQTLQAQFQEMMADSMFVIPALQVAHFQCSRAPVYFYEFQHQPSWLKNIRPPHMKADHGDELPFVFRSFFGGNYIKFTEEEEQLSRKMMKYWANFARNGNPNGEGLPHWPLFDQEEQYLQLNLQPAVGRALKAHRLQFWKKALPQKIQELEEPEERHTEL

SEQ ID NO: 862537 - protein, 678 aa, Homo sapiens
MTAQSRSPTTPTFPGPSQRTPLTPCPVQTPRLGKALIHCWTDPGQPLGEQQRVRRQRTETSEPTMRLHRLRARLSAVACGLLLLLVRGQGEAPSEGRQGPGSDLPNAAEAEPDSAGGQAAWEVGAGGDDSVELVSPTQRLPAAQGQDSASPIRTTHTGQVLGSLVHVKGANAGVQTFLGIPFAKPPLGPLRFAPPEPPESWSGVRDGTTHPAMCLQDLTAVESEFLSQFNMTFPSDSMSEDCLYLSIYTPAHSHEGSNLPVMVWIHGGALVFGMASLYDGSMLAALENVVVVIIQYRLGVLGFFSTGDKHATGNWGYLDQVAALRWVQQNIAHFGGNPDRVTIFGESAGGTSVSSLVVSPISQGLFHGAIMESGVALLPGLIASSADVISTVVANLSACDQVDSEALVGCLRGKSKEEILAINKPFKMIPGVVDGVFLPRHPQELLASADFQPVPSIVGVNNNEFGWLIPKVMRIYDTQKEMDREASQAALQKMLTLLMLPPTFGDLLREEYIGDNGDPQTLQAQFQEMMADSMFVIPALQVAHFQCSRAPVYFYEFQHQPSWLKNIRPPHMKADHGDELPFVFRSFFGGNYIKFTEEEEQLSRKMMKYWANFARNGNPNGEGLPHWPLFDQEEQYLQLNLQPAVGRALKAHRLQFWKKALPQKIQELEEPEERHTEL

SEQ ID NO: 862538 - protein, 748 aa, Homo sapiens
MTAQSRSPTTPTFPGPSQRTPLTPCPVQTPRLGKALIHCWTDPGQPLGEQQRVRRQRTETSEPTMRLHRLRARLSAVACGLLLLLVRGQGQDSASPIRTTHTGQVLGSLVHVKGANAGVQTFLGIPFAKPPLGPLRFAPPEPPESWSGVRDGTTHPAMCLQDLTAVESEFLSQFNMTFPSDSMSEDCLYLSIYTPAHSHEGSNLPVMVWIHGGALVFGMASLYDGSMLAALENVVVVIIQYRLGVLGFFSTGDKHATGNWGYLDQVAALRWVQQNIAHFGGNPDRVTIFGESAGGTSVSSLVVSPISQGLFHGAIMESGVALLPGLIASSADVISTVVANLSACDQVDSEALVGCLRGKSKEEILAINKPFKMIPGVVDGVFLPRHPQELLASADFQPVPSIVGVNNNEFGWLIPKVSPNPSPQVPGEPIWYGGCSGLHSSRLIPSPATDSLLAIQVMRIYDTQKEMDREASQAALQKMLTLLEGSWGPSPMETGSSPVLRQRKFNPQIPFLCSDPHEQRPGCVCLGVGSPQSLAFAPPSCAIPKPETTSSLPLASSLTCLFLIHLGEMLPPTFGDLLREEYIGDNGDPQTLQAQFQEMMADSMFVIPALQVAHFQCSRAPVYFYEFQHQPSWLKNIRPPHMKADHGDELPFVFRSFFGGNYIKFTEEEEQLSRKMMKYWANFARNGNPNGEGLPHWPLFDQEEQYLQLNLQPAVGRALKAHRLQFWKKALPQKIQELEEPEERHTEL

SEQ ID NO: 862539 - protein, 607 aa, Homo sapiens
MTAQSRSPTTPTFPGPSQRTPLTPCPVQTPRLGKALIHCWTDPGQPLGEQQRVRRQRTETSEPTMRLHRLRARLSAVACGLLLLLVRGQGQDSASPIRTTHTGQVLGSLVHVKGANAGVQTFLGIPFAKPPLGPLRFAPPEPPESWSGVRDGTTHPAMCLQDLTAVESEFLSQFNMTFPSDSMSEDCLYLSIYTPAHSHEGSNLPVMVWIHGGALVFGMASLYDGSMLAALENVVVVIIQYRLGVLGFFSTGDKHATGNWGYLDQVAALRWVQQNIAHFGGNPDRVTIFGESAGGTSVSSLVVSPISQGLFHGAIMESGVALLPGLIASSADVISTVVANLSACDQVDSEALVGCLRGKSKEEILAINKPFKMIPGVVDGVFLPRHPQELLASADFQPVPSIVGVNNNEFGWLIPKVMRIYDTQKEMDREASQAALQKMLTLLMLPPTFGDLLREEYIGDNGDPQTLQAQFQEMMADSMFVIPALQVAHFQCSRAPVYFYEFQHQPSWLKNIRPPHMKADHVKFTEEEEQLSRKMMKYWANFARNGNPNGEGLPHWPLFDQEEQYLQLNLQPAVGRALKAHRLQFWKKALPQKIQELEEPEERHTEL

SEQ ID NO: 862540 - protein, 562 aa, Homo sapiens
MTAQSRSPTTPTFPGPSQRTPLTPCPVQTPRLGKALIHCWTDPGQPLGEQQRVRRQRTETSEPTMRLHRLRARLSAVACGLLLLLVRGQGQDSASPIRTTHTGQVLGSLVHVKGANAGVQTFLGIPFAKPPLGPLRFAPPEPPESWSGVRDGTTHPAMCLQDLTAVESEFLSQFNMTFPSDSMSEDCLYLSIYTPAHSHEGSNLPVMVWIHGGALVFGMASLYDGSMLAALENVVVVIIQYRLGVLGFFSTGDKHATGNWGYLDQVAALRWVQQNIAHFGGNPDRVTIFGESAGGTSVSSLVVSPISQGLFHGAIMESGVALLPGLIASSADVISTVVANLSACDQVDSEALVGCLRGKSKEEILAINKPFKMIPGVVDGVFLPRHPQELLASADFQPVPSIVGVNNNEFGWLIPKVMRIYDTQKEMDREASQAALQKMLTLLMLPPTFGDLLREEYIGDNGDPQTLQAQFQEMMADSMFVIPALQVAHFQCSRAPVYFYEFQHQPSWLKNIRPPHMKADHGDELPFVFRSFFGGNYIKFTEEEEQLSRKMMKYWANFARNG

SEQ ID NO: 862541 - protein, 137 aa, Homo sapiens
MGEARSLQGAGATVSWAVHPTGSRAPVYFYEFQHQPSWLKNIRPPHMKADHVKFTEEEEQLSRKMMKYWANFARNGNPNGEGLPHWPLFDQEEQYLQLNLQPAVGRALKAHRLQFWKKALPQKIQELEEPEERHTEL

SEQ ID NO: 862542 - protein, 158 aa, Homo sapiens
MTAQSRSPTTPTFPGPSQRTPLTPCPVQTPRLGKALIHCWTDPGQPLGEQQRVRRQRTETSEPTMRLHRLRARLSAVACGLLLLLVRGQGQDSASPIRTTHTGQVLGSLVHVKGANAGVQTFLGIPFAKPPLGPLRFAPPEPLPSSPPPSPCLLSSLV

SEQ ID NO: 862543 - protein, 623 aa, Homo sapiens; identical to SEQ ID NO: 862535

SEQ ID NO: 862544 - protein, 623 aa, Homo sapiens; identical to SEQ ID NO: 862535

SEQ ID NO: 862545 - protein, 597 aa, Homo sapiens
  misc_feature (3)..(3): Xaa can be any naturally occurring amino acid
TVXAYWKLKKKKRKNDPGQPLGEQQRVRRQRTETSEPTMRLHRLRARLSAVACGLLLLLVRGQGQDSASPIRTTHTGQVLGSLVHVKGANAGVQTFLGIPFAKPPLGPLRFAPPEPPESWSGVRDGTTHPAMCLQDLTAVESEFLSQFNMTFPSDSMSEDCLYLSIYTPAHSHEGSNLPVMVWIHGGALVFGMASLYDGSMLAALENVVVVIIQYRLGVLGFFSTGDKHATGNWGYLDQVAALRWVQQNIAHFGGNPDRVTIFGESAGGTSVSSLVVSPISQGLFHGAIMESGVALLPGLIASSADVISTVVANLSACDQVDSEALVGCLRGKSKEEILAINKPFKMIPGVVDGVFLPRHPQELLASADFQPVPSIVGVNNNEFGWLIPKVMRIYDTQKEMDREASQAALQKMLTLLMLPPTFGDLLREEYIGDNGDPQTLQAQFQEMMADSMFVIPALQVAHFQCSRAPVYFYEFQHQPSWLKNIRPPHMKADHGDELPFVFRSFFGGNYIKFTEEEEQLSRKMMKYWANFARNGNPNGEGLPHWPLFDQEEQYLQLNLQPAVGRALKAHRLQFWKKALPQKIQELEEPEERHTEL

SEQ ID NO: 862546 - protein, 466 aa, Homo sapiens
MCLQDLTAVESEFLSQFNMTFPSDSMSEDCLYLSIYTPAHSHEGSNLPVMVWIHGGALVFGMASLYDGSMLAALENVVVVIIQYRLGVLGFFSTGDKHATGNWGYLDQVAALRWVQQNIAHFGGNPDRVTIFGESAGGTSVSSLVVSPISQGLFHGAIMESGVALLPGLIASSADVISTVVANLSACDQVDSEALVGCLRGKSKEEILAINKPFKMIPGVVDGVFLPRHPQELLASADFQPVPSIVGVNNNEFGWLIPKVMRIYDTQKEMDREASQAALQKMLTLLMLPPTFGDLLREEYIGDNGDPQTLQAQFQEMMADSMFVIPALQVAHFQCSRAPVYFYEFQHQPSWLKNIRPPHMKADHGDELPFVFRSFFGGNYIKFTEEEEQLSRKMMKYWANFARNGNPNGEGLPHWPLFDQEEQYLQLNLQPAVGRALKAHRLQFWKKALPQKIQELEEPEERHTEL

SEQ ID NO: 862547 - protein, 623 aa, Homo sapiens; identical to SEQ ID NO: 862535

SEQ ID NO: 862548 - protein, 468 aa, Homo sapiens
MTAQSRSPTTPTFPGPSQRTPLTPCPVQTPRLGKALIHCWTDPGQPLGEQQRVRRQRTETSEPTMRLHRLRARLSAVACGLLLLLVRGQGQDSASPIRTTHTGQVLGSLVHVKGANAGVQTFLGIPFAKPPLGPLRFAPPEPPESWSGVRDGTTHPAMCLQDLTAVESEFLSQFNMTFPSDSMSEDCLYLSIYTPAHSHEGSNLPVMVWIHGGALVFGMASLYDGSMLAALENVVVVIIQYRLGVLGFFSTGDKHATGNWGYLDQVAALRWVQQNIAHFGGNPDRVTIFGESAGGTSVSSLVVSPISQGLFHGAIMESGVALLPGLIASSADVISTVVANLSACDQVDSEALVGCLRGKSKEEILAINKPFKMIPGVVDGVFLPRHPQELLASADFQPVPSIVGVNNNEFGWLIPKVMRIYDTQKEMDREASQAALQKMLTLLVPGPLCTSTSSSISPAGSRTSGHRT

SEQ ID NO: 862549 - protein, 279 aa, Homo sapiens
MLSPANGEQLHLVNYVEDYLDSIESLPFDLQRNVSLMREIDAKYQEILKELDECYERFSRETDGAQKRRMLHCVQRALIRSQELGDEKIQIVSQMVELVENRTRQVDSHVELFEAQQELGDTAGNSGKAGADRPKGEAAAQADKPNSKRSRRQRNNENRENASSNHDHDDGASGTPKEKKAKTSKKKKRSKAKAEREASPADLPIDPNEPTYCLCNQVSYGEMIGCDNDECPIEWFHFSCVGLNHKPKGKWYCPKCRGENEKTMDKALEKSKKERAYNR

SEQ ID NO: 862550 - protein, 299 aa, Homo sapiens
SNPIICRCARRREFPDIAVAVIPGLWARGRGCSSDRLPRPAGPARRQFQAASLLTRGWGRAWPWKQILKELDECYERFSRETDGAQKRRMLHCVQRALIRSQELGDEKIQIVSQMVELVENRTRQVDSHVELFEAQQELGDTAGNSGKAGADRPKGEAAAQADKPNSKRSRRQRNNENRENASSNHDHDDGASGTPKEKKAKTSKKKKRSKAKAEREASPADLPIDPNEPTYCLCNQVSYGEMIGCDNDECPIEWFHFSCVGLNHKPKGKWYCPKCRGENEKTMDKALEKSKKERAYNR

SEQ ID NO: 862551 - protein, 279 aa, Homo sapiens; identical to SEQ ID NO: 862549

SEQ ID NO: 862552 - protein, 210 aa, Homo sapiens
MLHCVQRALIRSQELGDEKIQIVSQMVELVENRTRQVDSHVELFEAQQELGDTAGNSGKAGADRPKGEAAAQADKPNSKRSRRQRNNENRENASSNHDHDDGASGTPKEKKAKTSKKKKRSKAKAEREASPADLPIDPNEPTYCLCNQVSYGEMIGCDNDECPIEWFHFSCVGLNHKPKGKWYCPKCRGENEKTMDKALEKSKKERAYNR

SEQ ID NO: 862553 - protein, 230 aa, Homo sapiens
MLSPANGEQLHLVNYVEDYLDSIESLPFDLQRNVSLMREIDAKYQEILKELDECYERFSRETDGAQKRRMLHCVQRALIRSQELGDEKIQIVSQMVELVENRTRQVDSHVELFEANHDHDDGASGTPKEKKAKTSKKKKRSKAKAEREASPADLPIDPNEPTYCLCNQVSYGEMIGCDNDECPIEWFHFSCVGLNHKPKGKWYCPKCRGENEKTMDKALEKSKKERAYNR

SEQ ID NO: 862554 - protein, 330 aa, Homo sapiens
SGDGAGAAGNPECCPMALGPRCGAIRACRRVLERAFSLRKAHSIKDMENTLQLVRNIIPPLSSTKHKGQDGRIGVVGGCQEYTGAPYFAAISALNSEILKELDECYERFSRETDGAQKRRMLHCVQRALIRSQELGDEKIQIVSQMVELVENRTRQVDSHVELFEAQQELGDTAGNSGKAGADRPKGEAAAQADKPNSKRSRRQRNNENRENASSNHDHDDGASGTPKEKKAKTSKKKKRSKAKAEREASPADLPIDPNEPTYCLCNQVSYGEMIGCDNDECPIEWFHFSCVGLNHKPKGKWYCPKCRGENEKTMDKALEKSKKERAYNR

SEQ ID NO: 862555 - protein, 422 aa, Homo sapiens
MSFVECPYHSPAERLVAEADEGGPSAITGMGLCFRCLLFSFSGRSGVEGGRVDLNVFGSLGLQPWIGSSRCWGGPCSSALRCGWFSSWPPPSKSAIPIGGGSRGAGRVSRWPPPHWLEAWRVSPRPLSPLSPATFGRGFIAVAVIPGLWARGRGCSSDRLPRPAGPARRQFQAASLLTRGWGRAWPWKQILKELDECYERFSRETDGAQKRRMLHCVQRALIRSQELGDEKIQIVSQMVELVENRTRQVDSHVELFEAQQELGDTAGNSGKAGADRPKGEAAAQADKPNSKRSRRQRNNENRENASSNHDHDDGASGTPKEKKAKTSKKKKRSKAKAEREASPADLPIDPNEPTYCLCNQVSYGEMIGCDNDECPIEWFHFSCVGLNHKPKGKWYCPKCRGENEKTMDKALEKSKKERAYNR

SEQ ID NO: 862556 - protein, 279 aa, Homo sapiens; identical to SEQ ID NO: 862549

SEQ ID NO: 862557 - protein, 235 aa, Homo sapiens
MEILKELDECYERFSRETDGAQKRRMLHCVQRALIRSQELGDEKIQIVSQMVELVENRTRQVDSHVELFEAQQELGDTAGNSGKAGADRPKGEAAAQADKPNSKRSRRQRNNENRENASSNHDHDDGASGTPKEKKAKTSKKKKRSKAKAEREASPADLPIDPNEPTYCLCNQVSYGEMIGCDNDECPIEWFHFSCVGLNHKPKGKWYCPKCRGENEKTMDKALEKSKKERAYNR

SEQ ID NO: 862558 - protein, 262 aa, Homo sapiens
MSFVECPYHSPAERLVAEADEGGPSAITEILKELDECYERFSRETDGAQKRRMLHCVQRALIRSQELGDEKIQIVSQMVELVENRTRQVDSHVELFEAQQELGDTAGNSGKAGADRPKGEAAAQADKPNSKRSRRQRNNENRENASSNHDHDDGASGTPKEKKAKTSKKKKRSKAKAEREASPADLPIDPNEPTYCLCNQVSYGEMIGCDNDECPIEWFHFSCVGLNHKPKGKWYCPKCRGENEKTMDKALEKSKKERAYNR

SEQ ID NO: 862559 - protein, 280 aa, Homo sapiens
TQQYFTIWICSENLSLQLKPYHKPLQHVRDWPEILAELTNLDPQRETPQLFLRRDVRLPLEVEKQIEDPLAILILFDEARYNLLKGFYTAPDAKLITLASLLLQIVYGNYESKKHKQGFLNEENLKSIVPVTKLKSKAPHWTNRILHEYKNLSTSEGVSKEMHHLQRMFLQNCWEIPTYGAAFFTGQIFTKASPSNHKVIPVYVGVNIKGLHLLNMETKALLISLKYGCFMWQLGDTDTCFQIHSMENKMSFIVHTKQAGLVVKLLMKLNGQLMPTERNS

SEQ ID NO: 862560 - protein, 172 aa, Homo sapiens
MSVPGPSSPDGALTRPPYCLEAGEPTPGLSDTSPDEGLIEDLTIEDKAVEQLAEGLLSHYLPDLQRSKQALQELTQNQVVLLDTLEQEISKFKECHSMLDINALFAEAKHYHAKLVNIRKEMLMLHEKTSKLKKRALKLQQKRQKEELEREQQREKEFEREKQLTARPAKRM

SEQ ID NO: 862561 - protein, 172 aa, Homo sapiens; identical to SEQ ID NO: 862560

SEQ ID NO: 862562 - protein, 205 aa, Homo sapiens
TASGARRRYQRGVPTTPWGRANSRARDRSPQFFRPRHFRVRQSLLSGQPLESLGAALLLTSHTFASSLCSQLEGHECPWAVVSGRGPDTATLLPGGRGADACVVFVSEQNQVVLLDTLEQEISKFKECHSMLDINALFAEAKHYHAKLVNIRKEMLMLHEKTSKLKKRALKLQQKRQKEELEREQQREKEFEREKQLTARPAKRM

SEQ ID NO: 862563 - protein, 104 aa, Homo sapiens
TASGARRRYQRGVPTTPWGRANSRARDRSPQFFRPRHFRVRQSLLSGQPLESLGAALLLTSHTFASSLCSQLEGHECPWAVVSGRGPDTATLLPGGRGADAWFK

SEQ ID NO: 862564 - protein, 172 aa, Homo sapiens; identical to SEQ ID NO: 862560

SEQ ID NO: 862565 - protein, 182 aa, Homo sapiens
MSVPGPSSPDGALTRPPYCLEAGEPTPGLSDTSPDEGLIEDLTIEDKAVEQLAEGLLSHYLPDLQRSKQALQELTQNQVVLLDTLEQEISKFKECHSMLDINALFAEAKHYHAKLVNIRKEMLMLHEKTSKLKEFKDEDINDQHRDVIFLSATHLGVSLIFLLRVSFMSSNFFSYSHIWLDF

SEQ ID NO: 862566 - protein, 172 aa, Homo sapiens; identical to SEQ ID NO: 862560

SEQ ID NO: 862567 - protein, 113 aa, Homo sapiens
TASGARRRYQRGVPTTPWGRANSRARDRSPQFFRPRHFRVRQSLLSGQPLESLGAALLLTSHTFASSLCSQLEGHECPWAVVSGRGPDTATLLPGGRGADACLLRLNTIMPSW

SEQ ID NO: 862568 - protein, 177 aa, Homo sapiens
MGGTEVPRGSFVLGVQLKAVDGEAILSLCVDSGLSDTSPDEGLIEDLTIEDKAVEQLAEGLLSHYLPDLQRSKQALQELTQNQVVLLDTLEQEISKFKECHSMLDINALFAEAKHYHAKLVNIRKEMLMLHEKTSKLKKRALKLQQKRQKEELEREQQREKEFEREKQLTARPAKRM

SEQ ID NO: 862569 - protein, 143 aa, Homo sapiens
MSVPGPSSPDGALTRPPYCLEAGEPTPGLSDTSPDEGLIEDLTIEDKAVEQLAEGLLSHYLPDLQRSKQALQELTQNQVVLLDTLEQEISKFKECHSMLDINALKRALKLQQKRQKEELEREQQREKEFEREKQLTARPAKRM

SEQ ID NO: 862570 - protein, 172 aa, Homo sapiens; identical to SEQ ID NO: 862560

SEQ ID NO: 862571 - protein, 113 aa, Homo sapiens; identical to SEQ ID NO: 862567

SEQ ID NO: 862572 - protein, 118 aa, Homo sapiens
SQREQGSTLSPWGEVLTPLASSSVTHLSSKQEEYVKVAKTLFTDEALKPCPRCQSPAKYQPYKKRGLCSRTACGFDFCVLCLCAYHGSEECSRGAAKPRNRKDALPGSAQSKRNLKRL

SEQ ID NO: 862573 - protein, 118 aa, Homo sapiens; identical to SEQ ID NO: 862572

SEQ ID NO: 862574 - protein, 118 aa, Homo sapiens; identical to SEQ ID NO: 862572

SEQ ID NO: 862575 - protein, 118 aa, Homo sapiens; identical to SEQ ID NO: 862572

SEQ ID NO: 862576 - protein, 66 aa, Homo sapiens
AASHSHWMSSPRPHGWVSPSSPRFCLRTHRVAPDPPVRTSRISSEQPLRAGGLGFSVSLGALGHVL

SEQ ID NO: 862577 - protein, 66 aa, Homo sapiens; identical to SEQ ID NO: 862576

SEQ ID NO: 862578 - protein, 66 aa, Homo sapiens; identical to SEQ ID NO: 862576

SEQ ID NO: 862579 - protein, 66 aa, Homo sapiens; identical to SEQ ID NO: 862576

SEQ ID NO: 862580 - protein, 66 aa, Homo sapiens; identical to SEQ ID NO: 862576

SEQ ID NO: 862581 - protein, 430 aa, Homo sapiens
GARPELRDRGPEGIQRVSCRRGTSAGLAAAAIPTIPDRACPGSAPGGAARPSPGTARSGTPTAPSPARGLRGRTRRKGGLAGDPAMALDFLAGCAGGVAGVLVGHPFDTVKVRLQVQSVEKPQYRGTLHCFKSIIKQESVLGLYKGLGSPLMGLTFINALVFGVQGNTLRALGHDSPLNQFLAGAAAGAIQCVICCPMELAKTRLQLQDAGPARTYKGSLDCLAQIYGHEGLRGVNRGMVSTLLRETPSFGVYFLTYDALTRALGCEPGDRLLVPKLLLAGGTSGIVSWLSTYPVDVVKSRLQADGLRGAPRYRGILDCVHQSYRAEGWRVFTRGLASTLLRAFPVNAATFATVTVVLTYARGEEAGPEGEAVPAAPAGPALAQPPACDAHPGLLPQGSFSETWDINWPLSRLPCFLLGCCELWSLSDVG

SEQ ID NO: 862582 - protein, 279 aa, Homo sapiens
MGLTFINALVFGVQGNTLRALGHDSPLNQFLAGAAAGAIQCVICCPMELAKTRLQLQDAGPARTYKGSLDCLAQIYGHEGLRGVNRGMVSTLLRETPSFGVYFLTYDALTRALGCEPGDRLLVPKLLLAGGTSGIVSWLSTYPVDVVKSRLQADGLRGAPRYRGILDCVHQSYRAEGWRVFTRGLASTLLRAFPVNAATFATVTVVLTYARGEEAGPEGEAVPAAPAGPALAQPPACDAHPGLLPQGSFSETWDINWPLSRLPCFLLGCCELWSLSDVG

SEQ ID NO: 862583 - protein, 279 aa, Homo sapiens
MGLTFINALVFGVQGNTLRALGHDSPLNQFLAGAAAGAIQCVICCPMELAKTRLQLQDAGPARTYKGSLDCLAQIYGHEGLRGVNRGMVSTLLRETPSFGVYFLTYDALTRALGCEPGDRLLVPKLLLAGGTSGIVSWLSTYPVDVVKSRLQADGLRGAPRYRGILDCVHQSYRAEGWRVFTRGLASTLLRAFPVNAATFATVTVVLTYARGEEAGPEGEAVPAAPAGPAWRSPPACDAHPGLLPQGSFSETWDINWPLSRLPCFLLGCCELWSLSDVG

SEQ ID NO: 862584 - protein, 279 aa, Homo sapiens; identical to SEQ ID NO: 862582

SEQ ID NO: 862585 - protein, 279 aa, Homo sapiens; identical to SEQ ID NO: 862582

SEQ ID NO: 862586 - protein, 279 aa, Homo sapiens; identical to SEQ ID NO: 862582

SEQ ID NO: 862587 - protein, 430 aa, Homo sapiens; identical to SEQ ID NO: 862581

SEQ ID NO: 862588 - protein, 430 aa, Homo sapiens; identical to SEQ ID NO: 862581

SEQ ID NO: 862589 - protein, 474 aa, Homo sapiens
MGYPRNSVCSLPGDNFCCQPPRPVSRGEQQPADGTPVLSGTGAGLALGCHMHTLPVDVRIPGAHGICLLHPTGVAGVLVGHPFDTVKALGTERIQDLDLLYSAQNHSHRPEAHGLHTFLHEGSFLSCFLGHSNNQGAVVLTYDEGMGVSLTLESAVRLQVQSVEKPQYRGTLHCFKSIIKQESVLGLYKGLGSPLMGLTFINALVFGVQGNTLRALGHDSPLNQFLAGAAAGAIQCVICCPMELAKTRLQLQDAGPARTYKGSLDCLAQIYGHEGLRGVNRGMVSTLLRETPSFGVYFLTYDALTRALGCEPGDRLLVPKLLLAGGTSGIVSWLSTYPVDVVKSRLQADGLRGAPRYRGILDCVHQSYRAEGWRVFTRGLASTLLRAFPVNAATFATVTVVLTYARGEEAGPEGEAVPAAPAGPALAQPPACDAHPGLLPQGSFSETWDINWPLSRLPCFLLGCCELWSLSDVG

SEQ ID NO: 862590 - protein, 430 aa, Homo sapiens; identical to SEQ ID NO: 862581

SEQ ID NO: 862591 - protein, 430 aa, Homo sapiens; identical to SEQ ID NO: 862581

SEQ ID NO: 862592 - protein, 408 aa, Homo sapiens
SPEADGGGGGGASGGPGLLRRPPLLATGAAAMQPPPPGPLGDCLRDWEDLQQDFQNIQETHRLYRLKLEELTKLQNNCTSSITRQKKRLQELALALKKCKPSLPAEAEGAAQELENQMKERQGLFFDMEAYLPKKNGLYLSLVLGNVNVTLLSKQAKFAYKDEYEKFKLYLTIILILISFTCRFLLNSRVTDAAFNFLLVWYYCTLTIRESILINNGSRWAGRALREGSMEWGARTSGKQEQALGVMVALCSRIKGWWVFHHYVSTFLSGVMLTWPDGLMYQKFRNQFLSFSMYQSFVQFLQYYYQSGCLYRLRALGERHTMDLTVEGFQSWMWRGLTFLLPFLFFGHFWQLFNALTLFNLAQDPQCKEWQVLMCGFPFLLLFLGNFFTTLRVVHHKFHSQRHGSKKD

SEQ ID NO: 862593 - protein, 336 aa, Homo sapiens
MAHCSLNFPGLKRSSHLNLLETHRLYRLKLEELTKLQNNCTSSITRQKKRLQELALALKKCKPSLPAEAEGAAQELENQMKERQGLFFDMEAYLPKKNGLYLSLVLGNVNVTLLSKQAKFAYKDEYEKFKLYLTIILILISFTCRFLLNSRVTDAAFNFLLVWYYCTLTIRESILINNGSRIKGWWVFHHYVSTFLSGVMLTWPDGLMYQKFRNQFLSFSMYQSFVQFLQYYYQSGCLYRLRALGERHTMDLTVEGFQSWMWRGLTFLLPFLFFGHFWQLFNALTLFNLAQDPQCKEWQVLMCGFPFLLLFLGNFFTTLRVVHHKFHSQRHGSKKD

SEQ ID NO: 862594 - protein, 357 aa, Homo sapiens
SPEADGGGGGGASGGPGLLRRPPLLATGAAAMQPPPPGPLGDCLRDWEDLQQDFQNIQETHRLYRLKLEELTKLQNNCTSSITRQKKRLQELALALKKCKPSLPAEAEGAAQELENQMKERQGLFFDMEAYLPKKNGLYLSLVLGNVNVTLLSKQAKFAYKDEYEKFKLYLTIILILISFTCRFLLNSRVTDAAFNFLLVWYYCTLTIRESILINNGSRIKGWWVFHHYVSTFLSGVMLTWPDGLMYQKFRNQFLSFSMYQSFVQFLQYYYQSGCLYRLRALGERHTMDLTVEGFQSWMWRGLTFLLPFLFFGHVSRASVSLPCLSVLCAGFGLQQGLGLLSKMPPPCLVSGSFLTR

SEQ ID NO: 862595 - protein, 390 aa, Homo sapiens
SPEADGGGGGGASGGPGLLRRPPLLATGAAAMQPPPPGPLGDCLRDWEDLQQDFQNIQETHRLYRLKLEELTKLQNNCTSSITRQKKRLQELALALKKCKPSLPAEAEGAAQELENQMKERQGLFFDMEAYLPKKNGLYLSLVLGNVNVTLLSKQAKFAYKDEYEKFKLYLTIILILISFTCRFLLNSRVTDAAFNFLLVWYYCTLTIRESILINNGSRIKGWWVFHHYVSTFLSGVMLTWPDGLMYQKFRNQFLSFSMYQSFVQFLQYYYQSGCLYRLRALGERHTMDLTVEGFQSWMWRGLTFLLPFLFFGHFWQLFNALTLFNLAYLPKKNGLYLSLVLGNVNVTLLSKQAKFAYKDEYEKFTAPLECACIRGSLLFSLGFYGRCGP

SEQ ID NO: 862596 - protein, 441 aa, Homo sapiens
SPEADGGGGGGASGGPGLLRRPPLLATGAAAMQPPPPGPLGDCLRDWEDLQQDFQNIQETHRLYRLKLEELTKLQNNCTSSITRQKKRLQELALALKKCKPSLPAEAEGAAQELENQMKERQGLFFDMEAYLPKKNGLYLSLVLGNVNVTLLSKQAKFAYKDEYEKFKLYLTIILILISFTCRFLLNSRVTDAAFNFLLVWYYCTLTIRESILINNGSRWAGRALREGSMEWGARTLREAGTGAGGDGGSLLQDQRLVGVPSLRVHLPVGSHADVVSGWAPAGAGAGTRRGYTASPRVPTLPSTFYLRPDGLMYQKFRNQFLSFSMYQSFVQFLQYYYQSGCLYRLRALGERHTMDLTVEGFQSWMWRGLTFLLPFLFFGHFWQLFNALTLFNLAQDPQCKEWQVLMCGFPFLLLFLGNFFTTLRVVHHKFHSQRHGSKKD

SEQ ID NO: 862597 - protein, 311 aa, Homo sapiens
SPEADGGGGGGASGGPGLLRRPPLLATGAAAMQPPPPGPLGDCLRDWEDLQQDFQNIQETHRLYRLKLEELTKLQNNCTSSITRQKKRLQELALALKKCKPSLPAEAEGAAQELENQMKERQGLFFDMEAYLPKKNGLYLSLVLGNVNVTLLSKQAKFAYKDEYEKFKLYLTIILILISFTCRFLLNSRVTDAAFNFLLVWYYCTLTIRESILINNGSRIKGWWVFHHYVSTFLSGVMLTWPDGLMYQKFRNQFLSFSMYQSFVQFLQYYYQSGCLYRLRALGERHTMDLTVGESGVALASGHSPFLPSRV

SEQ ID NO: 862598 - protein, 312 aa, Homo sapiens
LGSAALPGWGHTWAPPAPHPSHRPAPPRFAYKDEYEKFKLYLTIILILISFTCRFLLNSRVTDAAFNFLLVWYYCTLTIRESILINNGSRWAGRALREGSMEWGARTLREAGTGAGGDGGSLLQDQRLVGVPSLRVHLPVGSHADVVSGWAPAGAGAGTRRGYTASPRVPTLPSTFYLRPDGLMYQKFRNQFLSFSMYQSFVQFLQYYYQSGCLYRLRALGERHTMDLTVEGFQSWMWRGLTFLLPFLFFGHFWQLFNALTLFNLAQDPQCKEWQVLMCGFPFLLLFLGNFFTTLRVVHHKFHSQRHGSKKD

SEQ ID NO: 862599 - protein, 374 aa, Homo sapiens
SPEADGGGGGGASGGPGLLRRPPLLATGAAAMQPPPPGPLGDCLRDWEDLQQDFQNIQETHRLYRLKLEELTKLQNNCTSSITRQKKRLQELALALKKCKPSLPAEAEGAAQELENQMKERQGLFFDMEAYLPKKNGLYLSLVLGNVNVTLLSKQAKFAYKDEYEKFKLYLTIILILISFTCRFLLNSRVTDAAFNFLLVWYYCTLTIRESILINNGSRIKGWWVFHHYVSTFLSGVMLTWPDGLMYQKFRNQFLSFSMYQSFVQFLQYYYQSGCLYRLRALGERHTMDLTVEGFQSWMWRGLTFLLPFLFFGHFWQLFNALTLFNLAQDPQCKEWQVLMCGFPFLLLFLGNFFTTLRVVHHKFHSQRHGSKKD

SEQ ID NO: 862600 - protein, 374 aa, Homo sapiens; identical to SEQ ID NO: 862599

SEQ ID NO: 862601 - protein, 400 aa, Homo sapiens
SPEADGGGGGGASGGPGLLRRPPLLATGAAAMQPPPPGPLGDCLRDWEDLQQDFQNIQETHRLYRLKLEELTKLQNNCTSSITRQKKRLQELALALKKCKPSLPAEAEGAAQELENQMKERQGLFFDMEAYLPKKNGLYLSLVLGNVNVTLLSKQAKFAYKDEYEKFKLYLTIILILISFTCRFLLNSRVTDAAFNFLLVWYYCTLTIRESILINNGSRIKGWWVFHHYVSTFLSGVMLTWPDGLMYQKFRNQFLSFSMYQSFVQFLQYYYQSGCLYRLRALGERHTMDLTVEGFQSWMWRGLTFLLPFLFFGHFWQLFNALTLFNLAQDPQCKEWQGCAPQVSQSAAREQEGLRLGLPLPAQRGFCPVCCGRGWEAPLECACIRGSLLFSLGFYGRCGP

SEQ ID NO: 862602 - protein, 345 aa, Homo sapiens
AGMGEDYPWRFHHKHHGSALLIFSEAHRRETHRLYRLKLEELTKLQNNCTSSITRQKKRLQELALALKKCKPSLPAEAEGAAQELENQMKERQGLFFDMEAYLPKKNGLYLSLVLGNVNVTLLSKQAKFAYKDEYEKFKLYLTIILILISFTCRFLLNSRVTDAAFNFLLVWYYCTLTIRESILINNGSRIKGWWVFHHYVSTFLSGVMLTWPDGLMYQKFRNQFLSFSMYQSFVQFLQYYYQSGCLYRLRALGERHTMDLTVEGFQSWMWRGLTFLLPFLFFGHFWQLFNALTLFNLAQDPQCKEWQVLMCGFPFLLLFLGNFFTTLRVVHHKFHSQRHGSKKD

SEQ ID NO: 862603 - protein, 286 aa, Homo sapiens
ALTVSGLTRRCKPSLPAEAEGAAQELENQMKERQGLFFDMEAYLPKKNGLYLSLVLGNVNVTLLSKQAKFAYKDEYEKFKLYLTIILILISFTCRFLLNSRVTDAAFNFLLVWYYCTLTIRESILINNGSRIKGWWVFHHYVSTFLSGVMLTWPDGLMYQKFRNQFLSFSMYQSFVQFLQYYYQSGCLYRLRALGERHTMDLTVEGFQSWMWRGLTFLLPFLFFGHFWQLFNALTLFNLAQDPQCKEWQVLMCGFPFLLLFLGNFFTTLRVVHHKFHSQRHGSKKD

SEQ ID NO: 862604 - protein, 354 aa, Homo sapiens
SPEADGGGGGGASGGPGLLRRPPLLATGAAAMQPPPPGPLGDCLRDWEDLQQDFQNIQETHRLYRLKLEELTKLQNNCTSSITRQKKRLQELALALKKCKPSLPAEAEGAAQELENQMKERQGLFFDMEAYLPKKNGFAYKDEYEKFKLYLTIILILISFTCRFLLNSRVTDAAFNFLLVWYYCTLTIRESILINNGSRIKGWWVFHHYVSTFLSGVMLTWPDGLMYQKFRNQFLSFSMYQSFVQFLQYYYQSGCLYRLRALGERHTMDLTVEGFQSWMWRGLTFLLPFLFFGHFWQLFNALTLFNLAQDPQCKEWQVLMCGFPFLLLFLGNFFTTLRVVHHKFHSQRHGSKKD

SEQ ID NO: 862605 - protein, 297 aa, Homo sapiens
SPEADGGGGGGASGGPGLLRRPPLLATGAAAMQPPPPGPLGDCLRDWEDLQQDFQNIQETHRLYRLKLEELTKLQNNCTSSITRQKKRLQELALALKKCKPSLPAEAEGAAQELENQMKERQGLFFDMEAYLPKKNGLYLSLVLGNVNVTLLSKQAKFAYKDEYEKFKLYLTIILILISFTCRFLLNSRVTDAAFNFLLVWYYCTLTIRESILINNGSRIKGWWVFHHYVSTFLSGVMLTWPDGLMYQKFRNQFLSFSMYQSFVQFLQYYYQSGCLYRLRALGERHTMDLTVVLAAF

SEQ ID NO: 862606 - protein, 297 aa, Homo sapiens; identical to SEQ ID NO: 862605

SEQ ID NO: 862607 - protein, 234 aa, Homo sapiens
CWNGRRLSLEIPSQTSWIRSTDLLRGPPKGDPSALPPEAGGADQTSEQLHQLHHAAEEAAPGAGPRPEEMQTLPPSRGRIKGWWVFHHYVSTFLSGVMLTWPDGLMYQKFRNQFLSFSMYQSFVQFLQYYYQSGCLYRLRALGERHTMDLTVEGFQSWMWRGLTFLLPFLFFGHFWQLFNALTLFNLAQDPQCKEWQVLMCGFPFLLLFLGNFFTTLRVVHHKFHSQRHGSKKD

SEQ ID NO: 862608 - protein, 334 aa, Homo sapiens
SPEADGGGGGGASGGPGLLRRPPLLATGAAAMQPPPPGPLGDCLRDWEDLQQDFQNIQETHRLYRLKLEELTKLQNNCTSSITRQKKRLQELALALKKCKPSLPAEAEGAAQELENQMKERQGLFFDMEAYLPKKNGLYLSLVLGNVNVTLLSKQAKFAYKDEYEKFKLYLTIILILISFTCRFLLNSRVTDAAFNFLLVWYYCTLTIRESILINNGSRWAGRALREGSMEWGARTLREAGTGAGGDGGSLLQDQRLVGVPSLRVHLPVGSHADVARRSHVPEIPEPIPLLFHVPELRAVSPVLLPERLPLPPAGAGRAAHHGPHCGSGSFLTR

SEQ ID NO: 862609 - protein, 33 aa, Homo sapiens
MSRRQQQETAGTEGGACWLVLDLGDEGGGLVKG

SEQ ID NO: 862610 - protein, 536 aa, Homo sapiens
PCPGRGQSGPAQVRPGVGPESGRCAAPPRTCPLGLPPRESESVGPAEVKDRGAGPARSWEREPGTPGAMDGLGRRLRASLRLKRGHGGPPQDNSGEALKEPERAQEHSLPNFAGGQHFFEYLLVVSLKKKRSEDDYEPIITYQFPKRENLLRGQQEEEERLLKAIPLFCFPDGNEWASLTEYPRETFSFVLTNVDGSRKIGYCRRLLPAGPGPRLPKVYCIISCIGCFGLFSKILDEVEKRHQISMAVIYPFMQGLREAAFPAPGKTVTLKSFIPDSGTEFISLTRPLDSHLEHVDFSSLLHCLSFEQILQIFASAVLERKIIFLAEGLSTLSQCIHAAAALLYPFSWAHTYIPVVPESLLATVCCPTPFMVGVQMRFQQEVMDSPMEEVLLVNLCEGTFLMSVGDEKDILPPKLQDDILDSLGQGINELKTAEQINEHVSGPFVQFFVKIVGHYASYIKREANGQGHFQERSFCKALTSKTNRRFVKKFVKTQLFSLFIQEAEKSKNPPAGYFQQKILEYEEQKKQKKPREKTVK

SEQ ID NO: 862611 - protein, 540 aa, Homo sapiens
CLAWVPSHPSCSTTGCTGWKLLFPLWKTARGLASQSCGWRPKQPLSQAYCHQSVCVRGEGSPLCPEGPEMEGQVVGRVFRLFQRRLLQLRAGPPQDNSGEALKEPERAQEHSLPNFAGGQHFFEYLLVVSLKKKRSEDDYEPIITYQFPKRENLLRGQQEEEERLLKAIPLFCFPDGNEWASLTEYPRETFSFVLTNVDGSRKIGYCRRLLPAGPGPRLPKVYCIISCIGCFGLFSKILDEVEKRHQISMAVIYPFMQGLREAAFPAPGKTVTLKSFIPDSGTEFISLTRPLDSHLEHVDFSSLLHCLSFEQILQIFASAVLERKIIFLAEGLSTLSQCIHAAAALLYPFSWAHTYIPVVPESLLATVCCPTPFMVGVQMRFQQEVMDSPMEEVLLVNLCEGTFLMSVGDEKDILPPKLQDDILDSLGQGINELKTAEQINEHVSGPFVQFFVKIVGHYASYIKREANGQGHFQERSFCKALTSKTNRRFVKKFVKTQLFSLFIQEAEKSKNPPAGYFQQKILEYEEQKKQKKPREKTVK

SEQ ID NO: 862612 - protein, 193 aa, Homo sapiens
MGSGLISGPPQDNSGEALKEPERAQEHSLPNFAGGQHFFEYLLVVSLKKKRSEDDYEPIITYQFPKRENLLRGQQEEEERLLKAIPLFCFPDGNEWASLTEYPRETFSFVLTNVDGSRKIGYCRRLLPAGPGPRLPKVYCIISCIGCFGLFSKILDGSGERDLDFHWGTLHRDIAGLQRNFPVLEKCALKSFP

SEQ ID NO: 862613 - protein, 401 aa, Homo sapiens
PCPGRGQSGPAQVRPGVGPESGRCAAPPRTCPLGLPPRESESVGPAEVKDRGAGPARSWEREPGTPGAMDGLGRRLRASLRLKRGHGDVGTDPKAPHSRGKLYTGTQQQGPGATSFAPILLGGAATFLVKLPFPCRIPSSKHGKRSRRDCIYRRPYLNSALNQSFPQRRGGTLAYRRGSRAGKGGQGQQDMLQKSIPTCICFPKNGDIELGHSPHPRYSQGSTLSTIRYTDPKLLAIGAASNTHWELTARAPSLPCQGPVGPSGHFPKKGGTLAFQSIGCNQSWRTGLVHSERFRWESDNGGAQQQDQIRRDLSQCGHGVIAYPTEYQMRQGALSTEAGDRPFIPLGYTLRKRTWYASLSKRRRFHLPPRDLSSQLRAVIKFHTSEKTGPLRGTSTRCKET

SEQ ID NO: 862614 - protein, 456 aa, Homo sapiens
MGSGLISGPPQDNSGEALKEPERAQEHSLPNFAGGQHFFEYLLVVSLKKKRSEDDYEPIITYQFPKRENLLRGQQEEEERLLKAIPLFCFPDGNEWASLTEYPRETFSFVLTNVDGSRKIGYCRRLLPAGPGPRLPKVYCIISCIGCFGLFSKILDEVEKRHQISMAVIYPFMQGLREAAFPAPGKTVTLKSFIPDSGTEFISLTRPLDSHLEHVDFSSLLHCLSFEQILQIFASAVLERKIIFLAEGLSTLSQCIHAAAALLYPFSWAHTYIPVVPESLLATVCCPTPFMVGVQMRFQQEVMDSPMEEVLLVNLCEGTFLMSVGDEKDILPPKLQDDILDSLGQGINELKTAEQINEHVSGPFVQFFVKIVGHYASYIKREANGQGHFQERSFCKALTSKTNRRFVKKFVKTQLFSLFIQEAEKSKNPPAGYFQQKILEYEEQKKQKKPREKTVK

SEQ ID NO: 862615 - protein, 502 aa, Homo sapiens
MGGVSAGRGERGEDGVGTGEPGLGLAAGARWRAARGVEIREQLEGDSGGCAGAGPPQDNSGEALKEPERAQEHSLPNFAGGQHFFEYLLVVSLKKKRSEDDYEPIITYQFPKRENLLRGQQEEEERLLKAIPLFCFPDGNEWASLTEYPRETFSFVLTNVDGSRKIGYCRRLLPAGPGPRLPKVYCIISCIGCFGLFSKILDEVEKRHQISMAVIYPFMQGLREAAFPAPGKTVTLKSFIPDSGTEFISLTRPLDSHLEHVDFSSLLHCLSFEQILQIFASAVLERKIIFLAEGLSTLSQCIHAAAALLYPFSWAHTYIPVVPESLLATVCCPTPFMVGVQMRFQQEVMDSPMEEVLLVNLCEGTFLMSVGDEKDILPPKLQDDILDSLGQGINELKTAEQINEHVSGPFVQFFVKIVGHYASYIKREANGQGHFQERSFCKALTSKTNRRFVKKFVKTQLFSLFIQEAEKSKNPPAGYFQQKILEYEEQKKQKKPREKTVK

SEQ ID NO: 862616 - protein, 457 aa, Homo sapiens
FAQLCWGAKSAPGPFLVPLKLPLNVLGHSLPNFAGGQHFFEYLLVVSLKKKRSEDDYEPIITYQFPKRENLLRGQQEEEERLLKAIPLFCFPDGNEWASLTEYPRETFSFVLTNVDGSRKIGYCRRLLPAGPGPRLPKVYCIISCIGCFGLFSKILDEVEKRHQISMAVIYPFMQGLREAAFPAPGKTVTLKSFIPDSGTEFISLTRPLDSHLEHVDFSSLLHCLSFEQILQIFASAVLERKIIFLAEGLSTLSQCIHAAAALLYPFSWAHTYIPVVPESLLATVCCPTPFMVGVQMRFQQEVMDSPMEEVLLVNLCEGTFLMSVGDEKDILPPKLQDDILDSLGQGINELKTAEQINEHVSGPFVQFFVKIVGHYASYIKREANGQGHFQERSFCKALTSKTNRRFVKKFVKTQLFSLFIQEAEKSKNPPAGYFQQKILEYEEQKKQKKPREKTVK

SEQ ID NO: 862617 - protein, 135 aa, Homo sapiens [sequence omitted]

SEQ ID NO: 862618 - protein, 291 aa, Homo sapiens
MAVIYPFMQGLREAAFPAPGKTVTLKSFIPDSGTEFISLTRPLDSHLEHVDFSSLLHCLSFEQILQIFASAVLERKIIFLAEGLSTLSQCIHAAAALLYPFSWAHTYIPVVPESLLATVCCPTPFMVGVQMRFQQEVMDSPMEEVLLVNLCEGTFLMSVGDEKDILPPKLQDDILDSLGQGINELKTAEQINEHVSGPFVQFFVKIVGHYASYIKREANGQGHFQERSFCKALTSKTNRRFVKKFVKTQLFSLFIQEAEKSKNPPAGYFQQKILEYEEQKKQKKPREKTVK

SEQ ID NO: 862619 - protein, 151 aa, Homo sapiens
MGGVSAGRGERGEDGVGTGEPGLGLAAGARWRAARGVEIREQLEGDSGGCAGAGPPQDNSGEALKEPERAQEHSLPNFAGGQHFFEYLLVVSLKKKRSEDDYEPIITYQFPKVRTEGGAGPARGLGCLEGGRGGGSTSFSLPYRGLSLELP

SEQ ID NO: 862620 - protein, 291 aa, Homo sapiens; identical to SEQ ID NO: 862618

SEQ ID NO: 862621 - protein, 291 aa, Homo sapiens; identical to SEQ ID NO: 862618

SEQ ID NO: 862622 - protein, 291 aa, Homo sapiens; identical to SEQ ID NO: 862618

SEQ ID NO: 862623 - protein, 105 aa, Homo sapiens
MRGATRVSIMLLLVTVSDCAVITGACERDVQCGAGTCCAISLWLRGLRMCTPLGREGEECHPGSHKVPFFRKRKHHTCPCLPNLLCSRFPDGRYRCSMDLKNINF

SEQ ID NO: 862624 - protein, 105 aa, Homo sapiens; identical to SEQ ID NO: 862623

SEQ ID NO: 862625 - protein, 105 aa, Homo sapiens; identical to SEQ ID NO: 862623

SEQ ID NO: 862626 - protein, 105 aa, Homo sapiens; identical to SEQ ID NO: 862623

SEQ ID NO: 862627 - protein, 88 aa, Homo sapiens
TAWTPLHVGALDCLELEEGTLMCLQKPSFPFLWGLTVVGRRPAGPGPSRGLHRLLRNLLCLCLIEPGHEIKHEVICNGTGAVAVSAWL

SEQ ID NO: 862628 - protein, 106 aa, Homo sapiens
HSMDTTSCRGTGLPRVGGRDPVLTSLSCFPLLQYGFDILIITATAKIPLCFINPEENTMSAGAVGILQQLSVLPVSPGKNIFLSSEQCLPLQASSLSNKRSTSPNL

SEQ ID NO: 862629 - protein, 988 aa, Homo sapiens
MCVTKKLFFIVQRTIFVGCVIWKFCLHYVLRGFLCFNSMQLDRNTLPKKGLRYTPSSRQANQEEGKEWLRSHSTGGLQDTGNQSPLVSPSAMSSSAAGKYHFSNLVSPTNLSQFNLPGPSMMRSNSIPAQDSSFDLYDDSQLCGSATSLEERPRAISHSGSFRDSMEEVHGSSLSLVSSTSSLYSTAEEKAHSEQIHKLRRELVASQEKVATLTSQLSANAHLVAAFEKSLGNMTGRLQSLTMTAEQKESELIELRETIEMLKAQNSAAQAAIQGALNGPDHPPKDLRIRRQHSSESVSSINSATSHSSIGSGNDADSKKKKKKNWVNSRGSELRSSFKQAFGKKKSTKPPSSHSDIEELTDSSLPASPKLPHNAGDCGSASMKPSQSASAICECTEAEAEIILQLKSELREKELKLTDIRLEALSSAHHLDQIREAMNRMQNEIEILKAENDRLKAETGNTAKPTRPPSESSSSTSSSSSRQSLGLSLNNLNITEAVSSDILLDDAGDATGHKDGRSVKIIVSISKGYGRAKDQKSQAYLIGSIGVSGKTKWDVLDGVIRRLFKEYVFRIDTSTSLGLSSDCIASYCIGDLIRSHNLEVPELLPCGYLVGDNNIITVNLKGVEENSLDSFVFDTLIPKPITQRYFNLLMEHHRIILSGPSGTGKTYLANKLAEYVITKSGRKKTEDAIATFNVDHKSSKELQQYLANLAEQCSADNNGVELPVVIILDNLHHVGSLSDIFNGFLNCKYNKCPYIIGTMNQGVSSSPNLELHHNFRWVLCANHTEPVKGFLGRYLRRKLIEIEIERNIRNNDLVKIIDWIPKTWHHLNSFLETHSSSDVTIGPRLFLPCPMDVEGSRVWFMDLWNYSLVPYILEAVREGLQMYGKRTPWEDPSKWVLDTYPWSSATLPQESPALLQLRPEDVGYESCTSTKEATTSKHIPQTDTEGDPLMNMLMKLQEAANYSSTQSCDSESTSHHEDILDSSLESTL

SEQ ID NO: 862630 - protein, 988 aa, Homo sapiens; identical to SEQ ID NO: 862629

SEQ ID NO: 862631 - protein, 594 aa, Homo sapiens
MAAESGELIGACEFMKDRLYFATLRNRPKSTVNTHYFSIDEELVYENFYADFGPLNLAMVYRYCCKLNKKLKSYSLSRKKIVHYTCFDQRKRANAAFLIGAYAVIYLKKTPEEAYRALLSGSNPPYLPFRDASFGNCTYNLTILDCLQGIRKGLQHGFFDFETFDVDEYEHYERVENGDFNWIVPGKFLAFSGPHPKSKIENGYPLHAPEAYFPYFKKHNVTAVVRLNKKIYEAKRFTDAGFEHYDLFFIDGSTPSDNIVRRFLNICENTEGAIAVHCKAGLGRTGTLIACYVMKHYRFTHAEIIAWIRICRPGSIIGPQQHFLEEKQASLWVQGDIFRSKLKNRPSSEGSINKILSGLDDMSIGGNLSKTQNMERFGEDNLEDDDVEMKNGITQGDKLRALKSQRQPRTSPSCAFRSDDTKGHPRAVSQPFRLSSSLQGSAVTLKTSKMALSPSATAKRINRTSLSSGATVRSFSINSRLASSLGNLNAATDDPENKKTSSSSKAGFTASPFTNLLNGSSQPTTRNYPELNNNQYNRSSNSNGGNLNSPPGPHSAKTEEHTTILRPSYTGLSSSSARFLSRSIPSLQSEYVHY

SEQ ID NO: 862632 - protein, 383 aa, Homo sapiens
MAAESGELIGACEFMKDRLYFATLRNRPKSTVNTHYFSIDEELVYENFYADFGPLNLAMVYRYCCKLNKKLKSYSLSRKKIVHYTCFDQRKRANAAFLIGAYAVIYLKKTPEEAYRALLSGSNPPYLPFRDASFGNCTYNLTILDCLQGIRKGLQHGFFDFETFDVDEYEHYERVENGDFNWIVPGKFLAFSGPHPKSKIENGYPLHAPEAYFPYFKKHNVTAVVRLNKKIYEAKRFTDAGFEHYDLFFIDGSTPSDNIVRRFLNICENTEGAIAVHCKAGLGRTGTLIACYVMKHYRFTHAEIIAWIRICRPGSIIGPQQHFLEEKQASLWVQGDIFRSKLKNRPSSEGSINKILSGLDDMSIGGNLSKTQNMERFGEVSFP

SEQ ID NO: 862633 - protein, 623 aa, Homo sapiens
MAAESGELIGACEFMKDRLYFATLRNRPKSTVNTHYFSIDEELVYENFYADFGPLNLAMVYRYCCKLNKKLKSYSLSRKKIVHYTCFDQRKRANAAFLIGAYAVIYLKKTPEEAYRALLSGSNPPYLPFRDASFGNCTYNLTILDCLQGIRKGLQHGFFDFETFDVDEYEHYERVENGDFNWIVPGKFLAFSGPHPKSKIENGYPLHAPEAYFPYFKKHNVTAVVRLNKKIYEAKRFTDAGFEHYDLFFIDGSTPSDNIVRRFLNICENTEGAIAVHCKAGLGRTGTLIACYVMKHYRFTHAEIIAWIRICRPGSIIGPQQHFLEEKQASLWVQGDIFRSKLKNRPSSEGSINKILSGLDDMSIGGNLSKTQNMERFGEDNLEDDDVEMKNGITQGDKLRALKSQRQPRTSPSCAFRSDDTKGHPRAVSQPFRLSSSLQGSAVTLKTSKMALSPSATAKRINRTSLSSGATVRSFSINSRLASSLGNLNAATDDPENKKTSSSSKAGFTASPFTNLLNGSSQPTTRNYPELNNNQYNRSSNSNGGNLNSPPGPHSAKTEEHTTILRPSYTGLSSSSARFLSRSIPVSAQTPPPGPQNPECNFCALPSQPRLPPKKFNSAKEAF

SEQ ID NO: 862634 - protein, 595 aa, Homo sapiens
MGNFLSRENKVQVISESDRLYFATLRNRPKSTVNTHYFSIDEELVYENFYADFGPLNLAMVYRYCCKLNKKLKSYSLSRKKIVHYTCFDQRKRANAAFLIGAYAVIYLKKTPEEAYRALLSGSNPPYLPFRDASFGNCTYNLTILDCLQGIRKGLQHGFFDFETFDVDEYEHYERVENGDFNWIVPGKFLAFSGPHPKSKIENGYPLHAPEAYFPYFKKHNVTAVVRLNKKIYEAKRFTDAGFEHYDLFFIDGSTPSDNIVRRFLNICENTEGAIAVHCKAGLGRTGTLIACYVMKHYRFTHAEIIAWIRICRPGSIIGPQQHFLEEKQASLWVQGDIFRSKLKNRPSSEGSINKILSGLDDMSIGGNLSKTQNMERFGEDNLEDDDVEMKNGITQGDKLRALKSQRQPRTSPSCAFRSDDTKGHPRAVSQPFRLSSSLQGSAVTLKTSKMALSPSATAKRINRTSLSSGATVRSFSINSRLASSLGNLNAATDDPENKKTSSSSKAGFTASPFTNLLNGSSQPTTRNYPELNNNQYNRSSNSNGGNLNSPPGPHSAKTEEHTTILRPSYTGLSSSSARFLSRSIPSLQSEYVHY

SEQ ID NO: 862635 - protein, 515 aa, Homo sapiens
MSTIAAFYGGKSILITGATGFLGKVLMEKLFRTSPDLKVIYILVRPKAGQTLQQRVFQILDSKLFEKVKEVCPNVHEKIRAIYADLNQNDFAISKEDMQELLSCTNIIFHCAATVRFDDTLRHAVQLNVTATRQLLLMASQMPKLEAFIHISTAYSNCNLKHIDEVIYPCPVEPKKIIDSLEWLDDAIIDEITPKLIRDWPNIYTYTKALGEMVVQQESRNLNIAIIRPSIVGATWQEPFPGWVDNINGPNGIIIATGKGFLRAIKATPMAVADVIPVDTVVNLMLAVGWYTAVHRPKSTLVYHITSGNMNPCNWHKMGVQVLATFEKIPFERPFRRPNANFTSNSFTSQYWNAVSHRAPAIIYDCYLRLTGRKPRMTKLMNRLLRTVSMLEYFINRSWEWSTYNTEMLMSELSPEDQRVFNFDVRQLNWLEYIENYVLGVKKYLLKEDMAGIPKAKQRLKRLRNIHYLFNTALFLIAWRLLIARSQMARNVWFFIVSFCYKFLSYFRASSTLKV

SEQ ID NO: 862636 - protein, 515 aa, Homo sapiens; identical to SEQ ID NO: 862635

SEQ ID NO: 862637 - protein, 67 aa, Homo sapiens
ACARGRPAHDAVAPATCRAFAGPSPSSRPGLRLPPVSRPVPRQRRSRGRSEGGWFPPAPHPVSEPDI

SEQ ID NO: 862638 - protein, 497 aa, Homo sapiens
MSTIAAFYGGKSILITGATGFLGKVLMEKLFRTSPDLKVIYILVRPKAGQTLQQRVFQILDSKLFEKVKEVCPNVHEKIRAIYADLNQNDFAISKEDMQELLSCTNIIFHCAATVRFDDTLRHAVQLNVTATRQLLLMASQMPKLEAFIHISTAYSNCNLKHIDEVIYPCPVEPKKIIDSLEWLDDAIIDEITPKLIRDWPNIYTYTKALGEMVVQQESRNLNIAIIRPSIVGATWQEPFPGWVDNINGPNGIIIATGKGFLRAIKATPMAVADVIPVDTVVNLMLAVGWYTAVHRPKSTLVYHITSGNMNPCNWHKMGVQVLATFEKIPFERPFRRPNANFTSNSFTSQYWNAVSHRAPAIIYDCYLRLTGRKPRMTKLMNRLLRTVSMLEYFINRSWEWSTYNTEMLMSELSPEDQRVFNFDVRQLNWLEYIENYVLGVKKYLLKEDMAGIPKAKQRLKRLRNIHYLFNTALFLIAWRLLIARSQMARNVWFFIM

SEQ ID NO: 862639 - protein, 515 aa, Homo sapiens; identical to SEQ ID NO: 862635

SEQ ID NO: 862640 - protein, 453 aa, Homo sapiens
MLFEKVKEVCPNVHEKIRAIYADLNQNDFAISKEDMQELLSCTNIIFHCAATVRFDDTLRHAVQLNVTATRQLLLMASQMPKLEAFIHISTAYSNCNLKHIDEVIYPCPVEPKKIIDSLEWLDDAIIDEITPKLIRDWPNIYTYTKALGEMVVQQESRNLNIAIIRPSIVGATWQEPFPGWVDNINGPNGIIIATGKGFLRAIKATPMAVADVIPVDTVVNLMLAVGWYTAVHRPKSTLVYHITSGNMNPCNWHKMGVQVLATFEKIPFERPFRRPNANFTSNSFTSQYWNAVSHRAPAIIYDCYLRLTGRKPRMTKLMNRLLRTVSMLEYFINRSWEWSTYNTEMLMSELSPEDQRVFNFDVRQLNWLEYIENYVLGVKKYLLKEDMAGIPKAKQRLKRLRNIHYLFNTALFLIAWRLLIARSQMARNVWFFIVSFCYKFLSYFRASSTLKV

SEQ ID NO: 862641 - protein, 1127 aa, Homo sapiens
MAENKGGGEAESGGGGSGSAPVTAGAAGPAAQEAEPPLTAVLVEEEEEEGGRAGAEGGAAGPDDGGVAAASSGSAQAASSPAASVGTGVAGGAVSTPAPAPASAPAPGPSAGPPPGPPASLLDTCAVCQQSLQSRREAEPKLLPCLHSFCLRCLPEPERQLSVPIPGGSNGDIQQVGVIRCPVCRQECRQIDLVDNYFVKDTSEAPSSSDEKSEQVCTSCEDNASAVGFCVECGEWLCKTCIEAHQRVKFTKDHLIRKKEDVSESVGASGQRPVFCPVHKQEQLKLFCETCDRLTCRDCQLLEHKEHRYQFLEEAFQNQKGAIENLLAKLLEKKNYVHFAATQVQNRIKEVNETNKRVEQEIKVAIFTLINEINKKGKSLLQQLENVTKERQMKLLQQQNDITGLSRQVKHVMNFTNWAIASGSSTALLYSKRLITFQLRHILKARCDPVPAANGAIRFHCDPTFWAKNVVNLGNLVIESKPAPGYTPNVVVGQVPPGTNHISKTPGQINLAQLRLQHMQQQVYAQKHQQLQQMRMQQPPAPVPTTTTTTQQHPRQAAPQMLQQQPPRLISVQTMQRGNMNCGAFQAHQMRLAQNAARIPGIPRHSGPQYSMMQPHLQRQHSNPGHAGPFPVVSVHNTTINPTSPTTATMANANRGPTSPSVTAIELIPSVTNPENLPSLPDIPPIQLEDAGSSSLDNLLSRYISGSHLPPQPTSTMNPSPGPSALSPGSSGLSNSHTPVRPPSTSSTGSRGSCGSSGRTAEKTSLSFKSDQVKVKQEPGTEDEICSFSGGVKQEKTEDGRRSACMLSSPESSLTPPLSTNLHLESELDALASLENHVKTEPADMNESCKQSGLSSLVNGKSPIRSLMHRSARIGGDGNNKDDDPNEDWCAVCQNGGDLLCCEKCPKVFHLTCHVPTLLSFPSGDWICTFCRDIGKPEVEYDCDNLQHSKKGKTAQGLSPVDQRKCERLLLYLYCHELSIEFQEPVPASIPNYYKIIKKPMDLSTVKKKLQKKHSQHYQIPDDFVADVRLIFKNCERFNEMMKVVQVYADTQEINLKADSEVAQAGKAVALYFEDKLTEIYSDRTFAPLPEFEQEEDDGEVTEDSDEDFIQPRRKRLKSDERPVHIK

SEQ ID NO: 862642 - protein, 984 aa, Homo sapiens
TPCHKQEQLKLFCETCDRLTCRDCQLLEHKEHVGVIRCPVCRQECRQIDLVDNYFVKDTSEAPSSSDEKSEQVCTSCEDNASAVGFCVECGEWLCKTCIEAHQRVKFTKDHLIRKKEDVSESVGASGQRPVFCPVHKQEQLKLFCETCDRLTCRDCQLLEHKEHRYQFLEEAFQNQKGAIENLLAKLLEKKNYVHFAATQVQNRIKEVNETNKRVEQEIKVAIFTLINEINKKGKSLLQQLENVTKERQMKLLQQQNDITGLSRQVKHVMNFTNWAIASGSSTALLYSKRLITFQLRHILKARCDPVPAANGAIRFHCDPTFWAKNVVNLGNLVIESKPAPGYTPNVVVGQVPPGTNHISKTPGQINLAQLRLQHMQQQVYAQKHQQLQQMRMQQPPAPVPTTTTTTQQHPRQAAPQMLQQQPPRLISVQTMQRGNMNCGAFQAHQMRLAQNAARIPGIPRHSGPQYSMMQPHLQRQHSNPGHAGPFPVVSVHNTTINPTSPTTATMANANRGPTSPSVTAIELIPSVTNPENLPSLPDIPPIQLEDAGSSSLDNLLSRYISGSHLPPQPTSTMNPSPGPSALSPGSSGLSNSHTPVRPPSTSSTGSRGSCGSSGRTAEKTSLSFKSDQVKVKQEPGTEDEICSFSGGVKQEKTEDGRRSACMLSSPESSLTPPLSTNLHLESELDALASLENHVKTEPADMNESCKQSGLSSLVNGKSPIRSLMHRSARIGGDGNNKDDDPNEDWCAVCQNGGDLLCCEKCPKVFHLTCHVPTLLSFPSGDWICTFCRDIGKPEVEYDCDNLQHSKKGKTAQGLSPVDQRKCERLLLYLYCHELSIEFQEPVPASIPNYYKIIKKPMDLSTVKKKLQKKHSQHYQIPDDFVADVRLIFKNCERFNEMMKVVQVYADTQEINLKADSEVAQAGKAVALYFEDKLTEIYSDRTFAPLPEFEQEEDDGEVTEDSDEDFIQPRRKRLKSDERPVHIK

SEQ ID NO: 862643 - protein, 979 aa, Homo sapiens
MFANISFRNVESIRWSGLQFSSFDIAFVGVIRCPVCRQECRQIDLVDNYFVKDTSEAPSSSDEKSEQVCTSCEDNASAVGFCVECGEWLCKTCIEAHQRVKFTKDHLIRKKEDVSESVGASGQRPVFCPVHKQEQLKLFCETCDRLTCRDCQLLEHKEHRYQFLEEAFQNQKGAIENLLAKLLEKKNYVHFAATQVQNRIKEVNETNKRVEQEIKVAIFTLINEINKKGKSLLQQLENVTKERQMKLLQQQNDITGLSRQVKHVMNFTNWAIASGSSTALLYSKRLITFQLRHILKARCDPVPAANGAIRFHCDPTFWAKNVVNLGNLVIESKPAPGYTPNVVVGQVPPGTNHISKTPGQINLAQLRLQHMQQQVYAQKHQQLQQMRMQQPPAPVPTTTTTTQQHPRQAAPQMLQQQPPRLISVQTMQRGNMNCGAFQAHQMRLAQNAARIPGIPRHSGPQYSMMQPHLQRQHSNPGHAGPFPVVSVHNTTINPTSPTTATMANANRGPTSPSVTAIELIPSVTNPENLPSLPDIPPIQLEDAGSSSLDNLLSRYISGSHLPPQPTSTMNPSPGPSALSPGSSGLSNSHTPVRPPSTSSTGSRGSCGSSGRTAEKTSLSFKSDQVKVKQEPGTEDEICSFSGGVKQEKTEDGRRSACMLSSPESSLTPPLSTNLHLESELDALASLENHVKTEPADMNESCKQSGLSSLVNGKSPIRSLMHRSARIGGDGNNKDDDPNEDWCAVCQNGGDLLCCEKCPKVFHLTCHVPTLLSFPSGDWICTFCRDIGKPEVEYDCDNLQHSKKGKTAQGLSPVDQRKCERLLLYLYCHELSIEFQEPVPASIPNYYKIIKKPMDLSTVKKKLQKKHSQHYQIPDDFVADVRLIFKNCERFNEMMKVVQVYADTQEINLKADSEVAQAGKAVALYFEDKLTEIYSDRTFAPLPEFEQEEDDGEVTEDSDEDFIQPRRKRLKSDERPVHIK

SEQ ID NO: 862644 - protein, 609 aa, Homo sapiens
MQQQVYAQKHQQLQQMRMQQPPAPVPTTTTTTQQHPRQAAPQMLQQQPPRLISVQTMQRGNMNCGAFQAHQMRLAQNAARIPGIPRHSGPQYSMMQPHLQRQHSNPGHAGPFPVVSVHNTTINPTSPTTATMANANRGPTSPSVTAIELIPSVTNPENLPSLPDIPPIQLEDAGSSSLDNLLSRYISGSHLPPQPTSTMNPSPGPSALSPGSSGLSNSHTPVRPPSTSSTGSRGSCGSSGRTAEKTSLSFKSDQVKVKQEPGTEDEICSFSGGVKQEKTEDGRRSACMLSSPESSLTPPLSTNLHLESELDALASLENHVKTEPADMNESCKQSGLSSLVNGKSPIRSLMHRSARIGGDGNNKDDDPNEDWCAVCQNGGDLLCCEKCPKVFHLTCHVPTLLSFPSGDWICTFCRDIGKPEVEYDCDNLQHSKKGKTAQGLSPVDQRKCERLLLYLYCHELSIEFQEPVPASIPNYYKIIKKPMDLSTVKKKLQKKHSQHYQIPDDFVADVRLIFKNCERFNEMMKVVQVYADTQEINLKADSEVAQAGKAVALYFEDKLTEIYSDRTFAPLPEFEQEEDDGEVTEDSDEDFIQPRRKRLKSDERPVHIK

SEQ ID NO: 862645 - protein, 917 aa, Homo sapiens
TPCHKQEQLKLFCETCDRLTCRDCQLLEHKEHVGVIRCPVCRQECRQIDLVDNYFVKDTSEAPSSSDEKSEQVCTSCEDNASAVGFCVECGEWLCKTCIEAHQRVKFTKDHLIRKKEDVSESVGASGQRPVFCPVHKQEQLKLFCETCDRLTCRDCQLLEHKEHRYQFLEEAFQNQKGAIENLLAKLLEKKNYVHFAATQVQNRIKEVNETNKRVEQEIKVAIFTLINEINKKGKSLLQQLENVTKERQMKLLQQQNDITGLSRQVKHVMNFTNWAIASGSSTALLYSKRLITFQLRHILKARCDPVPAANGAIRFHCDPTFWAKNVVNLGNLVIESKPAPGYTPNVVVGQVPPGTNHISKTPGQINLAQLRLQHMQQQVYAQKHQQLQQMRMQQPPAPVPTTTTTTQQHPRQAAPQMLQQQPPRLISVQTMQRGNMNCGAFQAHQMRLAQNAARIPGIPRHSGPQYSMMQPHLQRQLEDAGSSSLDNLLSRYISGSHLPPQPTSTMNPSPGPSALSPGSSGLSNSHTPVRPPSTSSTGSRGSCGSSGRTAEKTSLSFKSDQVKVKQEPGTEDEICSFSGGVKQEKTEDGRRSACMLSSPESSLTPPLSTNLHLESELDALASLENHVKTEPADMNESCKQSGLSSLVNGKSPIRSLMHRSARIGGDGNNKDDDPNEDWCAVCQNGGDLLCCEKCPKVFHLTCHVPTLLSFPSGDWICTFCRDIGKPEVEYDCDNLQHSKKGKTAQGLSPVDQRKCERLLLYLYCHELSIEFQEPVPASIPNYYKIIKKPMDLSTVKKKLQKKHSQHYQIPDDFVADVRLIFKNCERFNEMMKVVQVYADTQEINLKADSEVAQAGKAVALYFEDKLTEIYSDRTFAPLPEFEQEEDDGEVTEDSDEDFIQPRRKRLKSDERPVHIK

SEQ ID NO: 862646 - protein, 984 aa, Homo sapiens; identical to SEQ ID NO: 862642

SEQ ID NO: 862647 - protein, 110 aa, Homo sapiens
MDLSTVKKKLQKKHSQHYQIPDDFVADVRLIFKNCERFNEADSEVAQAGKAVALYFEDKLTEIYSDRTFAPLPEFEQEEDDGEVTEDSDEDFIQPRRKRLKSDERPVHIK

SEQ ID NO: 862648 - protein, 984 aa, Homo sapiens; identical to SEQ ID NO: 862642

SEQ ID NO: 862649 - protein, 984 aa, Homo sapiens; identical to SEQ ID NO: 862642

SEQ ID NO: 862650 - protein, 941 aa, Homo sapiens
TPCHKQEQLKLFCETCDRLTCRDCQLLEHKEHVGVIRCPVCRQECRQIDLVDNYFVKDTSEAPSSSDEKSEQVCTSCEDNASAVGFCVECGEWLCKTCIEAHQRVKFTKDHLIRKKEDVSESVGASGQRPVFCPVHKQEQLKLFCETCDRLTCRDCQLLEHKEHRYQFLEEAFQNQKGAIENLLAKLLEKKNYVHFAATQVQNRIKEVNETNKRVEQEIKVAIFTLINEINKKGKSLLQQLENVTKERQMKLLQQQNDITGLSRQVKHVMNFTNWAIASGSSTALLYSKRLITFQLRHILKARCDPVPAANGAIRFHCDPTFWAKNVVNLGNLVIESKPAPGYTPNVVVGQVPPGTNHISKTPGQINLAQLRLQHMQQQVYAQKHQQLQQMRMQQPPAPVPTTTTTTQQHPRQAAPQMLQQQPPRLISVQTMQRGNMNCGAFQAHQMRLAQNAARIPGIPRHSGPQYSMMQPHLQRQHSNPGHAGPFPVVSVHNTTINPTSPTTATMANANRGPTSPSVTAIELIPSVTNPENLPSLPDIPPIQLEDAGSSSLDNLLSRYISGSHLPPQPTSTMNPSPGPSALSPGSSGLSNSHTPVRPPSTSSTGSRGSCGSSGRTAEKTSLSFKSDQVKVKQEPGTEDEICSFSGGVKQEKTEDGRRSACMLSSPESSLTPPLSTNLHLESELDALASLENHVKTEPADMNESCKQSGLSSLVNGKSPIRSLMHRSARIGGDGNNKDDDPNEDWCAVCQNGGDLLCCEKCPKVFHLTCHVPTLLSFPSGDWICTFCRDIGKPEVEYDCDNLQHSKKGKTAQGLSPVDQRKCERLLLYLYCHELSIEFQEPVPASIPNYYKIIKKPMDLSTVKKKLQKKHSQHYQIPDDFVADVRLIFKNCERFNEMMKVVQVYADTQEINLKVSFSDHANLVKEYALPIGEYSYLLLAG

SEQ ID NO: 862651 - protein, 547 aa, Homo sapiens
TPCHKQEQLKLFCETCDRLTCRDCQLLEHKEHVGVIRCPVCRQECRQIDLVDNYFVKDTSEAPSSSDEKSEQVCTSCEDNASAVGFCVECGEWLCKTCIEAHQRVKFTKDHLIRKKEDVSESVGASGQRPVFCPVHKQEQLKLFCETCDRLTCRDCQLLEHKEHRYQFLEEAFQNQKGAIENLLAKLLEKKNYVHFAATQVQNRIKEVNETNKRVEQEIKVAIFTLINEINKKGKSLLQQLENVTKERQMKLLQQQNDITGLSRQVKHVMNFTNWAIASGSSTALLYSKRLITFQLRHILKARCDPVPAANGAIRFHCDPTFWAKNVVNLGNLVIESKPAPGYTPNVVVGQVPPGTNHISKTPGQINLAQLRLQHMQQQVYAQKHQQLQQMRMQQPPAPVPTTTTTTQQHPRQAAPQMLQQQPPRLISVQTMQRGNMNCGAFQAHQMRLAQNAARIPGIPRHSGPQYSMMQPHLQRQHSNPGHAGPFPVVSVHNTTINPTSPTTATMANANRGPTSPSVTAIELIPSVTNPENLPSLPDIPPIQVCI

SEQ ID NO: 862652 - protein, 967 aa, Homo sapiens
TPCHKQEQLKLFCETCDRLTCRDCQLLEHKEHVGVIRCPVCRQECRQIDLVDNYFVKDTSEAPSSSDEKSEQVCTSCEDNASAVGFCVECGEWLCKTCIEAHQRVKFTKDHLIRKKEDVSESVGASGQRPVFCPVHKQEQLKLFCETCDRLTCRDCQLLEHKEHRYQFLEEAFQNQKGAIENLLAKLLEKKNYVHFAATQVQNRIKEVNETNKRVEQEIKVAIFTLINEINKKGKSLLQQLENVTKERQMKLLQQQNDITGLSRQVKHVMNFTNWAIASGSSTALLYSKRLITFQLRHILKARCDPVPAANGAIRFHCDPTFWAKNVVNLGNLVIESKPAPGYTPNVVVGQVPPGTNHISKTPGQINLAQLRLQHMQQQVYAQKHQQLQQMRMQQPPAPVPTTTTTTQQHPRQAAPQMLQQQPPRLISVQTMQRGNMNCGAFQAHQMRLAQNAARIPGIPRHSGPQYSMMQPHLQRQHSNPGHAGPFPVVSVHNTTINPTSPTTATMANANRGPTSPSVTAIELIPSVTNPENLPSLPDIPPIQLEDAGSSSLDNLLSRYISGSHLPPQPTSTMNPSPGPSALSPGSSGLSNSHTPVRPPSTSSTGSRGSCGSSGRTAEKTSLSFKSDQVKVKQEPGTEDEICSFSGGVKQEKTEDGRRSACMLSSPESSLTPPLSTNLHLESELDALASLENHVKTEPADMNESCKQSGLSSLVNGKSPIRSLMHRSARIGGDGNNKDDDPNEDWCAVCQNGGDLLCCEKCPKVFHLTCHVPTLLSFPSGDWICTFCRDIGKPEVEYDCDNLQHSKKGKTAQGLSPVDQRKCERLLLYLYCHELSIEFQEPVPASIPNYYKIIKKPMDLSTVKKKLQKKHSQHYQIPDDFVADVRLIFKNCERFNEADSEVAQAGKAVALYFEDKLTEIYSDRTFAPLPEFEQEEDDGEVTEDSDEDFIQPRRKRLKSDERPVHIK

SEQ ID NO: 862653 - protein, 609 aa, Homo sapiens; identical to SEQ ID NO: 862644

SEQ ID NO: 862654 - protein, 976 aa, Homo sapiens
TPCHKQEQLKLFCETCDRLTCRDCQLLEHKEHVGVIRCPVCRQECRQIDLVDNYFVKDTSEAPSSSDEKSEQVCTSCEDNASAVGFCVECGEWLCKTCIEAHQRVKFTKDHLIRKKEDVSESVGASGQRPVFCPVHKQEQLKLFCETCDRLTCRDCQLLEHKEHRYQFLEEAFQNQKGAIENLLAKLLEKKNYVHFAATQVQNRIKEVNETNKRVEQEIKVAIFTLINEINKKGKSLLQQLENVTKERQMKLLQQQNDITGLSRQVKHVMNFTNWAIASGSSTALLYSKRLITFQLRHILKARCDPVPAANGAIRFHCDPTFWAKNVVNLGNLVIESKPAPGYTPNVVVGQVPPGTNHISKTPGQINLAQLRLQHMQQQVYAQKHQQLQQMRMQQPPAPVPTTTTTTQQHPRQAAPQMLQQQPPRLISVQTMQRGNMNCGAFQAHQMRLAQNAARIPGIPRHSGPQYSMMQPHLQRQHSNPGHAGPFPVVSVHNTTINPTSPTTATMANANRGPTSPSVTAIELIPSVTNPENLPSLPDIPPIQLEDAGSSSLDNLLSRYISGSHLPPQPTSTMNPSPGPSALSPGSSGLSNSHTPVRPPSTSSTGSRGSCGSSGRTAEKTSLSFKSDQVKVKQEPGTEDEICSFSGGVKQEKTEDGRRSACMLSSPESSLTPPLSTNLHLESELDALASLENHVKTEPADMNESCKQSGLSSLVNGKSPIRSLMHRSARIGGDGNNKDDDPNEDWCAVCQNGGDLLCCEKCPKVFHLTCHVPTLLSFPSGDWICTFCRDIGKPEVEYDCDNLQHSKKGKTAQGLSPVDQRKCERLLLYLYCHELSIEFQEPVPASIPNYYKIIKKPMDLSTVKKKLQKKHSQHYQIPDDFVADVRLIFKNCERFNEMMKVVQVYADTQEINLKADSEVAQAGKAVALYFEDKLTEIYSDRTFAPLPEFEQEEDDGERTDFSKNLQKQLIIEISKY

SEQ ID NO: 862655 - protein, 984 aa, Homo sapiens; identical to SEQ ID NO: 862642

SEQ ID NO: 862656 - protein, 566 aa, Homo sapiens
TPCHKQEQLKLFCETCDRLTCRDCQLLEHKEHVGVIRCPVCRQECRQIDLVDNYFVKDTSEAPSSSDEKSEQVCTSCEDNASAVGFCVECGEWLCKTCIEAHQRVKFTKDHLIRKKEDVSESVGASGQRPVFCPVHKQEQLKLFCETCDRLTCRDCQLLEHKEHRYQFLEEAFQNQKGAIENLLAKLLEKKNYVHFAATQVQNRIKEVNETNKRVEQEIKVAIFTLINEINKKGKSLLQQLENVTKERQMKLLQQQNDITGLSRQVKHVMNFTNWAIASGSSTALLYSKRLITFQLRHILKARCDPVPAANGAIRFHCDPTFWAKNVVNLGNLVIESKPAPGYTPNVVVGQVPPGTNHISKTPGQINLAQLRLQHMQQQVYAQKHQQLQQMRMQQPPAPVPTTTTTTQQHPRQAAPQMLQQQPPRLISVQTMQRGNMNCGAFQAHQMRLAQNAARIPGIPRHSGPQYSMMQPHLQRQHSNPGHAGPFPVVSVHNTTINPTSPTTATMANANRGPTSPSVTAIELIPSVTNPENLPSLPDIPPIQANVVPMMHSWYEFGAREKTQDQ

SEQ ID NO: 862657 - protein, 782 aa, Homo sapiens
TPCHKQEQLKLFCETCDRLTCRDCQLLEHKEHVGVIRCPVCRQECRQIDLVDNYFVKDTSEAPSSSDEKSEQVCTSCEDNASAVGFCVECGEWLCKTCIEAHQRVKFTKDHLIRKKEDVSESVGASGQRPVFCPVHKQEQLKLFCETCDRLTCRDCQLLEHKEHRYQFLEEAFQNQKGAIENLLAKLLEKKNYVHFAATQVQNRIKEVNETNKRVEQEIKVAIFTLINEINKKGKSLLQQLENVTKERQMKLLQQQNDITGLSRQVKHVMNFTNWAIASGSSTALLYSKRLITFQLRHILKARCDPVPAANGAIRFHCDPTFWAKNVVNLGNLVIESKPAPGYTPNVVVGQVPPGTNHISKTPGQINLAQLRLQHMQQQVYAQKHQQLQQMRMQQPPAPVPTTTTTTQQHPRQAAPQMLQQQPPRLISVQTMQRGNMNCGAFQAHQMRLAQNAARIPGIPRHSGPQYSMMQPHLQRQHSNPGHAGPFPVVSVHNTTINPTSPTTATMANANRGPTSPSVTAIELIPSVTNPENLPSLPDIPPIQLEDAGSSSLDNLLSRYISGSHLPPQPTSTMNPSPGPSALSPGSSGLSNSHTPVRPPSTSSTGSRGSCGSSGRTAEKTSLSFKSDQVKVKQEPGTEDEICSFSGGVKQEKTEDGRRSACMLSSPESSLTPPLSTNLHLESELDALASLENHVKTEPADMNESCKQSGLSSLVNGKSPIRSLMHRSARIGGDGNNKDDDPNEDWCAVCQNGGDLLCCEKCPKVFHLTCHVPTLLSFPRYQ

SEQ ID NO: 862658 - protein, 1110 aa, Homo sapiens
MAENKGGGEAESGGGGSGSAPVTAGAAGPAAQEAEPPLTAVLVEEEEEEGGRAGAEGGAAGPDDGGVAAASSGSAQAASSPAASVGTGVAGGAVSTPAPAPASAPAPGPSAGPPPGPPASLLDTCAVCQQSLQSRREAEPKLLPCLHSFCLRCLPEPERQLSVPIPGGSNGDIQQVGVIRCPVCRQECRQIDLVDNYFVKDTSEAPSSSDEKSEQVCTSCEDNASAVGFCVECGEWLCKTCIEAHQRVKFTKDHLIRKKEDVSESVGASGQRPVFCPVHKQEQLKLFCETCDRLTCRDCQLLEHKEHRYQFLEEAFQNQKGAIENLLAKLLEKKNYVHFAATQVQNRIKEVNETNKRVEQEIKVAIFTLINEINKKGKSLLQQLENVTKERQMKLLQQQNDITGLSRQVKHVMNFTNWAIASGSSTALLYSKRLITFQLRHILKARCDPVPAANGAIRFHCDPTFWAKNVVNLGNLVIESKPAPGYTPNVVVGQVPPGTNHISKTPGQINLAQLRLQHMQQQVYAQKHQQLQQMRMQQPPAPVPTTTTTTQQHPRQAAPQMLQQQPPRLISVQTMQRGNMNCGAFQAHQMRLAQNAARIPGIPRHSGPQYSMMQPHLQRQHSNPGHAGPFPVVSVHNTTINPTSPTTATMANANRGPTSPSVTAIELIPSVTNPENLPSLPDIPPIQLEDAGSSSLDNLLSRYISGSHLPPQPTSTMNPSPGPSALSPGSSGLSNSHTPVRPPSTSSTGSRGSCGSSGRTAEKTSLSFKSDQVKVKQEPGTEDEICSFSGGVKQEKTEDGRRSACMLSSPESSLTPPLSTNLHLESELDALASLENHVKTEPADMNESCKQSGLSSLVNGKSPIRSLMHRSARIGGDGNNKDDDPNEDWCAVCQNGGDLLCCEKCPKVFHLTCHVPTLLSFPSGDWICTFCRDIGKPEVEYDCDNLQHSKKGKTAQGLSPVDQRKCERLLLYLYCHELSIEFQEPVPASIPNYYKIIKKPMDLSTVKKKLQKKHSQHYQIPDDFVADVRLIFKNCERFNEADSEVAQAGKAVALYFEDKLTEIYSDRTFAPLPEFEQEEDDGEVTEDSDEDFIQPRRKRLKSDERPVHIK

SEQ ID NO: 862659 - protein, 182 aa, Homo sapiens
RRRRLPACSLVAAEPAAGRLRQPRPGRPGPRQRGRMALKRIQKELTDLQRDPPAQCSAGPVGDDLFHWQATIMGPNDSPYQGGVFFLTIHFPTDYPFKPPKVAFTTKIYHPNINSNGSICLDILRSQWSPALTVSKVLLSICSLLCDPNPDDPLVPEIAHTYKADREKYNRLAREWTQKYAM

SEQ ID NO: 862660 - protein, 167 aa, Homo sapiens
MVPASASGEASGSLQSWQKAKEKQACHLELTDLQRDPPAQCSAGPVGDDLFHWQATIMGPNDSPYQGGVFFLTIHFPTDYPFKPPKVAFTTKIYHPNINSNGSICLDILRSQWSPALTVSKVLLSICSLLCDPNPDDPLVPEIAHTYKADREKYNRLAREWTQKYAM

SEQ ID NO: 862661 - protein, 171 aa, Homo sapiens
MALKRIQKELTDLQRDPPAQCSAGPVGDDLFHWQATIMGPNDSPYQGGVFFLTIHFPTDYPFKPPKVRSLSQLPCCLDEGQHVTRGPSSQVAFTTKIYHPNINSNGSICLDILRSQWSPALTVSKVLLSICSLLCDPNPDDPLVPEIAHTYKADREKYNRLAREWTQKYAM

SEQ ID NO: 862662 - protein, 157 aa, Homo sapiens
MALKRIQKELTDLQRDPPAQCSAGPVGDDLFHWQATIMGPNDSPYQGGVFFLTIHFPTDYPFKPPKVAFTTKIYHPNINSNGSICLDILRSQWSPALTVSKVLLSICSLLCDPNPDDPLVPEIAHTYKADREKTQCHPGCPGQSRLCSHLICCRTTS

SEQ ID NO: 862663 - protein, 171 aa, Homo sapiens
MALKRIQKELTDLQRDPPAQCSAGPVGDDLFHWQATIMGPNDSPYQGGVFFLTIHFPTDYPFKPPKVAFTTKIYHPNINSNGSICLDILRSQWSPALTVSKVLLSICSLLCDPNPDDPLVPEIAHTYKADREKYNRLAREWTQKYAITQCHPGCPGQSRLCSHLICCRTTS

SEQ ID NO: 862664 - protein, 147 aa, Homo sapiens
MALKRIQKELTDLQRDPPAQCSAGPVGDDLFHWQATIMGPNDSPYQGGVFFLTIHFPTDYPFKPPKVAFTTKIYHPNINSNGSICLDILRSQWSPALTVSKVLLSICSLLCDPNPDDPLVPEIAHTYKADREKYNRLAREWTQKYAM

SEQ ID NO: 862665 - protein, 119 aa, Homo sapiens
RERERERERERERERERERERERERAAGRLRQPRPGRPGPRQRGRMALKRIQKELTDLQRDPPAQCSAGPVGDDLFHWQATIMGPNDSPYQGGVFFLTIHFPTDYPFKPPKVRSLSQLP

SEQ ID NO: 862666 - protein, 147 aa, Homo sapiens; identical to SEQ ID NO: 862664

SEQ ID NO: 862667 - protein, 109 aa, Homo sapiens
MTNDSPYQGGVFFLTIHFPTDYPFKPPKVAFTTKIYHPNINSNGSICLDILRSQWSPALTVSKVLLSICSLLCDPNPDDPLVPEIAHTYKADREKYNRLAREWTQKYAM

SEQ ID NO: 862668 - protein, 140 aa, Homo sapiens
MVPASASGEASGSLQSWQKAKEKQACHLELTDLQRDPPAQCSAGPVGDDLFHWQATIMGPNDSPYQGGVFFLTIHFPTDYPFKPPKSFALVAQDGVQWRDLGSPQHPPPRLLSQPKFITLISTAMAASALISCGLSGLQR

SEQ ID NO: 862669 - protein, 182 aa, Homo sapiens; identical to SEQ ID NO: 862659

SEQ ID NO: 862670 - protein, 147 aa, Homo sapiens; identical to SEQ ID NO: 862664

SEQ ID NO: 862671 - protein, 122 aa, Homo sapiens
MALKRIQKELTDLQRDPPAQCSAGPVGDDLFHWQATIMGPNDSPYQGGVFFLTIHFPTDYPFKPPKVAFTTKIYHPNINSNGSICLDILRSQWSPALTVSKGRDADGMLCVLFYTCFYPSTD

SEQ ID NO: 862672 - protein, 167 aa, Homo sapiens
MVPASASGEASGSLQSWQKAKEKQACHLELTDLQRDPPAQCSAGPVGDDLFHWQATIMGPNDSPYQGGVFFLTIHFPTDYPFKPPKVAFTTKIYHPNINSNGSICLDILRSQWSPSDFKSEGDKEEGQGLCHGHCYLFDEAGQVYVPFCKAGTLMGAQRDVDLVVHV

SEQ ID NO: 862673 - protein, 542 aa, Homo sapiens
MNGKRPAEPGPARVGKKGKKEVMAEFSDAVTEETLKKQVAEAWSRRTPFSHEVIVMDMDPFLHCVIPNFIQSQDFLEGLQKELMNLDFHEKYNDLYKFQQSDDLKKRREPHISTLRKILFEDFRSWLSDISKIDLESTIDMSCAKYEFTDALLCHDDELEGRRIAFILYLVPPWDRSMGGTLDLYSIDEHFQPKQIVKSLIPSWNKLVFFEVSPVSFHQVSEVLSEEKSRLSISGWFHGPSLTRPPNYFEPPIPRSPHIPQDHEILYDWINPTYLDMDYQVQIQEEFEESSEILLKEFLKPEKFTKVCEALEHGHVEWSSRGPPNKRFYEKAEESKLPEILKECMKLFRSEALFLLLSNFTGLKLHFLAPSEEDEMNDKKEAETTDITEEGTSHSPPEPENNQMAISNNSQQSNEQTDPEPEENETKKESSVPMCQGELRHWKTGHYTLIHDHSKAEFALDLILYCGCEGWEPEYGGFTSYIAKGEDEELLTVNPESNSLALVYRDRETLKFVKHINHRSLEQKKTFPNRTGFWDFSFIYYE

SEQ ID NO: 862674 - protein, 506 aa, Homo sapiens
NTIKGTCRELQYPQEEVIVMDMDPFLHCVIPNFIQSQDFLEGLQKELMNLDFHEKYNDLYKFQQSDDLKKRREPHISTLRKILFEDFRSWLSDISKIDLESTIDMSCAKYEFTDALLCHDDELEGRRIAFILYLVPPWDRSMGGTLDLYSIDEHFQPKQIVKSLIPSWNKLVFFEVSPVSFHQVSEVLSEEKSRLSISGWFHGPSLTRPPNYFEPPIPRSPHIPQDHEILYDWINPTYLDMDYQVQIQEEFEESSEILLKEFLKPEKFTKVCEALEHGHVEWSSRGPPNKRFYEKAEESKLPEILKECMKLFRSEALFLLLSNFTGLKLHFLAPSEEDEMNDKKEAETTDITEEGTSHSPPEPENNQMAISNNSQQSNEQTDPEPEENETKKESSVPMCQGELRHWKTGHYTLIHDHSKAEFALDLILYCGCEGWEPEYGGFTSYIAKGEDEELLTVNPESNSLALVYRDRETLKFVKHINHRSLEQKKTFPNRTGFWDFSFIYYE

SEQ ID NO: 862675 - protein, 526 aa, Homo sapiens
MNGKRPAEPGPARVGKKGKKEVMAEFSDAVTEETLKVIVMDMDPFLHCVIPNFIQSQDFLEGLQKELMNLDFHEKYNDLYKFQQSDDLKKRREPHISTLRKILFEDFRSWLSDISKIDLESTIDMSCAKYEFTDALLCHDDELEGRRIAFILYLVPPWDRSMGGTLDLYSIDEHFQPKQIVKSLIPSWNKLVFFEVSPVSFHQVSEVLSEEKSRLSISGWFHGPSLTRPPNYFEPPIPRSPHIPQDHEILYDWINPTYLDMDYQVQIQEEFEESSEILLKEFLKPEKFTKVCEALEHGHVEWSSRGPPNKRFYEKAEESKLPEILKECMKLFRSEALFLLLSNFTGLKLHFLAPSEEDEMNDKKEAETTDITEEGTSHSPPEPENNQMAISNNSQQSNEQTDPEPEENETKKESSVPMCQGELRHWKTGHYTLIHDHSKAEFALDLILYCGCEGWEPEYGGFTSYIAKGEDEELLTVNPESNSLALVYRDRETLKFVKHINHRSLEQKKTFPNRTGFWDFSFIYYE

SEQ ID NO: 862676 - protein, 542 aa, Homo sapiens; identical to SEQ ID NO: 862673

SEQ ID NO: 862677 - protein, 526 aa, Homo sapiens; identical to SEQ ID NO: 862675

SEQ ID NO: 862678 - protein, 485 aa, Homo sapiens
MNGKRPAEPGPARVGKKGKKEVMAEFSDAVTEETLKVIVMDMDPFLHCVIPNFIQSQDFLEGLQKELMNLDFHEKYNDLYKFQQSDDLKKRREPHISTLRKILFEDFRSWLSDISKIDLESTIDMSCAKYEFTDALLCHDDELEGRRIAFILYLVPPWDRSMGGTLDLYSIDEHFQPKQIVKSLIPSWNKLVFFEVSPVSFHQVSEVLSEEKSRLSISGWFHGPSLTRPPNYFEPPIPRSPHIPQDHEILYDWINPTYLDMDYQVQIQEEFEESSEILLKEFLKPEKFTKVCEALEHGHVEWSSRGPPNKRFYEKAEESKLPEILKECMKLFRSEALFLLLSNFTGLKLHFLAPSEEDEMNDKKEAETTDITEEGTSHSPPEPENNQMAISNNSQQSNEQTDPEPEENETKKESSVPMCQGELRHWKTGHYTLIHDHSKAEFALDLILYCGCEGWEPEYGGFTSYIAKGEDEELLQLIPSWGPSR

SEQ ID NO: 862679 - protein, 145 aa, Homo sapiens
MNGKRPAEPGPARVGKKGKKEVMAEFSDAVTEETLKKQVAEAWSRRTPFSHEVIVMDMDPFLHCVIPNFIQSQDFLEGLQKELMNLDFHEKYNDLYKFQQSDDLKKRREPHISTLRKTSNHICWVLICARQSSKCFKCYNIVYVI

SEQ ID NO: 862680 - protein, 506 aa, Homo sapiens; identical to SEQ ID NO: 862674

SEQ ID NO: 862681 - protein, 542 aa, Homo sapiens; identical to SEQ ID NO: 862673

SEQ ID NO: 862682 - protein, 225 aa, Homo sapiens
MNNLTLLFFRFYEKAEESKLPEILKECMKLFRSEALFLLLSNFTGLKLHFLAPSEEDEMNDKKEAETTDITEEGTSHSPPEPENNQMAISNNSQQSNEQTDPEPEENETKKESSVPMCQGELRHWKTGHYTLIHDHSKAEFALDLILYCGCEGWEPEYGGFTSYIAKGEDEELLTVNPESNSLALVYRDRETLKFVKHINHRSLEQKKTFPNRTGFWDFSFIYYE

SEQ ID NO: 862683 - protein, 237 aa, Homo sapiens
MNGKRPAEPGPARVGKKGKKEVMAEFSDAVTEETLKVIVMDMDPFLHCVIPNFIQSQDFLEGLQKELMNLDFHEKYNDLYKFQQSDDLKKRREPHISTLRKILFEDFRSWLSDISKIDLESTIDMSCAKYEFTDALLCHDDELEGRRIAFILYLVPPWDRSMGGTLDLYSIDEHFQPKQIVKSLIPSWNKLVFFEVSPVSFHQVSEVLSEEKSRLSISGWFHGPSLTRPPNYFEPPL

SEQ ID NO: 862684 - protein, 108 aa, Homo sapiens
MVAVEGMPTVLGPVRPASAAAHPGWSRARGQPDLTMTRCALLLLMVLMLGRVLVVPVTPIPTFQLRPQNSPQTTPRPAASESPSAAPTWPWAAQSHCSPTRHPGSRIV

SEQ ID NO: 862685 - protein, 3023 aa, Homo sapiens
MTLRLLVAALCAGILAEAPRVRAQHRERVTCTRLYAADIVFLLDGSSSIGRSNFREVRSFLEGLVLPFSGAASAQGVRFATVQYSDDPRTEFGLDALGSGGDVIRAIRELSYKGGNTRTGAAILHVADHVFLPQLARPGVPKVCILITDGKSQDLVDTAAQRLKGQGVKLFAVGIKNADPEELKRVASQPTSDFFFFVNDFSILRTLLPLVSRRVCTTAGGVPVTRPPDDSTSAPRDLVLSEPSSQSLRVQWTAASGPVTGYKVQYTPLTGLGQPLPSERQEVNVPAGETSVRLRGLRPLTEYQVTVIALYANSIGEAVSGTARTTALEGPELTIQNTTAHSLLVAWRSVPGATGYRVTWRVLSGGPTQQQELGPGQGSVLLRDLEPGTDYEVTVSTLFGRSVGPATSLMARTDASVEQTLRPVILGPTSILLSWNLVPEARGYRLEWRRETGLEPPQKVVLPSDVTRYQLDGLQPGTEYRLTLYTLLEGHEVATPATVVPTGPELPVSPVTDLQATELPGQRVRVSWSPVPGATQYRIIVRSTQGVERTLVLPGSQTAFDLDDVQAGLSYTVRVSARVGPREGSASVLTVRREPETPLAVPGLRVVVSDATRVRVAWGPVPGASGFRISWSTGSGPESSQTLPPDSTATDITGLQPGTTYQVAVSVLRGREEGPAAVIVARTDPLGPVRTVHVTQASSSSVTITWTRVPGATGYRVSWHSAHGPEKSQLVSGEATVAELDGLEPDTEYTVHVRAHVAGVDGPPASVVVRTAPEPVGRVSRLQILNASSDVLRITWVGVTGATAYRLAWGRSEGGPMRHQILPGNTDSAEIRGLEGGVSYSVRVTALVGDREGTPVSIVVTTPPEAPPALGTLHVVQRGEHSLRLRWEPVPRAQGFLLHWQPEGGQEQSRVLGPELSSYHLDGLEPATQYRVRLSVLGPAGEGPSAEVTARTESPRVPSIELRVVDTSIDSVTLAWTPVSRASSYILSWRPLRGPGQEVPGSPQTLPGISSSQRVTGLEPGVSYIFSLTPVLDGVRGPEASVTQTPVCPRGLADVVFLPHATQDNAHRAEATRRVLERLVLALGPLGPQAVQVGLLSYSHRPSPLFPLNGSHDLGIILQRIRDMPYMDPSGNNLGTAVVTAHRYMLAPDAPGRRQHVPGVMVLLVDEPLRGDIFSPIREAQASGLNVVMLGMAGADPEQLRRLAPGMDSVQTFFAVDDGPSLDQAVSGLATALCQASFTTQPRPEPCPVYCPKGQKGEPGEMGLRGQVGPPGDPGLPGRTGAPGPQGPPGSATAKGERGFPGADGRPGSPGRAGNPGTPGAPGLKGSPGLPGPRGDPGERGPRGPKGEPGAPGQVIGGEGPGLPGRKGDPGPSGPPGPRGPLGDPGPRGPPGLPGTAMKGDKGDRGERGPPGPGEGGIAPGEPGLPGLPGSPGPQGPVGPPGKKGEKGDSEDGAPGLPGQPGSPGEQGPRGPPGAIGPKGDRGFPGPLGEAGEKGERGPPGPAGSRGLPGVAGRPGAKGPEGPPGPTGRQGEKGEPGRPGDPAVVGPAVAGPKGEKGDVGPAGPRGATGVQGERGPPGLVLPGDPGPKGDPGDRGPIGLTGRAGPPGDSGPPGEKGDPGRPGPPGPVGPRGRDGEVGEKGDEGPPGDPGLPGKAGERGLRGAPGVRGPVGEKGDQGDPGEDGRNGSPGSSGPKGDRGEPGPPGPPGRLVDTGPGAREKGEPGDRGQEGPRGPKGDPGLPGAPGERGIEGFRGPPGPQGDPGVRGPAGEKGDRGPPGLDGRSGLDGKPGAAGPSGPNGAAGKAGDPGRDGLPGLRGEQGLPGPSGPPGLPGKPGEDGKPGLNGKNGEPGDPGEDGRKGEKGDSGASGREGRDGPKGERGAPGILGPQGPPGLPGPVGPPGQGFPGVPGGTGPKGDRGETGSKGEQGLPGERGLRGEPGSVPNVDRLLETAGIKASALREIVETWDESSGSFLPVPERRRGPKGDSGEQGPPGKEGPIGFPGERGLKGDRGDPGPQGPPGLALGERGPPGPSGLAGEPGKPGIPGLPGRAGGVGEAGRPGERGERGEKGERGEQGRDGPPGLPGTPGPPGPPGPKVSVDEPGPGLSGEQGPPGLKGAKGEPGSNGDQGPKGDRGVPGIKGDRGEPGPRGQDGNPGLPGERGMAGPEGKPGLQGPRGPPGPVGGHGDPGPPGAPGLAGPAGPQGPSGLKGEPGETGPPGRGLTGPTGAVGLPGPPGPSGLVGPQGSPGLPGQVGETGKPGAPGRDGASGKDGDRGSPGVPGSPGLPGPVGPKGEPGPTGAPGQAVVGLPGAKGEKGAPGGLAGDLVGEPGAKGDRGLPGPRGEKGEAGRAGEPGDPGEDGQKGAPGPKGFKVCVPRRVPAGVLVVRSLSLIRCLFSSKGDPGVGVPGSPGPPGPPGVKGDLGLPGLPGAPGVVGFPGQTGPRGEMGQPGPSGERGLAGPPGREGIPGPLGPPGPPGSVGPPGASGLKGDKGDPGVGLPGPRGERGEPGIRVRMSYSTAELPSSQLLPLISNLWVNEPNVTIQGEDGRPGQEGPRGLTGPPGSRGERGEKGDVGSAGLKGDKGDSAVILGPPGPRGAKGDMGERGPRGLDGDKGPRGDNGDPGDKGSKGEPGDKGSAGLPGLRGLLGPQGQPGAAGIPGDPGDSLWSLTDSSDLTWTLSLLGSPGKDGVPGIRGEKGDVGFMGPRGLKGERGVKGACGLDGEKGDKGEAGPPGRPGLAGHKGEMGEPGVPGQSGAPGKEGLIGPKGDRGFDGQPGPKGDQGEKGERGTPGIGGFPGPSGNDGSAGPPGPPGSVGPRGPEGLQGQKGERGPPGERVVGAPGVPGAPGERGEQGRPGPAGPRGEKGEAALTEDDIRGFVRQEMSQHCACQGQFIASGSRPLPSYAADTAGSQLHAVPVLRVSHAEEEERVPPEDDEYSEYSEYSVEEYQDPEAPWDSDDPCSLPLDEGSCTAYTLRWYHRAVTGSTEACHPFVYGGCGGNANRFGTREACERRCPPRVVQSQGTGTAQD

SEQ ID NO: 862686 - protein, 2668 aa, Homo sapiens
MTLRLLVAALCAGILAEAPRVRAQHRERVTCTRLYAADIVFLLDGSSSIGRSNFREVRSFLEGLVLPFSGAASAQGVRFATVQYSDDPRTEFGLDALGSGGDVIRAIRELSYKGGNTRTGAAILHVADHVFLPQLARPGVPKVCILITDGKSQDLVDTAAQRLKGQGVKLFAVGIKNADPEELKRVASQPTSDFFFFVNDFSILRTLLPLVSRRVCTTAGGVPVTRPPDDSTSAPRDLVLSEPSSQSLRVQWTAASGPVTGYKVQYTPLTGLGQPLPSERQEVNVPAGETSVRLRGLRPLTEYQVTVIALYANSIGEAVSGTARTTALEGPELTIQNTTAHSLLVAWRSVPGATGYRVTWRVLSGGPTQQQELGPGQGSVLLRDLEPGTDYEVTVSTLFGRSVGPATSLMARTDASVEQTLRPVILGPTSILLSWNLVPEARGYRLEWRRETGLEPPQKVVLPSDVTRYQLDGLQPGTEYRLTLYTLLEGHEVATPATVVPTGPELPVSPVTDLQATELPGQRVRVSWSPVPGATQYRIIVRSTQGVERTLVLPGSQTAFDLDDVQAGLSYTVRVSARVGPREGSASVLTVRREPETPLAVPGLRVVVSDATRVRVAWGPVPGASGFRISWSTGSGPESSQTLPPDSTATDITGLQPGTTYQVAVSVLRGREEGPAAVIVARTDPLGPVRTVHVTQASSSSVTITWTRVPGATGYRVSWHSAHGPEKSQLVSGEATVAELDGLEPDTEYTVHVRAHVAGVDGPPASVVVRTAPEPVGRVSRLQILNASSDVLRITWVGVTGATAYRLAWGRSEGGPMRHQILPGNTDSAEIRGLEGGVSYSVRVTALVGDREGTPVSIVVTTPPEAPPALGTLHVVQRGEHSLRLRWEPVPRAQGFLLHWQPEGGQEQSRVLGPELSSYHLDGLEPATQYRVRLSVLGPAGEGPSAEVTARTESPRVPSIELRVVDTSIDSVTLAWTPVSRASSYILSWRPLRGPGQEVPGSPQTLPGISSSQRVTGLEPGVSYIFSLTPVLDGVRGPEASVTQTPVCPRGLADVVFLPHATQDNAHRAEATRRVLERLVLALGPLGPQAVQVGLLSYSHRPSPLFPLNGSHDLGIILQRIRDMPYMDPSGNNLGTAVVTAHRYMLAPDAPGRRQHVPGVMVLLVDEPLRGDIFSPIREAQASGLNVVMLGMAGADPEQLRRLAPGMDSVQTFFAVDDGPSLDQAVSGLATALCQASFTTQPRPEPCPVYCPKGQKGEPGEMGLRGQVGPPGDPGLPGRTGAPGPQGPPGSATAKGERGFPGADGRPGSPGRAGNPGTPGAPGLKGSPGLPGPRGDPGERGPRGPKGEPGAPGQVIGGEGPGLPGRKGDPGPSGPPGPRGPLGDPGPRGPPGLPGTAMKGDKGDRGERGPPGPGEGGIAPGEPGLPGLPGSPGPQGPVGPPGKKGEKGDSEDGAPGLPGQPGSPGEQGPRGPPGAIGPKGDRGFPGPLGEAGEKGERGPPGPAGSRGLPGVAGRPGAKGPEGPPGPTGRQGEKGEPGRPGDPAVVGPAVAGPKGEKGDVGPAGPRGATGVQGERGPPGLVLPGDPGPKGDPGDRGPIGLTGRAGPPGDSGPPGEKGDPGRPGPPGPVGPRGRDGEVGEKGDEGPPGDPGLPGKAGERGLRGAPGVRGPVGEKGDQGDPGEDGRNGSPGSSGPKGDRGEPGPPGPPGRLVDTGPGAREKGEPGDRGQEGPRGPKGDPGLPGAPGERGIEGFRGPPGPQGDPGVRGPAGEKGDRGPPGLDGRSGLDGKPGAAGPSGPNGAAGKAGDPGRDGLPGLRGEQGLPGPSGPPGLPGKPGEDGKPGLNGKNGEPGDPGEDGRKGEKGDSGASGREGRDGPKGERGAPGILGPQGPPGLPGPVGPPGQGFPGVPGGTGPKGDRGETGSKGEQGLPGERGLRGEPGSVPNVDRLLETAGIKASALREIVETWDESSGSFLPVPERRRGPKGDSGEQGPPGKEGPIGFPGERGLKGDRGDPGPQGPPGLALGERGPPGPSGLAGEPGKPGIPGLPGRAGGVGEAGRPGERGERGEKGERGEQGRDGPPGLPGTPGPPGPPGPKVSVDEPGPGLSGEQGPPGLKGAKGEPGSNGDQGPKGDRGVPGIKGDRGEPGPRGQDGNPGLPGERGMAGPEGKPGLQGPRGPPGPVGGHGDPGPPGAPGLAGPAGPQGPSGLKGEPGETGPPGRGLTGPTGAVGLPGPPGPSGLVGPQGSPGLPGQVGETGKPGAPGRDGASGKDGDRGSPGVPGSPGLPGPVGPKGEPGPTGAPGQAVVGLPGAKGEKGAPGGLAGDLVGEPGAKGDRGLPGPRGEKGEAGRAGEPGDPGEDGQKGAPGPKGFKVCVPRRVPAGVLVVRSLSLIRCLFSSKGDPGVGVPGSPGPPGPPGVKGDLGLPGLPGAPGVVGFPGQTGPRGEMGQPGPSGERGLAGPPGREGIPGPLGPPGPPGSVGPPGASGLKGDKGDPGVGLPGPRGERGEPGIRVRMSYSTAELPSSQLLPLISNLWVNEPNVTIQGEDGRPGQEGPRGLTGPPGSRGERGEKGDVGSAGLKGDKGDSAVILGPPGPRGAKGDMGERGPRGLDGDKGPRGDNGDPGDKGSKGEPGDKGSAGLPGLRGLLGPQGQPGAAGIPGDPGDSLWSLTDLL

SEQ ID NO: 862687 - protein, 2388 aa, Homo sapiens
MTLRLLVAALCAGILAEAPRVRAQHRERVTCTRLYAADIVFLLDGSSSIGRSNFREVRSFLEGLVLPFSGAASAQGVRFATVQYSDDPRTEFGLDALGSGGDVIRAIRELSYKGGNTRTGAAILHVADHVFLPQLARPGVPKVCILITDGKSQDLVDTAAQRLKGQGVKLFAVGIKNADPEELKRVASQPTSDFFFFVNDFSILRTLLPLVSRRVCTTAGGVPVTRPPDDSTSAPRDLVLSEPSSQSLRVQWTAASGPVTGYKVQYTPLTGLGQPLPSERQEVNVPAGETSVRLRGLRPLTEYQVTVIALYANSIGEAVSGTARTTALEGPELTIQNTTAHSLLVAWRSVPGATGYRVTWRVLSGGPTQQQELGPGQGSVLLRDLEPGTDYEVTVSTLFGRSVGPATSLMARTDASVEQTLRPVILGPTSILLSWNLVPEARGYRLEWRRETGLEPPQKVVLPSDVTRYQLDGLQPGTEYRLTLYTLLEGHEVATPATVVPTGPELPVSPVTDLQATELPGQRVRVSWSPVPGATQYRIIVRSTQGVERTLVLPGSQTAFDLDDVQAGLSYTVRVSARVGPREGSASVLTVRREPETPLAVPGLRVVVSDATRVRVAWGPVPGASGFRISWSTGSGPESSQTLPPDSTATDITGLQPGTTYQVAVSVLRGREEGPAAVIVARTDPLGPVRTVHVTQASSSSVTITWTRVPGATGYRVSWHSAHGPEKSQLVSGEATVAELDGLEPDTEYTVHVRAHVAGVDGPPASVVVRTAPEPVGRVSRLQILNASSDVLRITWVGVTGATAYRLAWGRSEGGPMRHQILPGNTDSAEIRGLEGGVSYSVRVTALVGDREGTPVSIVVTTPPEAPPALGTLHVVQRGEHSLRLRWEPVPRAQGFLLHWQPEGGQEQSRVLGPELSSYHLDGLEPATQYRVRLSVLGPAGEGPSAEVTARTESPRVPSIELRVVDTSIDSVTLAWTPVSRASSYILSWRPLRGPGQEVPGSPQTLPGISSSQRVTGLEPGVSYIFSLTPVLDGVRGPEASVTQTPVCPRGLADVVFLPHATQDNAHRAEATRRVLERLVLALGPLGPQAVQVGLLSYSHRPSPLFPLNGSHDLGIILQRIRDMPYMDPSGNNLGTAVVTAHRYMLAPDAPGRRQHVPGVMVLLVDEPLRGDIFSPIREAQASGLNVVMLGMAGADPEQLRRLAPGMDSVQTFFAVDDGPSLDQAVSGLATALCQASFTTQPRPEPCPVYCPKGQKGEPGEMGLRGQVGPPGDPGLPGRTGAPGPQGPPGSATAKGERGFPGADGRPGSPGRAGNPGTPGAPGLKGSPGLPGPRGDPGERGPRGPKGEPGAPGQVIGGEGPGLPGRKGDPGPSGPPGPRGPLGDPGPRGPPGLPGTAMKGDKGDRGERGPPGPGEGGIAPGEPGLPGLPGSPGPQGPVGPPGKKGEKGDSEDGAPGLPGQPGSPGEQGPRGPPGAIGPKGDRGFPGPLGEAGEKGERGPPGPAGSRGLPGVAGRPGAKGPEGPPGPTGRQGEKGEPGRPGDPAVVGPAVAGPKGEKGDVGPAGPRGATGVQGERGPPGLVLPGDPGPKGDPGDRGPIGLTGRAGPPGDSGPPGEKGDPGRPGPPGPVGPRGRDGEVGEKGDEGPPGDPGLPGKAGERGLRGAPGVRGPVGEKGDQGDPGEDGRNGSPGSSGPKGDRGEPGPPGPPGRLVDTGPGAREKGEPGDRGQEGPRGPKGDPGLPGAPGERGIEGFRGPPGPQGDPGVRGPAGEKGDRGPPGLDGRSGLDGKPGAAGPSGPNGAAGKAGDPGRDGLPGLRGEQGLPGPSGPPGLPGKPGEDGKPGLNGKNGEPGDPGEDGRKGEKGDSGASGREGRDGPKGERGAPGILGPQGPPGLPGPVGPPGQGFPGVPGGTGPKGDRGETGSKGEQGLPGERGLRGEPGSVPNVDRLLETAGIKASALREIVETWDESSGSFLPVPERRRGPKGDSGEQGPPGKEGPIGFPGERGLKGDRGDPGPQGPPGLALGERGPPGPSGLAGEPGKPGIPGLPGRAGGVGEAGRPGERGERGEKGERGEQGRDGPPGLPGTPGPPGPPGPKVSVDEPGPGLSGEQGPPGLKGAKGEPGSNGDQGPKGDRGVPGIKGDRGEPGPRGQDGNPGLPGERGMAGPEGKPGLQGPRGPPGPVGGHGDPGPPGAPGLAGPAGPQGPSGLKGEPGETGPPGRGLTGPTGAVGLPGPPGPSGLVGPQGSPGLPGQVGETGKPGAPGRDGASGKDGDRGSPGVPGSPGLPGPVGPKGEPGPTGAPGQAVVGLPGAKGEKGAPGGLAGDLVGEPGAKGDRGLPGPRGEKGEAGRAGEPGDPGEDVSPGPRQGRAWPEECDGGHKGPLLGRGTCLSP

SEQ ID NO: 862688 - protein, 530 aa, Homo sapiens
MGQPGPSGERGLAGPPGREGIPGPLGPPGPPGSVGPPGASGLKGDKGDPGVGLPGPRGERGEPGIRGEDGRPGQEGPRGLTGPPGSRGERGEKGDVGSAGLKGDKGDSAVILGPPGPRGAKGDMGERGPRGLDGDKGPRGDNGDPGDKGSKGEPGDKGSAGLPGLRGLLGPQGQPGAAGIPGDPGSPGKDGVPGIRGEKGDVGFMGPRGLKGERGVKGACGLDGEKGDKGEAGPPGRPGLAGHKGEMGEPGVPGQSGAPGKEGLIGPKGDRGFDGQPGPKGDQGEKGERGTPGIGGFPGPSGNDGSAGPPGPPGSVGPRGPEGLQGQKGERGPPGERVVGAPGVPGAPGERGEQGRPGPAGPRGEKGEAALTEDDIRGFVRQEMSQHCACQGQFIASGSRPLPSYAADTAGSQLHAVPVLRVSHAEEEERVPPEDDEYSEYSEYSVEEYQDPEAPWDSDDPCSLPLDEGSCTAYTLRWYHRAVTGSTEACHPFVYGGCGGNANRFGTREACERRCPPRVVQSQGTGTAQD

SEQ ID NO: 862689 - protein, 91 aa, Homo sapiens
AWDLAAEHLSGHTCSGWASVGDSPTEGLPHLCFSQGQPGAAGIPGDPVRCPCSHRGPLSPEGPRHHGGPTSVVAFDLIVTQCSHGVLMSPR

SEQ ID NO: 862690 - protein, 2944 aa, Homo sapiens
MTLRLLVAALCAGILAEAPRVRAQHRERVTCTRLYAADIVFLLDGSSSIGRSNFREVRSFLEGLVLPFSGAASAQGVRFATVQYSDDPRTEFGLDALGSGGDVIRAIRELSYKGGNTRTGAAILHVADHVFLPQLARPGVPKVCILITDGKSQDLVDTAAQRLKGQGVKLFAVGIKNADPEELKRVASQPTSDFFFFVNDFSILRTLLPLVSRRVCTTAGGVPVTRPPDDSTSAPRDLVLSEPSSQSLRVQWTAASGPVTGYKVQYTPLTGLGQPLPSERQEVNVPAGETSVRLRGLRPLTEYQVTVIALYANSIGEAVSGTARTTALEGPELTIQNTTAHSLLVAWRSVPGATGYRVTWRVLSGGPTQQQELGPGQGSVLLRDLEPGTDYEVTVSTLFGRSVGPATSLMARTDASVEQTLRPVILGPTSILLSWNLVPEARGYRLEWRRETGLEPPQKVVLPSDVTRYQLDGLQPGTEYRLTLYTLLEGHEVATPATVVPTGPELPVSPVTDLQATELPGQRVRVSWSPVPGATQYRIIVRSTQGVERTLVLPGSQTAFDLDDVQAGLSYTVRVSARVGPREGSASVLTVRREPETPLAVPGLRVVVSDATRVRVAWGPVPGASGFRISWSTGSGPESSQTLPPDSTATDITGLQPGTTYQVAVSVLRGREEGPAAVIVARTDPLGPVRTVHVTQASSSSVTITWTRVPGATGYRVSWHSAHGPEKSQLVSGEATVAELDGLEPDTEYTVHVRAHVAGVDGPPASVVVRTAPEPVGRVSRLQILNASSDVLRITWVGVTGATAYRLAWGRSEGGPMRHQILPGNTDSAEIRGLEGGVSYSVRVTALVGDREGTPVSIVVTTPPEAPPALGTLHVVQRGEHSLRLRWEPVPRAQGFLLHWQPEGGQEQSRVLGPELSSYHLDGLEPATQYRVRLSVLGPAGEGPSAEVTARTESPRVPSIELRVVDTSIDSVTLAWTPVSRASSYILSWRPLRGPGQEVPGSPQTLPGISSSQRVTGLEPGVSYIFSLTPVLDGVRGPEASVTQTPVCPRGLADVVFLPHATQDNAHRAEATRRVLERLVLALGPLGPQAVQVGLLSYSHRPSPLFPLNGSHDLGIILQRIRDMPYMDPSGNNLGTAVVTAHRYMLAPDAPGRRQHVPGVMVLLVDEPLRGDIFSPIREAQASGLNVVMLGMAGADPEQLRRLAPGMDSVQTFFAVDDGPSLDQAVSGLATALCQASFTTQPRPEPCPVYCPKGQKGEPGEMGLRGQVGPPGDPGLPGRTGAPGPQGPPGSATAKGERGFPGADGRPGSPGRAGNPGTPGAPGLKGSPGLPGPRGDPGERGPRGPKGEPGAPGQVIGGEGPGLPGRKGDPGPSGPPGPRGPLGDPGPRGPPGLPGTAMKGDKGDRGERGPPGPGEGGIAPGEPGLPGLPGSPGPQGPVGPPGKKGEKGDSEDGAPGLPGQPGSPGEQGPRGPPGAIGPKGDRGFPGPLGEAGEKGERGPPGPAGSRGLPGVAGRPGAKGPEGPPGPTGRQGEKGEPGRPGDPAVVGPAVAGPKGEKGDVGPAGPRGATGVQGERGPPGLVLPGDPGPKGDPGDRGPIGLTGRAGPPGDSGPPGEKGDPGRPGPPGPVGPRGRDGEVGEKGDEGPPGDPGLPGKAGERGLRGAPGVRGPVGEKGDQGDPGEDGRNGSPGSSGPKGDRGEPGPPGPPGRLVDTGPGAREKGEPGDRGQEGPRGPKGDPGLPGAPGERGIEGFRGPPGPQGDPGVRGPAGEKGDRGPPGLDGRSGLDGKPGAAGPSGPNGAAGKAGDPGRDGLPGLRGEQGLPGPSGPPGLPGKPGEDGKPGLNGKNGEPGDPGEDGRKGEKGDSGASGREGRDGPKGERGAPGILGPQGPPGLPGPVGPPGQGFPGVPGGTGPKGDRGETGSKGEQGLPGERGLRGEPGSVPNVDRLLETAGIKASALREIVETWDESSGSFLPVPERRRGPKGDSGEQGPPGKEGPIGFPGERGLKGDRGDPGPQGPPGLALGERGPPGPSGLAGEPGKPGIPGLPGRAGGVGEAGRPGERGERGEKGERGEQGRDGPPGLPGTPGPPGPPGPKVSVDEPGPGLSGEQGPPGLKGAKGEPGSNGDQGPKGDRGVPGIKGDRGEPGPRGQDGNPGLPGERGMAGPEGKPGLQGPRGPPGPVGGHGDPGPPGAPGLAGPAGPQGPSGLKGEPGETGPPGRGLTGPTGAVGLPGPPGPSGLVGPQGSPGLPGQVGETGKPGAPGRDGASGKDGDRGSPGVPGSPGLPGPVGPKGEPGPTGAPGQAVVGLPGAKGEKGAPGGLAGDLVGEPGAKGDRGLPGPRGEKGEAGRAGEPGDPGEDGQKGAPGPKGFKGDPGVGVPGSPGPPGPPGVKGDLGLPGLPGAPGVVGFPGQTGPRGEMGQPGPSGERGLAGPPGREGIPGPLGPPGPPGSVGPPGASGLKGDKGDPGVGLPGPRGERGEPGIRGEDGRPGQEGPRGLTGPPGSRGERGEKGDVGSAGLKGDKGDSAVILGPPGPRGAKGDMGERGPRGLDGDKGPRGDNGDPGDKGSKGEPGDKGSAGLPGLRGLLGPQGQPGAAGIPGDPGSPGKDGVPGIRGEKGDVGFMGPRGLKGERGVKGACGLDGEKGDKGEAGPPGRPGLAGHKGEMGEPGVPGQSGAPGKEGLIGPKGDRGFDGQPGPKGDQGEKGERGTPGIGGFPGPSGNDGSAGPPGPPGSVGPRGPEGLQGQKGERGPPGERVVGAPGVPGAPGERGEQGRPGPAGPRGEKGEAALTEDDIRGFVRQEMSQHCACQGQFIASGSRPLPSYAADTAGSQLHAVPVLRVSHAEEEERVPPEDDEYSEYSEYSVEEYQDPEAPWDSDDPCSLPLDEGSCTAYTLRWYHRAVTGSTEACHPFVYGGCGGNANRFGTREACERRCPPRVVQSQGTGTAQD

SEQ ID NO: 862691 - protein, 2703 aa, Homo sapiens
MTLRLLVAALCAGILAEAPRVRAQHRERVTCTRLYAADIVFLLDGSSSIGRSNFREVRSFLEGLVLPFSGAASAQGVRFATVQYSDDPRTEFGLDALGSGGDVIRAIRELSYKGGNTRTGAAILHVADHVFLPQLARPGVPKVCILITDGKSQDLVDTAAQRLKGQGVKLFAVGIKNADPEELKRVASQPTSDFFFFVNDFSILRTLLPLVSRRVCTTAGGVPVTRPPDDSTSAPRDLVLSEPSSQSLRVQWTAASGPVTGYKVQYTPLTGLGQPLPSERQEVNVPAGETSVRLRGLRPLTEYQVTVIALYANSIGEAVSGTARTTALEGPELTIQNTTAHSLLVAWRSVPGATGYRVTWRVLSGGPTQQQELGPGQGSVLLRDLEPGTDYEVTVSTLFGRSVGPATSLMARTDASVEQTLRPVILGPTSILLSWNLVPEARGYRLEWRRETGLEPPQKVVLPSDVTRYQLDGLQPGTEYRLTLYTLLEGHEVATPATVVPTGPELPVSPVTDLQATELPGQRVRVSWSPVPGATQYRIIVRSTQGVERTLVLPGSQTAFDLDDVQAGLSYTVRVSARVGPREGSASVLTVRREPETPLAVPGLRVVVSDATRVRVAWGPVPGASGFRISWSTGSGPESSQTLPPDSTATDITGLQPGTTYQVAVSVLRGREEGPAAVIVARTDPLGPVRTVHVTQASSSSVTITWTRVPGATGYRVSWHSAHGPEKSQLVSGEATVAELDGLEPDTEYTVHVRAHVAGVDGPPASVVVRTAPEPVGRVSRLQILNASSDVLRITWVGVTGATAYRLAWGRSEGGPMRHQILPGNTDSAEIRGLEGGVSYSVRVTALVGDREGTPVSIVVTTPPEAPPALGTLHVVQRGEHSLRLRWEPVPRAQGFLLHWQPEGGQEQSRVLGPELSSYHLDGLEPATQYRVRLSVLGPAGEGPSAEVTARTESPRVPSIELRVVDTSIDSVTLAWTPVSRASSYILSWRPLRGPGQEVPGSPQTLPGISSSQRVTGLEPGVSYIFSLTPVLDGVRGPEASVTQTPVCPRGLADVVFLPHATQDNAHRAEATRRVLERLVLALGPLGPQAVQVGLLSYSHRPSPLFPLNGSHDLGIILQRIRDMPYMDPSGNNLGTAVVTAHRYMLAPDAPGRRQHVPGVMVLLVDEPLRGDIFSPIREAQASGLNVVMLGMAGADPEQLRRLAPGMDSVQTFFAVDDGPSLDQAVSGLATALCQASFTTQPRPEPCPVYCPKGQKGEPGEMGLRGQVGPPGDPGLPGRTGAPGPQGPPGSATAKGERGFPGADGRPGSPGRAGNPGTPGAPGLKGSPGLPGPRGDPGERGPRGPKGEPGAPGQVIGGEGPGLPGRKGDPGPSGPPGPRGPLGDPGPRGPPGLPGTAMKGDKGDRGERGPPGPGEGGIAPGEPGLPGLPGSPGPQGPVGPPGKKGEKGDSEDGAPGLPGQPGSPGEQGPRGPPGAIGPKGDRGFPGPLGEAGEKGERGPPGPAGSRGLPGVAGRPGAKGPEGPPGPTGRQGEKGEPGRPGDPAVVGPAVAGPKGEKGDVGPAGPRGATGVQGERGPPGLVLPGDPGPKGDPGDRGPIGLTGRAGPPGDSGPPGEKGDPGRPGPPGPVGPRGRDGEVGEKGDEGPPGDPGLPGKAGERGLRGAPGVRGPVGEKGDQGDPGEDGRNGSPGSSGPKGDRGEPGPPGPPGRLVDTGPGAREKGEPGDRGQEGPRGPKGDPGLPGAPGERGIEGFRGPPGPQGDPGVRGPAGEKGDRGPPGLDGRSGLDGKPGAAGPSGPNGAAGKAGDPGRDGLPGLRGEQGLPGPSGPPGLPGKPGEDGKPGLNGKNGEPGDPGEDGRKGEKGDSGASGREGRDGPKGERGAPGILGPQGPPGLPGPVGPPGQGFPGVPGGTGPKGDRGETGSKGEQGLPGERGLRGEPGSVPNVDRLLETAGIKASALREIVETWDESSGSFLPVPERRRGPKGDSGEQGPPGKEGPIGFPGERGLKGDRGDPGPQGPPGLALGERGPPGPSGLAGEPGKPGIPGLPGRAGGVGEAGRPGERGERGEKGERGEQGRDGPPGLPGTPGPPGPPGPKVSVDEPGPGLSGEQGPPGLKGAKGEPGSNGDQGPKGDRGVPGIKGDRGEPGPRGQDGNPGLPGERGMAGPEGKPGLQGPRGPPGPVGGHGDPGPPGAPGLAGPAGPQGPSGLKGEPGETGPPGRGLTGPTGAVGLPGPPGPSGLVGPQGSPGLPGQVGETGKPGAPGRDGASGKDGDRGSPGVPGSPGLPGPVGPKGEPGPTGAPGQAVVGLPGAKGEKGAPGGLAGDLVGEPGAKGDRGLPGPRGEKGEAGRAGEPGDPGEDGQKGAPGPKGFKVCVPRRVPAGVLVVRSLSLIRCLFSSKGDPGVGVPGSPGPPGPPGVKGDLGLPGLPGAPGVVGFPGQTGPRGEMGQPGPSGERGLAGPPGREGIPGPLGPPGPPGSVGPPGASGLKGDKGDPGVGLPGPRGERGEPGIRGEDGRPGQEGPRGLTGPPGSRGERGEKGDVGSAGLKGDKGDSAVILGPPGPRGAKGDMGERGPRGLDGDKGPRGDNGDPGDKGSKGEPGDKGSAGLPGLRGLLGPQGQPGAAGIPGDPGSPGKDGVPGIRGEKGDVGFMGPRGLKGERGVKGACGLDGEKGDKDTGKKLDPQAAPGLQGPPGDDGERTDVRASGGP

SEQ ID NO: 862692 - protein, 536 aa, Homo sapiens
MTLRPPLIPLTDPRCPVGLQGDPGVGLPGPRGERGEPGIRVRMSYSTAELPSSQLLPLISNLWVNEPNVTIQGEDGRPGQEGPRGLTGPPGSRGERGEKGDVGSAGLKGDKGDSAVILGPPGPRGAKGDMGERGPRGLDGDKGPRGDNGDPGDKGSKGEPGDKGSAGLPGLRGLLGPQGQPGAAGIPGDPGSPGKDGVPGIRGEKGDVGFMGPRGLKGERGVKGACGLDGEKGDKGEAGPPGRPGLAGHKGEMGEPGVPGQSGAPGKEGLIGPKGDRGFDGQPGPKGDQGEKGERGTPGIGGFPGPSGNDGSAGPPGPPGSVGPRGPEGLQGQKGERGPPGERVVGAPGVPGAPGERGEQGRPGPAGPRGEKGEAALTEDDIRGFVRQEMSQHCACQGQFIASGSRPLPSYAADTAGSQLHAVPVLRVSHAEEEERVPPEDDEYSEYSEYSVEEYQDPEAPWDSDDPCSLPLDEGSCTAYTLRWYHRAVTGSTEACHPFVYGGCGGNANRFGTREACERRCPPRVVQSQGTGTAQD

SEQ ID NO: 862693 - protein, 659 aa, Homo sapiens
MLYKQLRQACEDHVQAQILPFREDSLDSVLFLKKINTCWQDHCRQMIMIRSIFLFLDRTYVLQNSTLPSIWDMGLELFRTHIISDKMVQSKTIDGILLLIERERSGEAVDRSLLRSLLGMLSDLQVYKDSFELKFLEETNCLYAAEGQRLMQEREVPEYLNHVSKRLEEEGDRVITYLDHSTQKPLIACVEKQLLGEHLTAILQKGLDHLLDENRVPDLAQMYQLFSRVRGGQQALLQHWSEYIKTFGTAIVINPEKDKDMVQDLLDFKDKVDHVIEVCFQKNERFVNLMKESFETFINKRPNKPAELIAKHVDSKLRAGNKEATDEELERTLDKIMILFRFIHGKDVFEAFYKKDLAKRLLVGKSASVDAEKSMLSKLKHECGAAFTSKLEGMFKDMELSKDIMVHFKQHMQNQSDSGPIDLTVNILTMGYWPTYTPMEVHLTPEMIKLQEVFKAFYLGKHSGRKLQWQTTLGHAVLKAEFKEGKKEFQVSLFQTLVLLMFNEGDGFSFEEIKMATGIEDSELRRTLQSLACGKARVLIKSPKGKEVEDGDKFIFNGEFKHKLFRIKINQIQMKETVEEQVSTTERVFQDRQYQIDAAIVRIMKMRKTLGHNLLVSELYNQLKFPVKPGDLKKRIESLIDRDYMERDKDNPNQYHYVA

SEQ ID NO: 862694 - protein, 472 aa, Homo sapiens
LTLRLPLVKTRPRRTLRAWLGQGLGARAPEEGEGEGHGARSRALIRCLRRALPSLQELGHVPARTPEPSRWSHARGGGAEPSGGARPGALRRVSRLPIPSGGVPAARIPEPGGGARSPGGRVSVRPPEPGVRVPIPQDGSPGARPRARRGVSESLRGSPIPQEGFPARVPKPSGVAGRGGGWARARGRGGAGRARRRGGGRADRGGRSGARRAAALGAGRGGSGPAMADEAPRKGSFSALVGRTNGLTKPAALAAAPAKPGGAGGSKKLVIKNFRDRPRLPDNYTQDTWRKLHEAVRAVQSSTSIRYNLEELYQAVENLCSHKVSPMLYKQLRQACEDHVQAQILPFREPSALAFCDRQQSPIDLATYGDTHLSAHSCVCQEARQDSVDSMLSLTGRVKVSARLGPHLRSLLARAGSWRKPVPVVVGLRALPSVPCCLVSLSAPHAQVLASPLTARLFSASRPAGESACLTC

SEQ ID NO: 862695 - protein, 756 aa, Homo sapiens
RPTWGEGPEIRAGPGSGGAGAPAGSGVATRGASRRALSRPLSLRPADRPRLPDNYTQDTWRKLHEAVRAVQSSTSIRYNLEELYQAVENLCSHKVSPMLYKQLRQACEDHVQAQILPFREDSLDSVLFLKKINTCWQDHCRQMIMIRSIFLFLDRTYVLQNSTLPSIWDMGLELFRTHIISDKMVQSKTIDGILLLIERERSGEAVDRSLLRSLLGMLSDLQVYKDSFELKFLEETNCLYAAEGQRLMQEREVPEYLNHVSKRLEEEGDRVITYLDHSTQKPLIACVEKQLLGEHLTAILQKGLDHLLDENRVPDLAQMYQLFSRVRGGQQALLQHWSEYIKTFGTAIVINPEKDKDMVQDLLDFKDKVDHVIEVCFQKNERFVNLMKESFETFINKRPNKPAELIAKHVDSKLRAGNKEATDEELERTLDKIMILFRFIHGKDVFEAFYKKDLAKRLLVGKSASVDAEKSMLSKLKHECGAAFTSKLEGMFKDMELSKDIMVHFKQHMQNQSDSGPIDLTVNILTMGYWPTYTPMEVHLTPEMIKLQEVFKAFYLGKHSGRKLQWQTTLGHAVLKAEFKEGKKEFQVSLFQTLVLLMFNEGDGFSFEEIKMATGIEDSELRRTLQSLACGKARVLIKSPKGKEVEDGDKFIFNGEFKHKLFRIKINQIQMKETVEEQVSTTERVFQDRQYQIDAAIVRIMKMRKTLGHNLLVSELYNQLKFPVKPGDLKKRIESLIDRDYMERDKDNPNQYHYVA

SEQ ID NO: 862696 - protein, 659 aa, Homo sapiens; identical to SEQ ID NO: 862693

SEQ ID NO: 862697 - protein, 985 aa, Homo sapiens
LTLRLPLVKTRPRRTLRAWLGQGLGARAPEEGEGEGHGARSRALIRCLRRALPSLQELGHVPARTPEPSRWSHARGGGAEPSGGARPGALRRVSRLPIPSGGVPAARIPEPGGGARSPGGRVSVRPPEPGVRVPIPQDGSPGARPRARRGVSESLRGSPIPQEGFPARVPKPSGVAGRGGGWARARGRGGAGRARRRGGGRADRGGRSGARRAAALGAGRGGSGPAMADEAPRKGSFSALVGRTNGLTKPAALAAAPAKPGGAGGSKKLVIKNFRDRPRLPDNYTQDTWRKLHEAVRAVQSSTSIRYNLEELYQAVENLCSHKVSPMLYKQLRQACEDHVQAQILPFREDSLDSVLFLKKINTCWQDHCRQMIMIRSIFLFLDRTYVLQNSTLPSIWDMGLELFRTHIISDKMVQSKTIDGILLLIERERSGEAVDRSLLRSLLGMLSDLQVYKDSFELKFLEETNCLYAAEGQRLMQEREVPEYLNHVSKRLEEEGDRVITYLDHSTQKPLIACVEKQLLGEHLTAILQKGLDHLLDENRVPDLAQMYQLFSRVRGGQQALLQHWSEYIKTFGTAIVINPEKDKDMVQDLLDFKDKVDHVIEVCFQKNERFVNLMKESFETFINKRPNKPAELIAKHVDSKLRAGNKEATDEELERTLDKIMILFRFIHGKDVFEAFYKKDLAKRLLVGKSASVDAEKSMLSKLKHECGAAFTSKLEGMFKDMELSKDIMVHFKQHMQNQSDSGPIDLTVNILTMGYWPTYTPMEVHLTPEMIKLQEVFKAFYLGKHSGRKLQWQTTLGHAVLKAEFKEGKKEFQVSLFQTLVLLMFNEGDGFSFEEIKMATGIEDSELRRTLQSLACGKARVLIKSPKGKEVEDGDKFIFNGEFKHKLFRIKINQIQMKETVEEQVSTTERVFQDRQYQIDAAIVRIMKMRKTLGHNLLVSELYNQLKFPVKPGDLKKRIESLIDRDYMERDKDNPNQYHYVA

SEQ ID NO: 862698 - protein, 985 aa, Homo sapiens; identical to SEQ ID NO: 862697

SEQ ID NO: 862699 - protein, 934 aa, Homo sapiens
LTLRLPLVKTRPRRTLRAWLGQGLGARAPEEGEGEGHGARSRALIRCLRRALPSLQELGHVPARTPEPSRWSHARGGGAEPSGGARPGALRRVSRLPIPSGGVPAARIPEPGGGARSPGGRVSVRPPEPGVRVPIPQDGSPGARPRARRGVSESLRGSPIPQEGFPARVPKPSGVAGRGGGWARARGRGGAGRARRRGGGRADRGGRSGARRAAALGAGRGGSGPAMADEAPRKGSFSALVGRTNGLTKPAALAAAPAKPGGAGGSKKLVIKNFRDRPRLPDNYTQDTWRKLHEAVRAVQSSTSIRYNLEELYQAVENLCSHKVSPMLYKQLRQACEDHVQAQILPFREDSLDSVLFLKKINTCWQDHCRQMIMIRSIFLFLDRTYVLQNSTLPSIWDMGLELFRTHIISDKMVQSKTIDGILLLIERERSGEAVDRSLLRSLLGMLSDLQVYKDSFELKFLEETNCLYAAEGQRLMQEREVPEYLNHVSKRLEEEGDRVITYLDHSTQKPLIACVEKQLLGEHLTAILQKGLDHLLDENRVPDLAQMYQLFSRVRGGQQALLQHWSEYIKTFGTAIVINPEKDKDMVQDLLDFKDKVDHVIEVCFQKNERFVNLMKESFETFINKRPNKPAELIAKHVDSKLRAGNKEATDEELERTLDKIMILFRFIHGKDVFEAFYKKDLAKRLLVGKSASVDAEKSMLSKLKHECGAAFTSKLEGMFKDMELSKDIMVHFKQHMQNQSDSGPIDLTVNILTMGYWPTYTPMEVHLTPEMIKLQEVFKAFYLGKHSGRKLQWQTTLGHAVLKAEFKEGKKEFQVSLFQTLVLLMFNEGDGFSFEEIKMATGIEDSELRRTLQSLACGKARVLIKSPKGKEVEDGDKFIFNGEFKHKLFRIKINQIQMKETPGDLKKRIESLIDRDYMERDKDNPNQYHYVA

SEQ ID NO: 862700 - protein, 507 aa, Homo sapiens
MAVVPEYLNHVSKRLEEEGDRVITYLDHSTQKPLIACVEKQLLGEHLTAILQKGLDHLLDENRVPDLAQMYQLFSRVRGGQQALLQHWSEYIKTFGTAIVINPEKDKDMVQDLLDFKDKVDHVIEVCFQKNERFVNLMKESFETFINKRPNKPAELIAKHVDSKLRAGNKEATDEELERTLDKIMILFRFIHGKDVFEAFYKKDLAKRLLVGKSASVDAEKSMLSKLKHECGAAFTSKLEGMFKDMELSKDIMVHFKQHMQNQSDSGPIDLTVNILTMGYWPTYTPMEVHLTPEMIKLQEVFKAFYLGKHSGRKLQWQTTLGHAVLKAEFKEGKKEFQVSLFQTLVLLMFNEGDGFSFEEIKMATGIEDSELRRTLQSLACGKARVLIKSPKGKEVEDGDKFIFNGEFKHKLFRIKINQIQMKETVEEQVSTTERVFQDRQYQIDAAIVRIMKMRKTLGHNLLVSELYNQLKFPVKPGDLKKRIESLIDRDYMERDKDNPNQYHYVA

SEQ ID NO: 862701 - protein, 199 aa, Homo sapiens
QRSVYTSRRGNYFGTCCVKAEFKEGKKEFQVSLFQTLVLLMFNEGDGFSFEEIKMATGIEDSELRRTLQSLACGKARVLIKSPKGKEVEDGDKFIFNGEFKHKLFRIKINQIQMKETVEEQVSTTERVFQDRQYQIDAAIVRIMKMRKTLGHNLLVSELYNQLKFPVKPGDLKKRIESLIDRDYMERDKDNPNQYHYVA

SEQ ID NO: 862702 - protein, 169 aa, Homo sapiens
PVCLLNPFLWDFYQHTCFATGQDCSVLRNSLSSIPVAIFIFLKAEAISLVEHEEHQCLEDGDKFIFNGEFKHKLFRIKINQIQMKETVEEQVSTTERVFQDRQYQIDAAIVRIMKMRKTLGHNLLVSELYNQLKFPVKPGDLKKRIESLIDRDYMERDKDNPNQYHYVA

SEQ ID NO: 862703 - protein, 829 aa, Homo sapiens
LTLRLPLVKTRPRRTLRAWLGQGLGARAPEEGEGEGHGARSRALIRCLRRALPSLQELGHVPARTPEPSRWSHARGGGAEPSGGARPGALRRVSRLPIPSGGVPAARIPEPGGGARSPGGRVSVRPPEPGVRVPIPQDGSPGARPRARRGVSESLRGSPIPQEGFPARVPKPSGVAGRGGGWARARGRGGAGRARRRGGGRADRGGRSGARRAAALGAGRGGSGPAMADEAPRKGSFSALVGRTNGLTKPAALAAAPAKPGGAGGSKKLVIKNFRDRPRLPDNYTQDTWRKLHEAVRAVQSSTSIRYNLEELYQAVENLCSHKVSPMLYKQLRQACEDHVQAQILPFREDSLDSVLFLKKINTCWQDHCRQMIMIRSIFLFLDRTYVLQNSTLPSIWDMGLELFRTHIISDKMVQSKTIDGILLLIERERSGEAVDRSLLRSLLGMLSDLQVYKDSFELKFLEETNCLYAAEGQRLMQEREVPEYLNHVSKRLEEEGDRVITYLDHSTQKPLIACVEKQLLGEHLTAILQKGLDHLLDENRVPDLAQMYQLFSRVRGGQQALLQHWSEYIKTFGTAIVINPEKDKDMVQDLLDFKDKVDHVIEVCFQKNERFVNLMKESFETFINKRPNKPAELIAKHVDSKLRAGNKEATDEELERTLDKIMILFRFIHGKDVFEAFYKKDLAKRLLVGKSASVDAEKSMLSKLKHECGAAFTSKLEGMFKDMELSKDIMVHFKQHMQNQSDSGPIDLTVNILTMGYWPTYTPMEVHLTPEMIKLQEVFKAFYLGKHSGRKLQWQTTLGHAVLKAEFKERIVNCAERCSPWPVAKHVC

SEQ ID NO: 862704 - protein, 509 aa, Homo sapiens
LTLRLPLVKTRPRRTLRAWLGQGLGARAPEEGEGEGHGARSRALIRCLRRALPSLQELGHVPARTPEPSRWSHARGGGAEPSGGARPGALRRVSRLPIPSGGVPAARIPEPGGGARSPGGRVSVRPPEPGVRVPIPQDGSPGARPRARRGVSESLRGSPIPQEGFPARVPKPSGVAGRGGGWARARGRGGAGRARRRGGGRADRGGRSGARRAAALGAGRGGSGPAMADEAPRKGSFSALVGRTNGLTKPAALAAAPAKPGGAGGSKKLVIKNFRDRPRLPDNYTQDTWRKLHEAVRAVQSSTSIRYNLEELYQAVENLCSHKVSPMLYKQLRQACEDHVQAQILPFREDSLDSVLFLKKINTCWQDHCRQMIMIRSIFLFLDRTYVLQNSTLPSIWDMGLELFRTHIISDKMVQSKTIDGILLLIERERSGEAVDRSLLRSLLGMLSDLQVYKDSFELKFLEETNCLYAAEGQRLMQEREVPEYLNHVSKRLEEEGDRVITYLDHSTQ

SEQ ID NO: 862705 - protein, 400 aa, Homo sapiens
LTLRLPLVKTRPRRTLRAWLGQGLGARAPEEGEGEGHGARSRALIRCLRRALPSLQELGHVPARTPEPSRWSHARGGGAEPSGGARPGALRRVSRLPIPSGGVPAARIPEPGGGARSPGGRVSVRPPEPGVRVPIPQDGSPGARPRARRGVSESLRGSPIPQEGFPARVPKPSGVAGRGGGWARARGRGGAGRARRRGGGRADRGGRSGARRAAALGAGRGGSGPAMADEAPRKGSFSALVGRTNGLTKPAALAAAPAKPGGAGGSKKLVIKNFRDRPRLPDNYTQDTWRKLHEAVRAVQSSTSIRYNLEELYQAVENLCSHKVSPMLYKQLRQACEDHVQAQILPFREDSLDSVLFLKKINTCWQDHCRQMIMIRSIFLFLDRTYVLQNSTLPSICQNH

SEQ ID NO: 862706 - protein, 400 aa, Homo sapiens; identical to SEQ ID NO: 862705

SEQ ID NO: 862707 - protein, 421 aa, Homo sapiens
LTLRLPLVKTRPRRTLRAWLGQGLGARAPEEGEGEGHGARSRALIRCLRRALPSLQELGHVPARTPEPSRWSHARGGGAEPSGGARPGALRRVSRLPIPSGGVPAARIPEPGGGARSPGGRVSVRPPEPGVRVPIPQDGSPGARPRARRGVSESLRGSPIPQEGFPARVPKPSGVAGRGGGWARARGRGGAGRARRRGGGRADRGGRSGARRAAALGAGRGGSGPAMADEAPRKGSFSALVGRTNGLTKPAALAAAPAKPGGAGGSKKLVIKNFRDRPRLPDNYTQDTWRKLHEAVRAVQSSTSIRYNLEELYQAVENLCSHKVSPMLYKQLRQACEDHVQAQILPFRDHRPSSFGDCIHQGFWGLSSAAFAATDPTCPLLTPVCPLWPPHGAESCRLLQADFGQKLCPVSPSDLSCSLLM

SEQ ID NO: 862708 - protein, 985 aa, Homo sapiens; identical to SEQ ID NO: 862697

SEQ ID NO: 862709 - protein, 725 aa, Homo sapiens
GPSGSWRPRPRRGCADRPRLPDNYTQDTWRKLHEAVRAVQSSTSIRYNLEELYQAVENLCSHKVSPMLYKQLRQACEDHVQAQILPFREDSLDSVLFLKKINTCWQDHCRQMIMIRSIFLFLDRTYVLQNSTLPSIWDMGLELFRTHIISDKMVQSKTIDGILLLIERERSGEAVDRSLLRSLLGMLSDLQVYKDSFELKFLEETNCLYAAEGQRLMQEREVPEYLNHVSKRLEEEGDRVITYLDHSTQKPLIACVEKQLLGEHLTAILQKGLDHLLDENRVPDLAQMYQLFSRVRGGQQALLQHWSEYIKTFGTAIVINPEKDKDMVQDLLDFKDKVDHVIEVCFQKNERFVNLMKESFETFINKRPNKPAELIAKHVDSKLRAGNKEATDEELERTLDKIMILFRFIHGKDVFEAFYKKDLAKRLLVGKSASVDAEKSMLSKLKHECGAAFTSKLEGMFKDMELSKDIMVHFKQHMQNQSDSGPIDLTVNILTMGYWPTYTPMEVHLTPEMIKLQEVFKAFYLGKHSGRKLQWQTTLGHAVLKAEFKEGKKEFQVSLFQTLVLLMFNEGDGFSFEEIKMATGIEDSELRRTLQSLACGKARVLIKSPKGKEVEDGDKFIFNGEFKHKLFRIKINQIQMKETVEEQVSTTERVFQDRQYQIDAAIVRIMKMRKTLGHNLLVSELYNQLKFPVKPGDLKKRIESLIDRDYMERDKDNPNQYHYVA

SEQ ID NO: 862710 - protein, 965 aa, Homo sapiens
LTLRLPLVKTRPRRTLRAWLGQGLGARAPEEGEGEGHGARSRALIRCLRRALPSLQELGHVPARTPEPSRWSHARGGGAEPSGGARPGALRRVSRLPIPSGGVPAARIPEPGGGARSPGGRVSVRPPEPGVRVPIPQDGSPGARPRARRGVSESLRGSPIPQEGFPARVPKPSGVAGRGGGWARARGRGGAGRARRRGGGRADRGGRSGARRAAALGAGRGGSGPAMADEAPRKGSFSALVGRTNGLTKPAALAAAPAKPGGAGGSKKLVIKNFRDRPRLPDNYTQDTWRKLHEAVRAVQSSTSIRYNLEELYQACEDHVQAQILPFREDSLDSVLFLKKINTCWQDHCRQMIMIRSIFLFLDRTYVLQNSTLPSIWDMGLELFRTHIISDKMVQSKTIDGILLLIERERSGEAVDRSLLRSLLGMLSDLQVYKDSFELKFLEETNCLYAAEGQRLMQEREVPEYLNHVSKRLEEEGDRVITYLDHSTQKPLIACVEKQLLGEHLTAILQKGLDHLLDENRVPDLAQMYQLFSRVRGGQQALLQHWSEYIKTFGTAIVINPEKDKDMVQDLLDFKDKVDHVIEVCFQKNERFVNLMKESFETFINKRPNKPAELIAKHVDSKLRAGNKEATDEELERTLDKIMILFRFIHGKDVFEAFYKKDLAKRLLVGKSASVDAEKSMLSKLKHECGAAFTSKLEGMFKDMELSKDIMVHFKQHMQNQSDSGPIDLTVNILTMGYWPTYTPMEVHLTPEMIKLQEVFKAFYLGKHSGRKLQWQTTLGHAVLKAEFKEGKKEFQVSLFQTLVLLMFNEGDGFSFEEIKMATGIEDSELRRTLQSLACGKARVLIKSPKGKEVEDGDKFIFNGEFKHKLFRIKINQIQMKETVEEQVSTTERVFQDRQYQIDAAIVRIMKMRKTLGHNLLVSELYNQLKFPVKPGDLKKRIESLIDRDYMERDKDNPNQYHYVA

SEQ ID NO: 862711 - protein, 399 aa, Homo sapiens [sequence omitted]

SEQ ID NO: 862712 - protein, 985 aa, Homo sapiens; identical to SEQ ID NO: 862697

SEQ ID NO: 862713 - protein, 438 aa, Homo sapiens
MYQLFSRVRGGQQALLQHWSEYIKTFGTAIVINPEKDKDMVQDLLDFKDKVDHVIEVCFQKNERFVNLMKESFETFINKRPNKPAELIAKHVDSKLRAGNKEATDEELERTLDKIMILFRFIHGKDVFEAFYKKDLAKRLLVGKSASVDAEKSMLSKLKHECGAAFTSKLEGMFKDMELSKDIMVHFKQHMQNQSDSGPIDLTVNILTMGYWPTYTPMEVHLTPEMIKLQEVFKAFYLGKHSGRKLQWQTTLGHAVLKAEFKEGKKEFQVSLFQTLVLLMFNEGDGFSFEEIKMATGIEDSELRRTLQSLACGKARVLIKSPKGKEVEDGDKFIFNGEFKHKLFRIKINQIQMKETVEEQVSTTERVFQDRQYQIDAAIVRIMKMRKTLGHNLLVSELYNQLKFPVKPGDLKKRIESLIDRDYMERDKDNPNQYHYVA

SEQ ID NO: 862714 - protein, 323 aa, Homo sapiens
MILFRFIHGKDVFEAFYKKDLAKRLLVGKSASVDAEKSMLSKLKHECGAAFTSKLEGMFKDMELSKDIMVHFKQHMQNQSDSGPIDLTVNILTMGYWPTYTPMEVHLTPEMIKLQEVFKAFYLGKHSGRKLQWQTTLGHAVLKAEFKEGKKEFQVSLFQTLVLLMFNEGDGFSFEEIKMATGIEDSELRRTLQSLACGKARVLIKSPKGKEVEDGDKFIFNGEFKHKLFRIKINQIQMKETVEEQVSTTERVFQDRQYQIDAAIVRIMKMRKTLGHNLLVSELYNQLKFPVKPGDLKKRIESLIDRDYMERDKDNPNQYHYVA

SEQ ID NO: 862715 - protein, 531 aa, Homo sapiens
LTLRLPLVKTRPRRTLRAWLGQGLGARAPEEGEGEGHGARSRALIRCLRRALPSLQELGHVPARTPEPSRWSHARGGGAEPSGGARPGALRRVSRLPIPSGGVPAARIPEPGGGARSPGGRVSVRPPEPGVRVPIPQDGSPGARPRARRGVSESLRGSPIPQEGFPARVPKPSGVAGRGGGWARARGRGGAGRARRRGGGRADRGGRSGARRAAALGAGRGGSGPAMADEAPRKGSFSALVGRTNGLTKPAALAAAPAKPGGAGGSKKLVIKNFRDRPRLPDNYTQDTWRKLHEAVRAVQSSTSIRYNLEELYQAVENLCSHKVSPMLYKQLRQACEDHVQAQILPFREDSLDSVLFLKKINTCWQDHCRQMIMIRSIFLFLDRTYVLQNSTLPSIWDMGLELFRTHIISDKMVQSKTIDGILLLIERERSGEAVDRSLLRSLLGMLSDLQVYKDSFELKFLEETNCLYAAEGQRLMQEREVPEYLNHVSKRLEEEGDRVITYLDHSTQKPLIACVEKQLLGDKNGHGDRG

SEQ ID NO: 862716 - protein, 923 aa, Homo sapiens
LTLRLPLVKTRPRRTLRAWLGQGLGARAPEEGEGEGHGARSRALIRCLRRALPSLQELGHVPARTPEPSRWSHARGGGAEPSGGARPGALRRVSRLPIPSGGVPAARIPEPGGGARSPGGRVSVRPPEPGVRVPIPQDGSPGARPRARRGVSESLRGSPIPQEGFPARVPKPSGVAGRGGGWARARGRGGAGRARRRGGGRADRGGRSGARRAAALGAGRGGSGPAMADEAPRKGSFSALVGRTNGLTKPAALAAAPAKPGGAGGSKKLVIKNFRDRPRLPDNYTQDTWRKLHEAVRAVQSSTSIRYNLEELYQAVENLCSHKVSPMLYKQLRQACEDHVQAQILPFREDSLDSVLFLKKINTCWQDHCRQMIMIRSIFLFLDRTYVLQNSTLPSIWDMGLELFRTHIISDKMVQSKTIDGILLLIERERSGEAVDRSLLRSLLGMLSDLQVYKDSFELKFLEETNCLYAAEGQRLMQEREVPEYLNHVSKRLEEEGDRVITYLDHSTQKPLIACVEKQLLGEHLTAILQKGLDHLLDENRVPDLAQMYQLFSRVRGGQQALLQHWSEYIKTFGTAIVINPEKDKDMVQDLLDFKDKVDHVIEVCFQKNERFVNLMKESFETFINKRPNKPAELIAKHVDSKLRAGNKEATDEELERTLDKIMILFRFIHGKDVFEAFYKKDLAKRLLVGKSASVDAEKSMLSKLKHECGAAFTSKLEGMFKDMELSKDIMVHFKQHMQNQSDSGPIDLTVNILTMGYWPTYTPMEVHLTPEMIKLQEVFKAFYLGKHSGRKLQWQTTLGHAVLKAEFKEGKKEFQVSLFQTLVLLMFNEGDGFSFEEIKMATGIEDSELRRTLQSLACGKARVLIKSPKGKEVEDGDKFIFNGEFKHKLFRIKINQIQMKETVCINFLFLLIGGLAGNHLFL

SEQ ID NO: 862717 - protein, 509 aa, Homo sapiens; identical to SEQ ID NO: 862704

SEQ ID NO: 862718 - protein, 171 aa, Homo sapiens
RPTWGEGPEIRAGPGSGGAGAPAGSGVATRGASRRALSRPLSLRPADRPRLPDNYTQDTWRKLHEAVRAVQSSTSIRYNLEELYQAVENLCSHKVSPMLYKQLRQACEDHVQAQILPFREDSLDSVLFLKKINTCWQDHCRQMIMIRSIFLFLDRTYVLQNSTLPSICQNH

SEQ ID NO: 862719 - protein, 400 aa, Homo sapiens; identical to SEQ ID NO: 862705

SEQ ID NO: 862720 - protein, 316 aa, Homo sapiens
GHPASATYYRTAKKATGRKKSSSHDSGTDITSVTLGDTTAVKTKILIKKGRGNLEKTNLDLGPTAPSLEKEKTLCLSTPSSSTVKHSTSSIGSMLAQADKLPMTDKRVASLLKKAKAQLCKIEKSKSLKQTDQPKAQGQESDSSETSVRGPRIKHVCRRAAVALGRKRAVFPDDMPTLSALPWEEREKILSSMGNDDKSSIAGSEDAEPLAPPIKPIKPVTRNKAPQEPPVKKGRRSRRCGQCPGCQVPEDCGVCTNCLDKPKFGGRNIKKQCCKMRKCQNLQWMPSKAYLQKQAKGGGLFGFRPRGRDIPFFTLF

SEQ ID NO: 862721 - protein, 135 aa, Homo sapiens
MNPRAIPGPGPYTASHSPFLHLHPLPPPQADRSSPIPPFSSRHFIIDPPFPRPILGLGRGGGSQVGVRRVDKGQLYFSVVAVVALGWEKKDYQAKLFLRKDLGLSLILVRGPKVDEGSERCPFPISTGARTELLL

SEQ ID NO: 862722 - protein, 3976 aa, Homo sapiens
ASLHGANMAHSCRWRFPARPGTTGGGGGGGRRGLGGAPRQRVPALLLPPGPPVGGGGPGAPPSPPAVAAAAAAAGSSGAGVPGGAAAASAASSSSASSSSSSSSSASSGPALLRVGPGFDAALQVSAAIGTNLRRFRAVFGESGGGGGSGEDEQFLGFGSDEEVRVRSPTRSPSVKTSPRKPRGRPRSGSDRNSAILSDPSVFSPLNKSETKSGDKIKKKDSKSIEKKRGRPPTFPGVKIKITHGKDISELPKGNKEDSLKKIKRTPSATFQQATKIKKLRAGKLSPLKSKFKTGKLQIGRKGVQIVRRRGRPPSTERIKTPSGLLINSELEKPQKVRKDKEGTPPLTKEDKTVVRQSPRRIKPVRIIPSSKRTDATIAKQLLQRAKKGAQKKIEKEAAQLQGRKVKTQVKNIRQFIMPVVSAISSRIIKTPRRFIEDEDYDPPIKIARLESTPNSRFSAPSCGSSEKSSAASQHSSQMSSDSSRSSSPSVDTSTDSQASEEIQVLPEERSDTPEVHPPLPISQSPENESNDRRSRRYSVSERSFGSRTTKKLSTLQSAPQQQTSSSPPPPLLTPPPPLQPASSISDHTPWLMPPTIPLASPFLPASTAPMQGKRKSILREPTFRWTSLKHSRSEPQYFSSAKYAKEGLIRKPIFDNFRPPPLTPEDVGFASGFSASGTAASARLFSPLHSGTRFDMHKRSPLLRAPRFTPSEAHSRIFESVTLPSNRTSAGTSSSGVSNRKRKRKVFSPIRSEPRSPSHSMRTRSGRLSSSELSPLTPPSSVSSSLSISVSPLATSALNPTFTFPSHSLTQSGESAEKNQRPRKQTSAPAEPFSSSSPTPLFPWFTPGSQTERGRNKDKAPEELSKDRDADKSVEKDKSRERDREREKENKRESRKEKRKKGSEIQSSSALYPVGRVSKEKVVGEDVATSSSAKKATGRKKSSSHDSGTDITSVTLGDTTAVKTKILIKKGRGNLEKTNLDLGPTAPSLEKEKTLCLSTPSSSTVKHSTSSIGSMLAQADKLPMTDKRVASLLKKAKAQLCKIEKSKSLKQTDQPKAQGQESDSSETSVRGPRIKHVCRRAAVALGRKRAVFPDDMPTLSALPWEEREKILSSMGNDDKSSIAGSEDAEPLAPPIKPIKPVTRNKAPQEPPVKKGRRSRRCGQCPGCQVPEDCGVCTNCLDKPKFGGRNIKKQCCKMRKCQNLQWMPSKAYLQKQAKAVKKKEKKSKTSEKKDSKESSVVKNVVDSSQKPTPSAREDPAPKKSSSEPPPRKPVEEKSEEGNVSAPGPESKQATTPASRKSSKQVSQPAVVIPPQPPTTGPPRKEVPKTTPSEPKKKQPPPPESGPEQSKQKKVAPRPSIPVKQKPKEKEKPPPVNKQENAGTLNILSTLSNGNSSKQKIPADGVHRIRVDFKEDCEAENVWEMGGLGILTSVPITPRVVCFLCASSGHVEFVYCQVCCEPFHKFCLEENERPLEDQLENWCCRRCKFCHVCGRQHQATKQLLECNKCRNSYHPECLGPNYPTKPTKKKKVWICTKCVRCKSCGSTTPGKGWDAQWSHDFSLCHDCAKLFAKGNFCPLCDKCYDDDDYESKMMQCGKCDRWVHSKCENLSDEMYEILSNLPESVAYTCVNCTERHPAEWRLALEKELQISLKQVLTALLNSRTTSHLLRYRQAAKPPDLNPETEESIPSRSSPEGPDPPVLTEVSKQDDQQPLDLEGVKRKMDQGNYTSVLEFSDDIVKIIQAAINSDGGQPEIKKANSMVKSFFIRQMERVFPWFSVKKSRFWEPNKVSSNSGMLPNAVLPPSLDHNYAQWQEREENSHTEQPPLMKKIIPAPKPKGPGEPDSPTPLHPPTPPILSTDRSREDSPELNPPPGIEDNRQCALCLTYGDDSANDAGRLLYIGQNEWTHVNCALWSAEVFEDDDGSLKNVHMAVIRGKQLRCEFCQKPGATVGCCLTSCTSNYHFMCSRAKNCVFLDDKKVYCQRHRDLIKGEVVPENGFEVFRRVFVDFEGISLRRKFLNGLEPENIHMMIGSMTIDCLGILNDLSDCEDKLFPIGYQCSRVYWSTTDARKRCVYTCKIVECRPPVVEPDINSTVEHDENRTIAHSPTSFTESSSKESQNTAEIISPPSPDRPPHSQTSGSCYYHVISKVPRIRTPSYSPTQRSPGCRPLPSAGSPTPTTHEIVTVGDPLLSSGLRSIGSRRHSTSSLSPQRSKLRIMSPMRTGNTYSRNNVSSVSTTGTATDLESSAKVVDHVLGPLNSSTSLGQNTSTSSNLQRTVVTVGNKNSHLDGSSSSEMKQSSASDLVSKSSSLKGEKTKVLSSKSSEGSAHNVAYPGIPKLAPQVHNTTSRELNVSKIGSFAEPSSVSFSSKEALSFPHLHLRGQRNDRDQHTDSTQSANSSPDEDTEVKTLKLSGMSNRSSIINEHMGSSSRDRRQKGKKSCKETFKEKHSSKSFLEPGQVTTGEEGNLKPEFMDEVLTPEYMGQRPCNNVSSDKIGDKGLSMPGVPKAPPMQVEGSAKELQAPRKRTVKVTLTPLKMENESQSKNALKESSPASPLQIESTSPTEPISASENPGDGPVAQPSPNNTSCQDSQSNNYQNLPVQDRNLMLPDGPKPQEDGSFKRRYPRRSARARSNMFFGLTPLYGVRSYGEEDIPFYSSSTGKKRGKRSAEGQVDGADDLSTSDEDDLYYYNFTRTVISSGGEERLASHNLFREEEQCDLPKISQLDGVDDGTESDTSVTATTRKSSQIPKRNGKENGTENLKIDRPEDAGEKEHVTKSSVGHKNEPKMDNCHSVSRVKTQGQDSLEAQLSSLESSRRVHTSTPSDKNLLDTYNTELLKSDSDNNNSDDCGNILPSDIMDFVLKNTPSMQALGESPESSSSELLNLGEGLGLDSNREKDMGLFEVFSQQLPTTEPVDSSVSSSISAEEQFELPLELPSDLSVLTTRSPTVPSQNPSRLAVISDSGEKRVTITEKSVASSESDPALLSPGVDPTPEGHMTPDHFIQGHMDADHISSPPCGSVEQGHGNNQDLTRNSSTPGLQVPVSPTVPIQNQKYVPNSTDSPGPSQISNAAVQTTPPHLKPATEKLIVVNQNMQPLYVLQTLPNGVTQKIQLTSSVSSTPSVMETNTSVLGPMGGGLTLTTGLNPSLPTSQSLFPSASKGLLPMSHHQHLHSFPAATQSSFPPNISNPPSGLLIGVQPPPDPQLLVSESSQRTDLSTTVATPSSGLKKRPISRLQTRKNKKLAPSSTPSNIAPSDVVSNMTLINFTPSQLPNHPSLLDLGSLNTSSHRTVPNIIKRSKSSIMYFEPAPLLPQSVGGTAATAAGTSTISQDTSHLTSGSVSGLASSSSVLNVVSMQTTTTPTSSASVPGHVTLTNPRLLGTPDIGSISNLLIKASQQSLGIQDQPVALPPSSGMFPQLGTSQTPSTAAITAASSICVLPSTQTTGITAASPSGEADEHYQLQHVNQLLASKTGIHSSQRDLDSASGPQVSNFTQTVDAPNSMGLEQNKALSSAVQASPTSPGGSPSSPSSGQRSASPSVPGPTKPKPKTKRFQLPLDKGNGKKHKVSHLRTSSSEAHIPDQETTSLTSGTGTPGAEAEQQDTASVEQSSQKECGQPAGQVAVLPEVQVTQNPANEQESAEPKTVEEEESNFSSPLMLWLQQEQKRKESITEKKPKKGLVFEISSDDGFQICAESIEDAWKSLTDKVQEARSNARLKQLSFAGVNGLRMLGILHDAVVFLIEQLSGAKHCRNYKFRFHKPEEANEPPLNPHGSARAEVHLRKSAFDMFNFLASKHRQPPEYNPNDEEEEEVQLKSARRATSMDLPMPMRFRHLKKTSKEAVGVYRSPIHGRGLFCKRNIDAGEMVIEYAGNVIRSIQTDKREKYYDSKGIGCYMFRIDDSEVVDATMHGNAARFINHSCEPNCYSRVINIDGQKHIVIFAMRKIYRGEELTYDYKFPIEDASNKLPCNCGAKKCRKFLN

SEQ ID NO: 862723 - protein, 3976 aa, Homo sapiens; identical to SEQ ID NO: 862722

SEQ ID NO: 862724 - protein, 3976 aa, Homo sapiens; identical to SEQ ID NO: 862722

SEQ ID NO: 862725 - protein, 3760 aa, Homo sapiens
MAHSCRWRFPARPGTTGGGGGGGRRGLGGAPRQRVPALLLPPGPPVGGGGPGAPPSPPAVAAAAAAAGSSGAGVPGGAAAASAASSSSASSSSSSSSSASSGPALLRVGPGFDAALQVSAAIGTNLRRFRAVFGESGGGGGSGEDEQFLGFGSDEEVRVRSPTRSPSVKTSPRKPRGRPRSGSDRNSAILSDPSVFSPLNKSETKSGDKIKKKDSKSIEKKRGRPPTFPGVKIKITHGKDISELPKGNKEDSLKKIKRTPSATFQQATKIKKLRAGKLSPLKSKFKTGKLQIGRKGVQIVRRRGRPPSTERIKTPSGLLINSELEKPQKVRKDKEGTPPLTKEDKTVVRQSPRRIKPVRIIPSSKRTDATIAKQLLQRAKKGAQKKIEKEAAQLQGRKVKTQVKNIRQFIMPVVSAISSRIIKTPRRFIEDEDYDPPIKIARLESTPNSRFSAPSCGSSEKSSAASQHSSQMSSDSSRSSSPSVDTSTDSQASEEIQVLPEERSDTPEVHPPLPISQSPENESNDRRSRRYSVSERSFGSRTTKKLSTLQSAPQQQTSSSPPPPLLTPPPPLQPASSISDHTPWLMPPTIPLASPFLPASTAPMQGKRKSILREPTFRWTSLKHSRSEPQYFSSAKYAKEGLIRKPIFDNFRPPPLTPEDVGFASGFSASGTAASARLFSPLHSGTRFDMHKRSPLLRAPRFTPSEAHSRIFESVTLPSNRTSAGTSSSGVSNRKRKRKVFSPIRSEPRSPSHSMRTRSGRLSSSELSPLTPPSSVSSSLSISVSPLATSALNPTFTFPSHSLTQSGESAEKNQRPRKQTSAPAEPFSSSSPTPLFPWFTPGSQTERGRNKDKAPEELSKDRDADKSVEKDKSRERDREREKENKRESRKEKRKKGSEIQSSSALYPVGRVSKEKVVGEDVATSSSAKKATGRKKSSSHDSGTDITSVTLGDTTAVKTKILIKKGRGNLEKTNLDLGPTAPSLEKEKTLCLSTPSSSTVKHSTSSIGSMLAQADKLPMTDKRVASLLKKAKAQLCKIEKSKSLKQTDQPKAQGQESDSSETSVRGPRIKHVCRRAAVALGRKRAVFPDDMPTLSALPWEEREKILSSMGNDDKSSIAGSEDAEPLAPPIKPIKPVTRNKAPQEPPVKKGRRSRRCGQCPGCQVPEDCGVCTNCLDKPKFGGRNIKKQCCKMRKCQNLQWMPSKAYLQKQAKAVKKKEKKSKTSEKKDSKESSVVKNVVDSSQKPTPSAREDPAPKKSSSEPPPRKPVEEKSEEGNVSAPGPESKQATTPASRKSSKQVSQPAVVIPPQPPTTGPPRKEVPKTTPSEPKKKQPPPPESGPEQSKQKKVAPRPSIPVKQKPKEKEKPPPVNKQENAGTLNILSTLSNGNSSKQKIPADGVHRIRVDFKEDCEAENVWEMGGLGILTSVPITPRVVCFLCASSGHVEFVYCQVCCEPFHKFCLEENERPLEDQLENWCCRRCKFCHVCGRQHQATKQLLECNKCRNSYHPECLGPNYPTKPTKKKKVWICTKCVRCKSCGSTTPGKGWDAQWSHDFSLCHDCAKLFAKGNFCPLCDKCYDDDDYESKMMQCGKCDRWVHSKCENLSDEMYEILSNLPESVAYTCVNCTERHPAEWRLALEKELQISLKQVLTALLNSRTTSHLLRYRQAAKPPDLNPETEESIPSRSSPEGPDPPVLTEVSKQDDQQPLDLEGVKRKMDQGNYTSVLEFSDDIVKIIQAAINSDGGQPEIKKANSMVKSFFIRQMERVFPWFSVKKSRFWEPNKVSSNSGMLPNAVLPPSLDHNYAQWQEREENSHTEQPPLMKKIIPAPKPKGPGEPDSPTPLHPPTPPILSTDRSREDSPELNPPPGIEDNRQCALCLTYGDDSANDAGRLLYIGQNEWTHVNCALWSAEVFEDDDGSLKNVHMAVIRGKQLRCEFCQKPGATVGCCLTSCTSNYHFMCSRAKNCVFLDDKKVYCQRHRDLIKGEVVPENGFEVFRRVFVDFEGISLRRKFLNGLEPENIHMMIGSMTIDCLGILNDLSDCEDKLFPIGYQCSRVYWSTTDARKRCVYTCKIVECRPPVVEPDINSTVEHDENRTIAHSPTSFTESSSKESQNTAEIISPPSPDRPPHSQTSGSCYYHVISKVPRIRTPSYSPTQRSPGCRPLPSAGSPTPTTHEIVTVGDPLLSSGLRSIGSRRHSTSSLSPQRSKLRIMSPMRTGNTYSRNNVSSVSTTGTATDLESSAKVVDHVLGPLNSSTSLGQNTSTSSNLQRTVVTVGNKNSHLDGSSSSEMKQSSASDLVSKSSSLKGEKTKVLSSKSSEGSAHNVAYPGIPKLAPQVHNTTSRELNVSKIGSFAEPSSVSFSSKEALSFPHLIQDSQSNNYQNLPVQDRNLMLPDGPKPQEDGSFKRRYPRRSARARSNMFFGLTPLYGVRSYGEEDIPFYSSSTGKKRGKRSAEGQVDGADDLSTSDEDDLYYYNFTRTVISSGGEERLASHNLFREEEQCDLPKISQLDGVDDGTESDTSVTATTRKSSQIPKRNGKENGTENLKIDRPEDAGEKEHVTKSSVGHKNEPKMDNCHSVSRVKTQGQDSLEAQLSSLESSRRVHTSTPSDKNLLDTYNTELLKSDSDNNNSDDCGNILPSDIMDFVLKNTPSMQALGESPESSSSELLNLGEGLGLDSNREKDMGLFEVFSQQLPTTEPVDSSVSSSISAEEQFELPLELPSDLSVLTTRSPTVPSQNPSRLAVISDSGEKRVTITEKSVASSESDPALLSPGVDPTPEGHMTPDHFIQGHMDADHISSPPCGSVEQGHGNNQDLTRNSSTPGLQVPVSPTVPIQNQKYVPNSTDSPGPSQISNAAVQTTPPHLKPATEKLIVVNQNMQPLYVLQTLPNGVTQKIQLTSSVSSTPSVMETNTSVLGPMGGGLTLTTGLNPSLPTSQSLFPSASKGLLPMSHHQHLHSFPAATQSSFPPNISNPPSGLLIGVQPPPDPQLLVSESSQRTDLSTTVATPSSGLKKRPISRLQTRKNKKLAPSSTPSNIAPSDVVSNMTLINFTPSQLPNHPSLLDLGSLNTSSHRTVPNIIKRSKSSIMYFEPAPLLPQSVGGTAATAAGTSTISQDTSHLTSGSVSGLASSSSVLNVVSMQTTTTPTSSASVPGHVTLTNPRLLGTPDIGSISNLLIKASQQSLGIQDQPVALPPSSGMFPQLGTSQTPSTAAITAASSICVLPSTQTTGITAASPSGEADEHYQLQHVNQLLASKTGIHSSQRDLDSASGPQVSNFTQTVDAPNSMGLEQNKALSSAVQASPTSPGGSPSSPSSGQRSASPSVPGPTKPKPKTKRFQLPLDKGNGKKHKVSHLRTSSSEAHIPDQETTSLTSGTGTPGAEAEQQDTASVEQSSQKECGQPAGQVAVLPEVQVTQNPANEQESAEPKTVEEEESNFSSPLMLWLQQEQKRKESITEKKPKKGLVFEISSDDGFQICAESIEDAWKSLTDKVQEARSNARLKQLSFAGVNGLRMLGILHDAVVFLIEQLSGAKHCRNYKFRFHKPEEANEPPLNPHGSARAEVHLRKSAFDMFNFLASKHRQPPEYNPNDEEEEEVQLKSARRATSMDLPMPMRFRHLKKTSKEAVGVYRSPIHGRGLFCKRNIDAGEMVIEYAGNVIRSIQTDKREKYYDSKGIGCYMFRIDDSEVVDATMHGNAARFINHSCEPNCYSRVINIDGQKHIVIFAMRKIYRGEELTYDYKFPIEDASNKLPCNCGAKKCRKFLN

SEQ ID NO: 862726 - protein, 4009 aa, Homo sapiens
ASLHGANMAHSCRWRFPARPGTTGGGGGGGRRGLGGAPRQRVPALLLPPGPPVGGGGPGAPPSPPAVAAAAAAAGSSGAGVPGGAAAASAASSSSASSSSSSSSSASSGPALLRVGPGFDAALQVSAAIGTNLRRFRAVFGESGGGGGSGELTTQIPCSWRTKGHIHDKKTEPFRLLAWSWCLNDEQFLGFGSDEEVRVRSPTRSPSVKTSPRKPRGRPRSGSDRNSAILSDPSVFSPLNKSETKSGDKIKKKDSKSIEKKRGRPPTFPGVKIKITHGKDISELPKGNKEDSLKKIKRTPSATFQQATKIKKLRAGKLSPLKSKFKTGKLQIGRKGVQIVRRRGRPPSTERIKTPSGLLINSELEKPQKVRKDKEGTPPLTKEDKTVVRQSPRRIKPVRIIPSSKRTDATIAKQLLQRAKKGAQKKIEKEAAQLQGRKVKTQVKNIRQFIMPVVSAISSRIIKTPRRFIEDEDYDPPIKIARLESTPNSRFSAPSCGSSEKSSAASQHSSQMSSDSSRSSSPSVDTSTDSQASEEIQVLPEERSDTPEVHPPLPISQSPENESNDRRSRRYSVSERSFGSRTTKKLSTLQSAPQQQTSSSPPPPLLTPPPPLQPASSISDHTPWLMPPTIPLASPFLPASTAPMQGKRKSILREPTFRWTSLKHSRSEPQYFSSAKYAKEGLIRKPIFDNFRPPPLTPEDVGFASGFSASGTAASARLFSPLHSGTRFDMHKRSPLLRAPRFTPSEAHSRIFESVTLPSNRTSAGTSSSGVSNRKRKRKVFSPIRSEPRSPSHSMRTRSGRLSSSELSPLTPPSSVSSSLSISVSPLATSALNPTFTFPSHSLTQSGESAEKNQRPRKQTSAPAEPFSSSSPTPLFPWFTPGSQTERGRNKDKAPEELSKDRDADKSVEKDKSRERDREREKENKRESRKEKRKKGSEIQSSSALYPVGRVSKEKVVGEDVATSSSAKKATGRKKSSSHDSGTDITSVTLGDTTAVKTKILIKKGRGNLEKTNLDLGPTAPSLEKEKTLCLSTPSSSTVKHSTSSIGSMLAQADKLPMTDKRVASLLKKAKAQLCKIEKSKSLKQTDQPKAQGQESDSSETSVRGPRIKHVCRRAAVALGRKRAVFPDDMPTLSALPWEEREKILSSMGNDDKSSIAGSEDAEPLAPPIKPIKPVTRNKAPQEPPVKKGRRSRRCGQCPGCQVPEDCGVCTNCLDKPKFGGRNIKKQCCKMRKCQNLQWMPSKAYLQKQAKAVKKKEKKSKTSEKKDSKESSVVKNVVDSSQKPTPSAREDPAPKKSSSEPPPRKPVEEKSEEGNVSAPGPESKQATTPASRKSSKQVSQPAVVIPPQPPTTGPPRKEVPKTTPSEPKKKQPPPPESGPEQSKQKKVAPRPSIPVKQKPKEKEKPPPVNKQENAGTLNILSTLSNGNSSKQKIPADGVHRIRVDFKEDCEAENVWEMGGLGILTSVPITPRVVCFLCASSGHVEFVYCQVCCEPFHKFCLEENERPLEDQLENWCCRRCKFCHVCGRQHQATKQLLECNKCRNSYHPECLGPNYPTKPTKKKKVWICTKCVRCKSCGSTTPGKGWDAQWSHDFSLCHDCAKLFAKGNFCPLCDKCYDDDDYESKMMQCGKCDRWVHSKCENLSDEMYEILSNLPESVAYTCVNCTERHPAEWRLALEKELQISLKQVLTALLNSRTTSHLLRYRQAAKPPDLNPETEESIPSRSSPEGPDPPVLTEVSKQDDQQPLDLEGVKRKMDQGNYTSVLEFSDDIVKIIQAAINSDGGQPEIKKANSMVKSFFIRQMERVFPWFSVKKSRFWEPNKVSSNSGMLPNAVLPPSLDHNYAQWQEREENSHTEQPPLMKKIIPAPKPKGPGEPDSPTPLHPPTPPILSTDRSREDSPELNPPPGIEDNRQCALCLTYGDDSANDAGRLLYIGQNEWTHVNCALWSAEVFEDDDGSLKNVHMAVIRGKQLRCEFCQKPGATVGCCLTSCTSNYHFMCSRAKNCVFLDDKKVYCQRHRDLIKGEVVPENGFEVFRRVFVDFEGISLRRKFLNGLEPENIHMMIGSMTIDCLGILNDLSDCEDKLFPIGYQCSRVYWSTTDARKRCVYTCKIVECRPPVVEPDINSTVEHDENRTIAHSPTSFTESSSKESQNTAEIISPPSPDRPPHSQTSGSCYYHVISKVPRIRTPSYSPTQRSPGCRPLPSAGSPTPTTHEIVTVGDPLLSSGLRSIGSRRHSTSSLSPQRSKLRIMSPMRTGNTYSRNNVSSVSTTGTATDLESSAKVVDHVLGPLNSSTSLGQNTSTSSNLQRTVVTVGNKNSHLDGSSSSEMKQSSASDLVSKSSSLKGEKTKVLSSKSSEGSAHNVAYPGIPKLAPQVHNTTSRELNVSKIGSFAEPSSVSFSSKEALSFPHLHLRGQRNDRDQHTDSTQSANSSPDEDTEVKTLKLSGMSNRSSIINEHMGSSSRDRRQKGKKSCKETFKEKHSSKSFLEPGQVTTGEEGNLKPEFMDEVLTPEYMGQRPCNNVSSDKIGDKGLSMPGVPKAPPMQVEGSAKELQAPRKRTVKVTLTPLKMENESQSKNALKESSPASPLQIESTSPTEPISASENPGDGPVAQPSPNNTSCQDSQSNNYQNLPVQDRNLMLPDGPKPQEDGSFKRRYPRRSARARSNMFFGLTPLYGVRSYGEEDIPFYSSSTGKKRGKRSAEGQVDGADDLSTSDEDDLYYYNFTRTVISSGGEERLASHNLFREEEQCDLPKISQLDGVDDGTESDTSVTATTRKSSQIPKRNGKENGTENLKIDRPEDAGEKEHVTKSSVGHKNEPKMDNCHSVSRVKTQGQDSLEAQLSSLESSRRVHTSTPSDKNLLDTYNTELLKSDSDNNNSDDCGNILPSDIMDFVLKNTPSMQALGESPESSSSELLNLGEGLGLDSNREKDMGLFEVFSQQLPTTEPVDSSVSSSISAEEQFELPLELPSDLSVLTTRSPTVPSQNPSRLAVISDSGEKRVTITEKSVASSESDPALLSPGVDPTPEGHMTPDHFIQGHMDADHISSPPCGSVEQGHGNNQDLTRNSSTPGLQVPVSPTVPIQNQKYVPNSTDSPGPSQISNAAVQTTPPHLKPATEKLIVVNQNMQPLYVLQTLPNGVTQKIQLTSSVSSTPSVMETNTSVLGPMGGGLTLTTGLNPSLPTSQSLFPSASKGLLPMSHHQHLHSFPAATQSSFPPNISNPPSGLLIGVQPPPDPQLLVSESSQRTDLSTTVATPSSGLKKRPISRLQTRKNKKLAPSSTPSNIAPSDVVSNMTLINFTPSQLPNHPSLLDLGSLNTSSHRTVPNIIKRSKSSIMYFEPAPLLPQSVGGTAATAAGTSTISQDTSHLTSGSVSGLASSSSVLNVVSMQTTTTPTSSASVPGHVTLTNPRLLGTPDIGSISNLLIKASQQSLGIQDQPVALPPSSGMFPQLGTSQTPSTAAITAASSICVLPSTQTTGITAASPSGEADEHYQLQHVNQLLASKTGIHSSQRDLDSASGPQVSNFTQTVDAPNSMGLEQNKALSSAVQASPTSPGGSPSSPSSGQRSASPSVPGPTKPKPKTKRFQLPLDKGNGKKHKVSHLRTSSSEAHIPDQETTSLTSGTGTPGAEAEQQDTASVEQSSQKECGQPAGQVAVLPEVQVTQNPANEQESAEPKTVEEEESNFSSPLMLWLQQEQKRKESITEKKPKKGLVFEISSDDGFQICAESIEDAWKSLTDKVQEARSNARLKQLSFAGVNGLRMLGILHDAVVFLIEQLSGAKHCRNYKFRFHKPEEANEPPLNPHGSARAEVHLRKSAFDMFNFLASKHRQPPEYNPNDEEEEEVQLKSARRATSMDLPMPMRFRHLKKTSKEAVGVYRSPIHGRGLFCKRNIDAGEMVIEYAGNVIRSIQTDKREKYYDSKGIGCYMFRIDDSEVVDATMHGNAARFINHSCEPNCYSRVINIDGQKHIVIFAMRKIYRGEELTYDYKFPIEDASNKLPCNCGAKKCRKFLN

SEQ ID NO: 862727 - protein, 3805 aa, Homo sapiens
MKKSECEVPQGLLQLKLVLENLVGDLEVALTEIQLNKSETKSGDKIKKKDSKSIEKKRGRPPTFPGVKIKITHGKDISELPKGNKEDSLKKIKRTPSATFQQATKIKKLRAGKLSPLKSKFKTGKLQIGRKGVQIVRRRGRPPSTERIKTPSGLLINSELEKPQKVRKDKEGTPPLTKEDKTVVRQSPRRIKPVRIIPSSKRTDATIAKQLLQRAKKGAQKKIEKEAAQLQGRKVKTQVKNIRQFIMPVVSAISSRIIKTPRRFIEDEDYDPPIKIARLESTPNSRFSAPSCGSSEKSSAASQHSSQMSSDSSRSSSPSVDTSTDSQASEEIQVLPEERSDTPEVHPPLPISQSPENESNDRRSRRYSVSERSFGSRTTKKLSTLQSAPQQQTSSSPPPPLLTPPPPLQPASSISDHTPWLMPPTIPLASPFLPASTAPMQGKRKSILREPTFRWTSLKHSRSEPQYFSSAKYAKEGLIRKPIFDNFRPPPLTPEDVGFASGFSASGTAASARLFSPLHSGTRFDMHKRSPLLRAPRFTPSEAHSRIFESVTLPSNRTSAGTSSSGVSNRKRKRKVFSPIRSEPRSPSHSMRTRSGRLSSSELSPLTPPSSVSSSLSISVSPLATSALNPTFTFPSHSLTQSGESAEKNQRPRKQTSAPAEPFSSSSPTPLFPWFTPGSQTERGRNKDKAPEELSKDRDADKSVEKDKSRERDREREKENKRESRKEKRKKGSEIQSSSALYPVGRVSKEKVVGEDVATSSSAKKATGRKKSSSHDSGTDITSVTLGDTTAVKTKILIKKGRGNLEKTNLDLGPTAPSLEKEKTLCLSTPSSSTVKHSTSSIGSMLAQADKLPMTDKRVASLLKKAKAQLCKIEKSKSLKQTDQPKAQGQESDSSETSVRGPRIKHVCRRAAVALGRKRAVFPDDMPTLSALPWEEREKILSSMGNDDKSSIAGSEDAEPLAPPIKPIKPVTRNKAPQEPPVKKGRRSRRCGQCPGCQVPEDCGVCTNCLDKPKFGGRNIKKQCCKMRKCQNLQWMPSKAYLQKQAKAVKKKEKKSKTSEKKDSKESSVVKNVVDSSQKPTPSAREDPAPKKSSSEPPPRKPVEEKSEEGNVSAPGPESKQATTPASRKSSKQVSQPAVVIPPQPPTTGPPRKEVPKTTPSEPKKKQPPPPESGPEQSKQKKVAPRPSIPVKQKPKEKEKPPPVNKQENAGTLNILSTLSNGNSSKQKIPADGVHRIRVDFKEDCEAENVWEMGGLGILTSVPITPRVVCFLCASSGHVEFVYCQVCCEPFHKFCLEENERPLEDQLENWCCRRCKFCHVCGRQHQATKQLLECNKCRNSYHPECLGPNYPTKPTKKKKVWICTKCVRCKSCGSTTPGKGWDAQWSHDFSLCHDCAKLFAKGNFCPLCDKCYDDDDYESKMMQCGKCDRWVHSKCENLSDEMYEILSNLPESVAYTCVNCTERHPAEWRLALEKELQISLKQVLTALLNSRTTSHLLRYRQAAKPPDLNPETEESIPSRSSPEGPDPPVLTEVSKQDDQQPLDLEGVKRKMDQGNYTSVLEFSDDIVKIIQAAINSDGGQPEIKKANSMVKSFFIRQMERVFPWFSVKKSRFWEPNKVSSNSGMLPNAVLPPSLDHNYAQWQEREENSHTEQPPLMKKIIPAPKPKGPGEPDSPTPLHPPTPPILSTDRSREDSPELNPPPGIEDNRQCALCLTYGDDSANDAGRLLYIGQNEWTHVNCALWSAEVFEDDDGSLKNVHMAVIRGKQLRCEFCQKPGATVGCCLTSCTSNYHFMCSRAKNCVFLDDKKVYCQRHRDLIKGEVVPENGFEVFRRVFVDFEGISLRRKFLNGLEPENIHMMIGSMTIDCLGILNDLSDCEDKLFPIGYQCSRVYWSTTDARKRCVYTCKIVECRPPVVEPDINSTVEHDENRTIAHSPTSFTESSSKESQNTAEIISPPSPDRPPHSQTSGSCYYHVISKVPRIRTPSYSPTQRSPGCRPLPSAGSPTPTTHEIVTVGDPLLSSGLRSIGSRRHSTSSLSPQRSKLRIMSPMRTGNTYSRNNVSSVSTTGTATDLESSAKVVDHVLGPLNSSTSLGQNTSTSSNLQRTVVTVGNKNSHLDGSSSSEMKQSSASDLVSKSSSLKGEKTKVLSSKSSEGSAHNVAYPGIPKLAPQVHNTTSRELNVSKIGSFAEPSSVSFSSKEALSFPHLHLRGQRNDRDQHTDSTQSANSSPDEDTEVKTLKLSGMSNRSSIINEHMGSSSRDRRQKGKKSCKETFKEKHSSKSFLEPGQVTTGEEGNLKPEFMDEVLTPEYMGQRPCNNVSSDKIGDKGLSMPGVPKAPPMQVEGSAKELQAPRKRTVKVTLTPLKMENESQSKNALKESSPASPLQIESTSPTEPISASENPGDGPVAQPSPNNTSCQDSQSNNYQNLPVQDRNLMLPDGPKPQEDGSFKRRYPRRSARARSNMFFGLTPLYGVRSYGEEDIPFYSSSTGKKRGKRSAEGQVDGADDLSTSDEDDLYYYNFTRTVISSGGEERLASHNLFREEEQCDLPKISQLDGVDDGTESDTSVTATTRKSSQIPKRNGKENGTENLKIDRPEDAGEKEHVTKSSVGHKNEPKMDNCHSVSRVKTQGQDSLEAQLSSLESSRRVHTSTPSDKNLLDTYNTELLKSDSDNNNSDDCGNILPSDIMDFVLKNTPSMQALGESPESSSSELLNLGEGLGLDSNREKDMGLFEVFSQQLPTTEPVDSSVSSSISAEEQFELPLELPSDLSVLTTRSPTVPSQNPSRLAVISDSGEKRVTITEKSVASSESDPALLSPGVDPTPEGHMTPDHFIQGHMDADHISSPPCGSVEQGHGNNQDLTRNSSTPGLQVPVSPTVPIQNQKYVPNSTDSPGPSQISNAAVQTTPPHLKPATEKLIVVNQNMQPLYVLQTLPNGVTQKIQLTSSVSSTPSVMETNTSVLGPMGGGLTLTTGLNPSLPTSQSLFPSASKGLLPMSHHQHLHSFPAATQSSFPPNISNPPSGLLIGVQPPPDPQLLVSESSQRTDLSTTVATPSSGLKKRPISRLQTRKNKKLAPSSTPSNIAPSDVVSNMTLINFTPSQLPNHPSLLDLGSLNTSSHRTVPNIIKRSKSSIMYFEPAPLLPQSVGGTAATAAGTSTISQDTSHLTSGSVSGLASSSSVLNVVSMQTTTTPTSSASVPGHVTLTNPRLLGTPDIGSISNLLIKASQQSLGIQDQPVALPPSSGMFPQLGTSQTPSTAAITAASSICVLPSTQTTGITAASPSGEADEHYQLQHVNQLLASKTGIHSSQRDLDSASGPQVSNFTQTVDAPNSMGLEQNKALSSAVQASPTSPGGSPSSPSSGQRSASPSVPGPTKPKPKTKRFQLPLDKGNGKKHKVSHLRTSSSEAHIPDQETTSLTSGTGTPGAEAEQQDTASVEQSSQKECGQPAGQVAVLPEVQVTQNPANEQESAEPKTVEEEESNFSSPLMLWLQQEQKRKESITEKKPKKGLVFEISSDDGFQICAESIEDAWKSLTDKVQEARSNARLKQLSFAGVNGLRMLGILHDAVVFLIEQLSGAKHCRNYKFRFHKPEEANEPPLNPHGSARAEVHLRKSAFDMFNFLASKHRQPPEYNPNDEEEEEVQLKSARRATSMDLPMPMRFRHLKKTSKEAVGVYRSPIHGRGLFCKRNIDAGEMVIEYAGNVIRSIQTDKREKYYDSKGIGCYMFRIDDSEVVDATMHGNAARFINHSCEPNCYSRVINIDGQKHIVIFAMRKIYRGEELTYDYKFPIEDASNKLPCNCGAKKCRKFLN

SEQ ID NO: 862728 - protein, 3849 aa, Homo sapiens
PEQSKQKKVAPRPSIPVKQKPKEKDEQFLGFGSDEEVRVRSPTRSPSVKTSPRKPRGRPRSGSDRNSAILSDPSVFSPLNKSETKSGDKIKKKDSKSIEKKRGRPPTFPGVKIKITHGKDISELPKGNKEDSLKKIKRTPSATFQQATKIKKLRAGKLSPLKSKFKTGKLQIGRKGVQIVRRRGRPPSTERIKTPSGLLINSELEKPQKVRKDKEGTPPLTKEDKTVVRQSPRRIKPVRIIPSSKRTDATIAKQLLQRAKKGAQKKIEKEAAQLQGRKVKTQVKNIRQFIMPVVSAISSRIIKTPRRFIEDEDYDPPIKIARLESTPNSRFSAPSCGSSEKSSAASQHSSQMSSDSSRSSSPSVDTSTDSQASEEIQVLPEERSDTPEVHPPLPISQSPENESNDRRSRRYSVSERSFGSRTTKKLSTLQSAPQQQTSSSPPPPLLTPPPPLQPASSISDHTPWLMPPTIPLASPFLPASTAPMQGKRKSILREPTFRWTSLKHSRSEPQYFSSAKYAKEGLIRKPIFDNFRPPPLTPEDVGFASGFSASGTAASARLFSPLHSGTRFDMHKRSPLLRAPRFTPSEAHSRIFESVTLPSNRTSAGTSSSGVSNRKRKRKVFSPIRSEPRSPSHSMRTRSGRLSSSELSPLTPPSSVSSSLSISVSPLATSALNPTFTFPSHSLTQSGESAEKNQRPRKQTSAPAEPFSSSSPTPLFPWFTPGSQTERGRNKDKAPEELSKDRDADKSVEKDKSRERDREREKENKRESRKEKRKKGSEIQSSSALYPVGRVSKEKVVGEDVATSSSAKKATGRKKSSSHDSGTDITSVTLGDTTAVKTKILIKKGRGNLEKTNLDLGPTAPSLEKEKTLCLSTPSSSTVKHSTSSIGSMLAQADKLPMTDKRVASLLKKAKAQLCKIEKSKSLKQTDQPKAQGQESDSSETSVRGPRIKHVCRRAAVALGRKRAVFPDDMPTLSALPWEEREKILSSMGNDDKSSIAGSEDAEPLAPPIKPIKPVTRNKAPQEPPVKKGRRSRRCGQCPGCQVPEDCGVCTNCLDKPKFGGRNIKKQCCKMRKCQNLQWMPSKAYLQKQAKAVKKKEKKSKTSEKKDSKESSVVKNVVDSSQKPTPSAREDPAPKKSSSEPPPRKPVEEKSEEGNVSAPGPESKQATTPASRKSSKQVSQPAVVIPPQPPTTGPPRKEVPKTTPSEPKKKQPPPPESGPEQSKQKKVAPRPSIPVKQKPKEKEKPPPVNKQENAGTLNILSTLSNGNSSKQKIPADGVHRIRVDFKEDCEAENVWEMGGLGILTSVPITPRVVCFLCASSGHVEFVYCQVCCEPFHKFCLEENERPLEDQLENWCCRRCKFCHVCGRQHQATKQLLECNKCRNSYHPECLGPNYPTKPTKKKKVWICTKCVRCKSCGSTTPGKGWDAQWSHDFSLCHDCAKLFAKGNFCPLCDKCYDDDDYESKMMQCGKCDRWVHSKCENLSDEMYEILSNLPESVAYTCVNCTERHPAEWRLALEKELQISLKQVLTALLNSRTTSHLLRYRQAAKPPDLNPETEESIPSRSSPEGPDPPVLTEVSKQDDQQPLDLEGVKRKMDQGNYTSVLEFSDDIVKIIQAAINSDGGQPEIKKANSMVKSFFIRQMERVFPWFSVKKSRFWEPNKVSSNSGMLPNAVLPPSLDHNYAQWQEREENSHTEQPPLMKKIIPAPKPKGPGEPDSPTPLHPPTPPILSTDRSREDSPELNPPPGIEDNRQCALCLTYGDDSANDAGRLLYIGQNEWTHVNCALWSAEVFEDDDGSLKNVHMAVIRGKQLRCEFCQKPGATVGCCLTSCTSNYHFMCSRAKNCVFLDDKKVYCQRHRDLIKGEVVPENGFEVFRRVFVDFEGISLRRKFLNGLEPENIHMMIGSMTIDCLGILNDLSDCEDKLFPIGYQCSRVYWSTTDARKRCVYTCKIVECRPPVVEPDINSTVEHDENRTIAHSPTSFTESSSKESQNTAEIISPPSPDRPPHSQTSGSCYYHVISKVPRIRTPSYSPTQRSPGCRPLPSAGSPTPTTHEIVTVGDPLLSSGLRSIGSRRHSTSSLSPQRSKLRIMSPMRTGNTYSRNNVSSVSTTGTATDLESSAKVVDHVLGPLNSSTSLGQNTSTSSNLQRTVVTVGNKNSHLDGSSSSEMKQSSASDLVSKSSSLKGEKTKVLSSKSSEGSAHNVAYPGIPKLAPQVHNTTSRELNVSKIGSFAEPSSVSFSSKEALSFPHLHLRGQRNDRDQHTDSTQSANSSPDEDTEVKTLKLSGMSNRSSIINEHMGSSSRDRRQKGKKSCKETFKEKHSSKSFLEPGQVTTGEEGNLKPEFMDEVLTPEYMGQRPCNNVSSDKIGDKGLSMPGVPKAPPMQVEGSAKELQAPRKRTVKVTLTPLKMENESQSKNALKESSPASPLQIESTSPTEPISASENPGDGPVAQPSPNNTSCQDSQSNNYQNLPVQDRNLMLPDGPKPQEDGSFKRRYPRRSARARSNMFFGLTPLYGVRSYGEEDIPFYSSSTGKKRGKRSAEGQVDGADDLSTSDEDDLYYYNFTRTVISSGGEERLASHNLFREEEQCDLPKISQLDGVDDGTESDTSVTATTRKSSQIPKRNGKENGTENLKIDRPEDAGEKEHVTKSSVGHKNEPKMDNCHSVSRVKTQGQDSLEAQLSSLESSRRVHTSTPSDKNLLDTYNTELLKSDSDNNNSDDCGNILPSDIMDFVLKNTPSMQALGESPESSSSELLNLGEGLGLDSNREKDMGLFEVFSQQLPTTEPVDSSVSSSISAEEQFELPLELPSDLSVLTTRSPTVPSQNPSRLAVISDSGEKRVTITEKSVASSESDPALLSPGVDPTPEGHMTPDHFIQGHMDADHISSPPCGSVEQGHGNNQDLTRNSSTPGLQVPVSPTVPIQNQKYVPNSTDSPGPSQISNAAVQTTPPHLKPATEKLIVVNQNMQPLYVLQTLPNGVTQKIQLTSSVSSTPSVMETNTSVLGPMGGGLTLTTGLNPSLPTSQSLFPSASKGLLPMSHHQHLHSFPAATQSSFPPNISNPPSGLLIGVQPPPDPQLLVSESSQRTDLSTTVATPSSGLKKRPISRLQTRKNKKLAPSSTPSNIAPSDVVSNMTLINFTPSQLPNHPSLLDLGSLNTSSHRTVPNIIKRSKSSIMYFEPAPLLPQSVGGTAATAAGTSTISQDTSHLTSGSVSGLASSSSVLNVVSMQTTTTPTSSASVPGHVTLTNPRLLGTPDIGSISNLLIKASQQSLGIQDQPVALPPSSGMFPQLGTSQTPSTAAITAASSICVLPSTQTTGITAASPSGEADEHYQLQHVNQLLASKTGIHSSQRDLDSASGPQVSNFTQTVDAPNSMGLEQNKALSSAVQASPTSPGGSPSSPSSGQRSASPSVPGPTKPKPKTKRFQLPLDKGNGKKHKVSHLRTSSSEAHIPDQETTSLTSGTGTPGAEAEQQDTASVEQSSQKECGQPAGQVAVLPEVQVTQNPANEQESAEPKTVEEEESNFSSPLMLWLQQEQKRKESITEKKPKKGLVFEISSDDGFQICAESIEDAWKSLTDKVQEARSNARLKQLSFAGVNGLRMLGILHDAVVFLIEQLSGAKHCRNYKFRFHKPEEANEPPLNPHGSARAEVHLRKSAFDMFNFLASKHRQPPEYNPNDEEEEEVQLKSARRATSMDLPMPMRFRHLKKTSKEAVGVYRSPIHGRGLFCKRNIDAGEMVIEYAGNVIRSIQTDKREKYYDSKGIGCYMFRIDDSEVVDATMHGNAARFINHSCEPNCYSRVINIDGQKHIVIFAMRKIYRGEELTYDYKFPIEDASNKLPCNCGAKKCRKFLN

SEQ ID NO: 862729 - protein, 3137 aa, Homo sapiens
ASLHGANMAHSCRWRFPARPGTTGGGGGGGRRGLGGAPRQRVPALLLPPGPPVGGGGPGAPPSPPAVAAAAAAAGSSGAGVPGGAAAASAASSSSASSSSSSSSSASSGPALLRVGPGFDAALQVSAAIGTNLRRFRAVFGESGGGGGSGEDEQFLGFGSDEEVRVRSPTRSPSGSMLAQADKLPMTDKRVASLLKKAKAQLCKIEKSKSLKQTDQPKAQGQESDSSETSVRGPRIKHVCRRAAVALGRKRAVFPDDMPTLSALPWEEREKILSSMGNDDKSSIAGSEDAEPLAPPIKPIKPVTRNKAPQEPPVKKGRRSRRCGQCPGCQVPEDCGVCTNCLDKPKFGGRNIKKQCCKMRKCQNLQWMPSKAYLQKQAKAVKKKEKKSKTSEKKDSKESSVVKNVVDSSQKPTPSAREDPAPKKSSSEPPPRKPVEEKSEEGNVSAPGPESKQATTPASRKSSKQVSQPAVVIPPQPPTTGPPRKEVPKTTPSEPKKKQPPPPESGPEQSKQKKVAPRPSIPVKQKPKEKEKPPPVNKQENAGTLNILSTLSNGNSSKQKIPADGVHRIRVDFKEDCEAENVWEMGGLGILTSVPITPRVVCFLCASSGHVEFVYCQVCCEPFHKFCLEENERPLEDQLENWCCRRCKFCHVCGRQHQATKQLLECNKCRNSYHPECLGPNYPTKPTKKKKVWICTKCVRCKSCGSTTPGKGWDAQWSHDFSLCHDCAKLFAKGNFCPLCDKCYDDDDYESKMMQCGKCDRWVHSKCENLSDEMYEILSNLPESVAYTCVNCTERHPAEWRLALEKELQISLKQVLTALLNSRTTSHLLRYRQAAKPPDLNPETEESIPSRSSPEGPDPPVLTEVSKQDDQQPLDLEGVKRKMDQGNYTSVLEFSDDIVKIIQAAINSDGGQPEIKKANSMVKSFFIRQMERVFPWFSVKKSRFWEPNKVSSNSGMLPNAVLPPSLDHNYAQWQEREENSHTEQPPLMKKIIPAPKPKGPGEPDSPTPLHPPTPPILSTDRSREDSPELNPPPGIEDNRQCALCLTYGDDSANDAGRLLYIGQNEWTHVNCALWSAEVFEDDDGSLKNVHMAVIRGKQLRCEFCQKPGATVGCCLTSCTSNYHFMCSRAKNCVFLDDKKVYCQRHRDLIKGEVVPENGFEVFRRVFVDFEGISLRRKFLNGLEPENIHMMIGSMTIDCLGILNDLSDCEDKLFPIGYQCSRVYWSTTDARKRCVYTCKIVECRPPVVEPDINSTVEHDENRTIAHSPTSFTESSSKESQNTAEIISPPSPDRPPHSQTSGSCYYHVISKVPRIRTPSYSPTQRSPGCRPLPSAGSPTPTTHEIVTVGDPLLSSGLRSIGSRRHSTSSLSPQRSKLRIMSPMRTGNTYSRNNVSSVSTTGTATDLESSAKVVDHVLGPLNSSTSLGQNTSTSSNLQRTVVTVGNKNSHLDGSSSSEMKQSSASDLVSKSSSLKGEKTKVLSSKSSEGSAHNVAYPGIPKLAPQVHNTTSRELNVSKIGSFAEPSSVSFSSKEALSFPHLHLRGQRNDRDQHTDSTQSANSSPDEDTEVKTLKLSGMSNRSSIINEHMGSSSRDRRQKGKKSCKETFKEKHSSKSFLEPGQVTTGEEGNLKPEFMDEVLTPEYMGQRPCNNVSSDKIGDKGLSMPGVPKAPPMQVEGSAKELQAPRKRTVKVTLTPLKMENESQSKNALKESSPASPLQIESTSPTEPISASENPGDGPVAQPSPNNTSCQDSQSNNYQNLPVQDRNLMLPDGPKPQEDGSFKRRYPRRSARARSNMFFGLTPLYGVRSYGEEDIPFYSSSTGKKRGKRSAEGQVDGADDLSTSDEDDLYYYNFTRTVISSGGEERLASHNLFREEEQCDLPKISQLDGVDDGTESDTSVTATTRKSSQIPKRNGKENGTENLKIDRPEDAGEKEHVTKSSVGHKNEPKMDNCHSVSRVKTQGQDSLEAQLSSLESSRRVHTSTPSDKNLLDTYNTELLKSDSDNNNSDDCGNILPSDIMDFVLKNTPSMQALGESPESSSSELLNLGEGLGLDSNREKDMGLFEVFSQQLPTTEPVDSSVSSSISAEEQFELPLELPSDLSVLTTRSPTVPSQNPSRLAVISDSGEKRVTITEKSVASSESDPALLSPGVDPTPEGHMTPDHFIQGHMDADHISSPPCGSVEQGHGNNQDLTRNSSTPGLQVPVSPTVPIQNQKYVPNSTDSPGPSQISNAAVQTTPPHLKPATEKLIVVNQNMQPLYVLQTLPNGVTQKIQLTSSVSSTPSVMETNTSVLGPMGGGLTLTTGLNPSLPTSQSLFPSASKGLLPMSHHQHLHSFPAATQSSFPPNISNPPSGLLIGVQPPPDPQLLVSESSQRTDLSTTVATPSSGLKKRPISRLQTRKNKKLAPSSTPSNIAPSDVVSNMTLINFTPSQLPNHPSLLDLGSLNTSSHRTVPNIIKRSKSSIMYFEPAPLLPQSVGGTAATAAGTSTISQDTSHLTSGSVSGLASSSSVLNVVSMQTTTTPTSSASVPGHVTLTNPRLLGTPDIGSISNLLIKASQQSLGIQDQPVALPPSSGMFPQLGTSQTPSTAAITAASSICVLPSTQTTGITAASPSGEADEHYQLQHVNQLLASKTGIHSSQRDLDSASGPQVSNFTQTVDAPNSMGLEQNKALSSAVQASPTSPGGSPSSPSSGQRSASPSVPGPTKPKPKTKRFQLPLDKGNGKKHKVSHLRTSSSEAHIPDQETTSLTSGTGTPGAEAEQQDTASVEQSSQKECGQPAGQVAVLPEVQVTQNPANEQESAEPKTVEEEESNFSSPLMLWLQQEQKRKESITEKKPKKGLVFEISSDDGFQICAESIEDAWKSLTDKVQEARSNARLKQLSFAGVNGLRMLGILHDAVVFLIEQLSGAKHCRNYKFRFHKPEEANEPPLNPHGSARAEVHLRKSAFDMFNFLASKHRQPPEYNPNDEEEEEVQLKSARRATSMDLPMPMRFRHLKKTSKEAVGVYRSPIHGRGLFCKRNIDAGEMVIEYAGNVIRSIQTDKREKYYDSKGIGCYMFRIDDSEVVDATMHGNAARFINHSCEPNCYSRVINIDGQKHIVIFAMRKIYRGEELTYDYKFPIEDASNKLPCNCGAKKCRKFLN

SEQ ID NO: 862730 - protein, 3679 aa, Homo sapiens
ASLHGANMAHSCRWRFPARPGTTGGGGGGGRRGLGGAPRQRVPALLLPPGPPVGGGGPGAPPSPPAVAAAAAAAGSSGAGVPGGAAAASAASSSSASSSSSSSSSASSGPALLRVGPGFDAALQVSAAIGTNLRRFRAVFGESGGGGGSGEDEQFLGFGSDEEVRVRSPTRSPSVKTSPRKPRGRPRSGSDRNSAILSDPSVFSPLNKSETKSGDKIKKKDSKSIEKKRGRPPTFPGVKIKITHGKDISELPKGNKEDSLKKIKRTPSATFQQATKIKKLRAGKLSPLKSKFKTGKLQIGRKGVQIVRRRGRPPSTERIKTPSGLLINSELEKPQKVRKDKEGTPPLTKEDKTVVRQSPRRIKPVRIIPSSKRTDATIAKQLLQRAKKGAQKKIEKEAAQLQGRKVKTQVKNIRQFIMPVVSAISSRIIKTPRRFIEDEDYDPPIKIARLESTPNSRFSAPSCGSSEKSSAASQHSSQMSSDSSRSSSPSVDTSTDSQASEEIQVLPEERSDTPEVHPPLPISQSPENESNDRRSRRYSVSERSFGSRTTKKLSTLQSAPQQQTSSSPPPPLLTPPPPLQPASSISDHTPWLMPPTIPLASPFLPASTAPMQGKRKSILREPTFRWTSLKHSRSEPQYFSSAKYAKEGLIRKPIFDNFRPPPLTPEDVGFASGFSASGTAASARLFSPLHSGTRFDMHKRSPLLRAPRFTPSEAHSRIFESVTLPSNRTSAGTSSSGVSNRKRKRKVFSPIRSEPRSPSHSMRTRSGRLSSSELSPLTPPSSVSSSLSISVSPLATSALNPTFTFPSHSLTQSGESAEKNQRPRKQTSAPAEPFSSSSPTPLFPWFTPGSQTERGRNKDKAPEELSKDRDADKSVEKDKSRERDREREKENKRESRKEKRKKGSEIQSSSALYPVGRVSKEKVVGEDVATSSSAKKATGRKKSSSHDSGTDITSVTLGDTTAVKTKILIKKGRGNLEKTNLDLGPTAPSLEKEKTLCLSTPSSSTVKHSTSSIGSMLAQADKLPMTDKRVASLLKKAKAQLCKIEKSKSLKQTDQPKAQGQESDSSETSVRGPRIKHVCRRAAVALGRKRAVFPDDMPTLSALPWEEREKILSSMGNDDKSSIAGSEDAEPLAPPIKPIKPVTRNKAPQEPPVKKGRRSRRCGQCPGCQVPEDCGVCTNCLDKPKFGGRNIKKQCCKMRKCQNLQWMPSKAYLQKQAKAVKKKEKKSKTSEKKDSKESSVVKNVVDSSQKPTPSAREDPAPKKSSSEPPPRKPVEEKSEEGNVSAPGPESKQATTPASRKSSKQVSQPAVVIPPQPPTTGPPRKEVPKTTPSEPKKKQPPPPESGPEQSKQKKVAPRPSIPVKQKPKEKEKPPPVNKQENAGTLNILSTLSNGNSSKQKIPADGVHRIRVDFKEDCEAENVWEMGGLGILTSVPITPRVVCFLCASSGHVEFVYCQVCCEPFHKFCLEENERPLEDQLENWCCRRCKFCHVCGRQHQATKQLLECNKCRNSYHPECLGPNYPTKPTKKKKVWICTKCVRCKSCGSTTPGKGWDAQWSHDFSLCHDCAKLFAKGNFCPLCDKCYDDDDYESKMMQCGKCDRWVHSKCENLSDEMYEILSNLPESVAYTCVNCTERHPAEWRLALEKELQISLKQVLTALLNSRTTSHLLRYRQAAKPPDLNPETEESIPSRSSPEGPDPPVLTEVSKQDDQQPLDLEGVKRKMDQGNYTSVLEFSDDIVKIIQAAINSDGGQPEIKKANSMVKSFFIRQMERVFPWFSVKKSRFWEPNKVSSNSGMLPNAVLPPSLDHNYAQWQEREENSHTEQPPLMKKIIPAPKPKGPGEPDSPTPLHPPTPPILSTDRSREDSPELNPPPGIEDNRQCALCLTYGDDSANDAGRLLYIGQNEWTHVNCALWSAEVFEDDDGSLKNVHMAVIRGKQLRCEFCQKPGATVGCCLTSCTSNYHFMCSRAKNCVFLDDKKVYCQRHRDLIKGEVVPENGFEVFRRVFVDFEGISLRRKFLNGLEPENIHMMIGSMTIDCLGILNDLSDCEDKLFPIGYQCSRVYWSTTDARKRCVYTCKIVECRPPVVEPDINSTVEHDENRTIAHSPTSFTESSSKESQNTAEIISPPSPDRPPHSQTSGSCYYHVISKVPRIRTPSYSPTQRSPGCRPLPSAGSPTPTTHEIVTVGDPLLSSGLRSIGSRRHSTSSLSPQRSKLRIMSPMRTGNTYSRNNVSSVSTTGTATDLESSAKVVDHVLGPLNSSTSLGQNTSTSSNLQRTVVTVGNKNSHLDGSSSSEMKQSSASDLVSKSSSLKGEKTKVLSSKSSEGSAHNVAYPGIPKLAPQVHNTTSRELNVSKIGSFAEPSSVSFSSKEALSFPHLHLRGQRNDRDQHTDSTQSANSSPDEDTEVKTLKLSGMSNRSSIINEHMGSSSRDRRQKGKKSCKETFKEKHSSKSFLEPGQVTTGEEGNLKPEFMDEVLTPEYMGQRPCNNVSSDKIGDKGLSMPGVPKAPPMQVEGSAKELQAPRKRTVKVTLTPLKMENESQSKNALKESSPASPLQIESTSPTEPISASENPGDGPVAQPSPNNTSCQDSQSNNYQNLPVQDRNLMLPDGPKPQEDGSFKRRYPRRSARARSNMFFGLTPLYGVRSYGEEDIPFYSSSTGKKRGKRSAEGQVDGADDLSTSDEDDLYYYNFTRTVISSGGEERLASHNLFREEEQCDLPKISQLDGVDDGTESDTSVTATTRKSSQIPKRNGKENGTENLKIDRPEDAGEKEHVTKSSVGHKNEPKMDNCHSVSRVKTQGQDSLEAQLSSLESSRRVHTSTPSDKNLLDTYNTELLKSDSDNNNSDDCGNILPSDIMDFVLKNTPSMQALGESPESSSSELLNLGEGLGLDSNREKDMGLFEVFSQQLPTTEPVDSSVSSSISAEEQFELPLELPSDLSVLTTRSPTVPSQNPSRLAVISDSGEKRVTITEKSVASSESDPALLSPGVDPTPEGHMTPDHFIQGHMDADHISSPPCGSVEQGHGNNQDLTRNSSTPGLQVPVSPTVPIQNQKYVPNSTDSPGPSQISNAAVQTTPPHLKPATEKLIVVNQNMQPLYVLQTLPNGVTQKIQLTSSVSSTPSVMETNTSVLGPMGGGLTLTTGLNPSLPTSQSLFPSASKGLLPMSHHQHLHSFPAATQSSFPPNISNPPSGLLIGVQPPPDPQLLVSESSQRTDLSTTVATPSSGLKKRPISRLQTRKNKKLAPSSTPSNIAPSDVVSNMTLINFTPSQLPNHPSLLDLGSLNTSSHRTVPNIIKRSKSSIMYFEPAPLLPQSVGGTAATAAGTSTISQDTSHLTSGSVSGLASSSSVLNVVSMQTTTTPTSSASVPGHVTLTNPRLLGTPDIGSISNLLIKASQQSLGIQDQPVALPPSSGMFPQLGTSQTPSTAAITAASSICVLPSTQTTGITAASPSGEADEHYQLQHVNQLLASKTGIHSSQRDLDSASGPQVSNFTQTVDAPNSMGLEQNKALSSAVQASPTSPGGSPSSPSSGQRSASPSVPGPTKPKPKTKRFQLPLDKGNGKKHKVSHLRTSSSEAHIPDQETTSLTSGTGTPGAEAEQQDTASVEQSSQKECGQPAGQVAVLPEVQVTQNPANEQESAGMWVGKRLESENINAKRIMRITHFTYLFSTFKKKNLSSKEVK

SEQ ID NO: 862731 - protein, 3616 aa, Homo sapiens
ASLHGANMAHSCRWRFPARPGTTGGGGGGGRRGLGGAPRQRVPALLLPPGPPVGGGGPGAPPSPPAVAAAAAAAGSSGAGVPGGAAAASAASSSSASSSSSSSSSASSGPALLRVGPGFDAALQVSAAIGTNLRRFRAVFGESGGGGGSGEDEQFLGFGSDEEVRVRSPTRSPSVKTSPRKPRGRPRSGSDRNSAILSDPSVFSPLNKSETKSGDKIKKKDSKSIEKKRGRPPTFPGVKIKITHGKDISELPKGNKEDSLKKIKRTPSATFQQATKIKKLRAGKLSPLKSKFKTGKLQIGRKGVQIVRRRGRPPSTERIKTPSGLLINSELEKPQKVRKDKEGTPPLTKEDKTVVRQSPRRIKPVRIIPSSKRTDATIAKQLLQRAKKGAQKKIEKEAAQLQGRKVKTQVKNIRQFIMPVVSAISSRIIKTPRRFIEDEDYDPPIKIARLESTPNSRFSAPSCGSSEKSSAASQHSSQMSSDSSRSSSPSVDTSTDSQASEEIQVLPEERSDTPEVHPPLPISQSPENESNDRRSRRYSVSERSFGSRTTKKLSTLQSAPQQQTSSSPPPPLLTPPPPLQPASSISDHTPWLMPPTIPLASPFLPASTAPMQGKRKSILREPTFRWTSLKHSRSEPQYFSSAKYAKEGLIRKPIFDNFRPPPLTPEDVGFASGFSASGTAASARLFSPLHSGTRFDMHKRSPLLRAPRFTPSEAHSRIFESVTLPSNRTSAGTSSSGVSNRKRKRKVFSPIRSEPRSPSHSMRTRSGRLSSSELSPLTPPSSVSSSLSISVSPLATSALNPTFTFPSHSLTQSGESAEKNQRPRKQTSAPAEPFSSSSPTPLFPWFTPGSQTERGRNKDKAPEELSKDRDADKSVEKDKSRERDREREKENKRESRKEKRKKGSEIQSSSALYPVGRVSKEKVVGEDVATSSSAKKATGRKKSSSHDSGTDITSVTLGDTTAVKTKILIKKGRGNLEKTNLDLGPTAPSLEKEKTLCLSTPSSSTVKHSTSSIGSMLAQADKLPMTDKRVASLLKKAKAQLCKIEKSKSLKQTDQPKAQGQESDSSETSVRGPRIKHVCRRAAVALGRKRAVFPDDMPTLSALPWEEREKILSSMGNDDKSSIAGSEDAEPLAPPIKPIKPVTRNKAPQEPPVKKGRRSRRCGQCPGCQVPEDCGVCTNCLDKPKFGGRNIKKQCCKMRKCQNLQWMPSKAYLQKQAKAVKKKEKKSKTSEKKDSKESSVVKNVVDSSQKPTPSAREDPAPKKSSSEPPPRKPVEEKSEEGNVSAPGPESKQATTPASRKSSKQVSQPAVVIPPQPPTTGPPRKEVPKTTPSEPKKKQPPPPESGPEQSKQKKVAPRPSIPVKQKPKEKEKPPPVNKQENAGTLNILSTLSNGNSSKQKIPADGVHRIRVDFKEDCEAENVWEMGGLGILTSVPITPRVVCFLCASSGHVEFVYCQVCCEPFHKFCLEENERPLEDQLENWCCRRCKFCHVCGRQHQATKQLLECNKCRNSYHPECLGPNYPTKPTKKKKVWICTKCVRCKSCGSTTPGKGWDAQWSHDFSLCHDCAKLFAKGNFCPLCDKCYDDDDYESKMMQCGKCDRWVHSKCENLSDEMYEILSNLPESVAYTCVNCTERHPAEWRLALEKELQISLKQVLTALLNSRTTSHLLRYRQAAKPPDLNPETEESIPSRSSPEGPDPPVLTEVSKQDDQQPLDLEGVKRKMDQGNYTSVLEFSDDIVKIIQAAINSDGGQPEIKKANSMVKSFFIRQMERVFPWFSVKKSRFWEPNKVSSNSGMLPNAVLPPSLDHNYAQWQEREENSHTEQPPLMKKIIPAPKPKGPGEPDSPTPLHPPTPPILSTDRSREDSPELNPPPGIEDNRQCALCLTYGDDSANDAGRLLYIGQNEWTHVNCALWSAEVFEDDDGSLKNVHMAVIRGKQLRCEFCQKPGATVGCCLTSCTSNYHFMCSRAKNCVFLDDKKVYCQRHRDLIKGEVVPENGFEVFRRVFVDFEGISLRRKFLNGLEPENIHMMIGSMTIDCLGILNDLSDCEDKLFPIGYQCSRVYWSTTDARKRCVYTCKIVECRPPVVEPDINSTVEHDENRTIAHSPTSFTESSSKESQNTAEIISPPSPDRPPHSQTSGSCYYHVISKVPRIRTPSYSPTQRSPGCRPLPSAGSPTPTTHEIVTVGDPLLSSGLRSIGSRRHSTSSLSPQRSKLRIMSPMRTGNTYSRNNVSSVSTTGTATDLESSAKVVDHVLGPLNSSTSLGQNTSTSSNLQRTVVTVGNKNSHLDGSSSSEMKQSSASDLVSKSSSLKGEKTKVLSSKSSEGSAHNVAYPGIPKLAPQVHNTTSRELNVSKIGSFAEPSSVSFSSKEALSFPHLHLRGQRNDRDQHTDSTQSANSSPDEDTEVKTLKLSGMSNRSSIINEHMGSSSRDRRQKGKKSCKETFKEKHSSKSFLEPGQVTTGEEGNLKPEFMDEVLTPEYMGQRPCNNVSSDKIGDKGLSMPGVPKAPPMQVEGSAKELQAPRKRTVKVTLTPLKMENESQSKNALKESSPASPLQIESTSPTEPISASENPGDGPVAQPSPNNTSCQDSQSNNYQNLPVQDRNLMLPDGPKPQEDGSFKRRYPRRSARARSNMFFGLTPLYGVRSYGEEDIPFYSSSTGKKRGKRSAEGQVDGADDLSTSDEDDLYYYNFTRTVISSGGEERLASHNLFREEEQCDLPKISQLDGVDDGTESDTSVTATTRKSSQIPKRNGKENGTENLKIDRPEDAGEKEHVTKSSVGHKNEPKMDNCHSVSRVKTQGQDSLEAQLSSLESSRRVHTSTPSDKNLLDTYNTELLKSDSDNNNSDDCGNILPSDIMDFVLKNTPSMQALGESPESSSSELLNLGEGLGLDSNREKDMGLFEVFSQQLPTTEPVDSSVSSSISAEEQFELPLELPSDLSVLTTRSPTVPSQNPSRLAVISDSGEKRVTITEKSVASSESDPALLSPGVDPTPEGHMTPDHFIQGHMDADHISSPPCGSVEQGHGNNQDLTRNSSTPGLQVPVSPTVPIQNQKYVPNSTDSPGPSQISNAAVQTTPPHLKPATEKLIVVNQNMQPLYVLQTLPNGVTQKIQLTSSVSSTPSVMETNTSVLGPMGGGLTLTTGLNPSLPTSQSLFPSASKGLLPMSHHQHLHSFPAATQSSFPPNISNPPSGLLIGVQPPPDPQLLVSESSQRTDLSTTVATPSSGLKKRPISRLQTRKNKKLAPSSTPSNIAPSDVVSNMTLINFTPSQLPNHPSLLDLGSLNTSSHRTVPNIIKRSKSSIMYFEPAPLLPQSVGGTAATAAGTSTISQDTSHLTSGSVSGLASSSSVLNVVSMQTTTTPTSSASVPGHVTLTNPRLLGTPDIGSISNLLIKASQQSLGIQDQPVALPPSSGMFPQLGTSQTPSTAAITAASSICVLPSTQTTGITAASPSGEADEHYQLQHVNQLLASKTGIHSSQRDLDSASGPQVSNFTQTVDAPNSMGLEQNKALSSAVQASPTSPGGSPSSPSSGQRSASPSVPGPTKPKPKTKRFQLPLDKGNGKKHKVSHLRTSSSEAHIPDQETTSLTSGTGTPGAEAEQQDTASVEQSSQKECGQPAG

SEQ ID NO: 862732 - protein, 1860 aa, Homo sapiens
ASLHGANMAHSCRWRFPARPGTTGGGGGGGRRGLGGAPRQRVPALLLPPGPPVGGGGPGAPPSPPAVAAAAAAAGSSGAGVPGGAAAASAASSSSASSSSSSSSSASSGPALLRVGPGFDAALQVSAAIGTNLRRFRAVFGESGGGGGSGEDEQFLGFGSDEEVRVRSPTRSPSVKTSPRKPRGRPRSGSDRNSAILSDPSVFSPLNKSETKSGDKIKKKDSKSIEKKRGRPPTFPGVKIKITHGKDISELPKGNKEDSLKKIKRTPSATFQQATKIKKLRAGKLSPLKSKFKTGKLQIGRKGVQIVRRRGRPPSTERIKTPSGLLINSELEKPQKVRKDKEGTPPLTKEDKTVVRQSPRRIKPVRIIPSSKRTDATIAKQLLQRAKKGAQKKIEKEAAQLQGRKVKTQVKNIRQFIMPVVSAISSRIIKTPRRFIEDEDYDPPIKIARLESTPNSRFSAPSCGSSEKSSAASQHSSQMSSDSSRSSSPSVDTSTDSQASEEIQVLPEERSDTPEVHPPLPISQSPENESNDRRSRRYSVSERSFGSRTTKKLSTLQSAPQQQTSSSPPPPLLTPPPPLQPASSISDHTPWLMPPTIPLASPFLPASTAPMQGKRKSILREPTFRWTSLKHSRSEPQYFSSAKYAKEGLIRKPIFDNFRPPPLTPEDVGFASGFSASGTAASARLFSPLHSGTRFDMHKRSPLLRAPRFTPSEAHSRIFESVTLPSNRTSAGTSSSGVSNRKRKRKVFSPIRSEPRSPSHSMRTRSGRLSSSELSPLTPPSSVSSSLSISVSPLATSALNPTFTFPSHSLTQSGESAEKNQRPRKQTSAPAEPFSSSSPTPLFPWFTPGSQTERGRNKDKAPEELSKDRDADKSVEKDKSRERDREREKENKRESRKEKRKKGSEIQSSSALYPVGRVSKEKVVGEDVATSSSAKKATGRKKSSSHDSGTDITSVTLGDTTAVKTKILIKKGRGNLEKTNLDLGPTAPSLEKEKTLCLSTPSSSTVKHSTSSIGSMLAQADKLPMTDKRVASLLKKAKAQLCKIEKSKSLKQTDQPKAQGQESDSSETSVRGPRIKHVCRRAAVALGRKRAVFPDDMPTLSALPWEEREKILSSMGNDDKSSIAGSEDAEPLAPPIKPIKPVTRNKAPQEPPVKKGRRSRRCGQCPGCQVPEDCGVCTNCLDKPKFGGRNIKKQCCKMRKCQNLQWMPSKAYLQKQAKAVKKKEKKSKTSEKKDSKESSVVKNVVDSSQKPTPSAREDPAPKKSSSEPPPRKPVEEKSEEGNVSAPGPESKQATTPASRKSSKQVSQPAVVIPPQPPTTGPPRKEVPKTTPSEPKKKQPPPPESGPEQSKQKKVAPRPSIPVKQKPKEKEKPPPVNKQENAGTLNILSTLSNGNSSKQKIPADGVHRIRVDFKEDCEAENVWEMGGLGILTSVPITPRVVCFLCASSGHVELENAGGDLKDGHHHYEGAVVILDAGAQYGKVIDRRVRELFVQSEIFPLETPAFAIKEQGFRAIIISGGPNSVYAEDAPWFDPAIFTIGKPVLGICYGMQMMNKVFGGTVHKKSDREDGVFNISVDNTCSLFRGLQKEEVVLLTHGDSVDKVADGFKVVARSGNIVAGIANESKKLYGAQFHPEVGLTENGKVILKNFLYDIAGCSGTFTVQNRELECIREIKERVGTSKVLVLLSGGVDSTVCTALLNRALNQEQVIAVHIDNGFMRKRESQSVEEALKKLGIQVKVINAAHSFYNGTTTLPISDEDRTPRKRISKTLNMTTSPEEKRKIIGDTFVKIANEVIGEMNLKPEEVFLAQGTLRPDLIESASLVASGKAELIKTHHNDTEAGVVACLDSGPGAETFPSSLFS

SEQ ID NO: 862733 - protein, 2314 aa, Homo sapiens
ASLHGANMAHSCRWRFPARPGTTGGGGGGGRRGLGGAPRQRVPALLLPPGPPVGGGGPGAPPSPPAVAAAAAAAGSSGAGVPGGAAAASAASSSSASSSSSSSSSASSGPALLRVGPGFDAALQVSAAIGTNLRRFRAVFGESGGGGGSGEDEQFLGFGSDEEVRVRSPTRSPSVKTSPRKPRGRPRSGSDRNSAILSDPSVFSPLNKSETKSGDKIKKKDSKSIEKKRGRPPTFPGVKIKITHGKDISELPKGNKEDSLKKIKRTPSATFQQATKIKKLRAGKLSPLKSKFKTGKLQIGRKGVQIVRRRGRPPSTERIKTPSGLLINSELEKPQKVRKDKEGTPPLTKEDKTVVRQSPRRIKPVRIIPSSKRTDATIAKQLLQRAKKGAQKKIEKEAAQLQGRKVKTQVKNIRQFIMPVVSAISSRIIKTPRRFIEDEDYDPPIKIARLESTPNSRFSAPSCGSSEKSSAASQHSSQMSSDSSRSSSPSVDTSTDSQASEEIQVLPEERSDTPEVHPPLPISQSPENESNDRRSRRYSVSERSFGSRTTKKLSTLQSAPQQQTSSSPPPPLLTPPPPLQPASSISDHTPWLMPPTIPLASPFLPASTAPMQGKRKSILREPTFRWTSLKHSRSEPQYFSSAKYAKEGLIRKPIFDNFRPPPLTPEDVGFASGFSASGTAASARLFSPLHSGTRFDMHKRSPLLRAPRFTPSEAHSRIFESVTLPSNRTSAGTSSSGVSNRKRKRKVFSPIRSEPRSPSHSMRTRSGRLSSSELSPLTPPSSVSSSLSISVSPLATSALNPTFTFPSHSLTQSGESAEKNQRPRKQTSAPAEPFSSSSPTPLFPWFTPGSQTERGRNKDKAPEELSKDRDADKSVEKDKSRERDREREKENKRESRKEKRKKGSEIQSSSALYPVGRVSKEKVVGEDVATSSSAKKATGRKKSSSHDSGTDITSVTLGDTTAVKTKILIKKGRGNLEKTNLDLGPTAPSLEKEKTLCLSTPSSSTVKHSTSSIGSMLAQADKLPMTDKRVASLLKKAKAQLCKIEKSKSLKQTDQPKAQGQESDSSETSVRGPRIKHVCRRAAVALGRKRAVFPDDMPTLSALPWEEREKILSSMGNDDKSSIAGSEDAEPLAPPIKPIKPVTRNKAPQEPPVKKGRRSRRCGQCPGCQVPEDCGVCTNCLDKPKFGGRNIKKQCCKMRKCQNLQWMPSKAYLQKQAKAVKKKEKKSKTSEKKDSKESSVVKNVVDSSQKPTPSAREDPAPKKSSSEPPPRKPVEEKSEEGNVSAPGPESKQATTPASRKSSKQVSQPAVVIPPQPPTTGPPRKEVPKTTPSEPKKKQPPPPESGPEQSKQKKVAPRPSIPVKQKPKEKEKPPPVNKQENAGTLNILSTLSNGNSSKQKIPADGVHRIRVDFKEDCEAENVWEMGGLGILTSVPITPRVVCFLCASSGHVETYSNEVHCVEEILKEMTHSWPPPLTAIHTPSTAEPSKFPFPTKDSQHVSSVTQNQKQYDTSSKTHSNSQQGTSSMLEDDLQLSDSEDSDSEQTPEKPPSSSAPPSAPQSLPEPVASAHSSSAESESTSDSDSSSDSESESSSSDSEENEPLETPAPEPEPPTTNKWQLDNWLTKVSSQLRHQRAPGAQSPHGGTQRVRAAATVPRVRSILNPKILPLKAPAKPPRPPEAPHPGKRSCQKSPAQQEPPQRQTVGTKQPKKPVKASARAGSRTSLQGEREPGLLPYGSRDQTSKDKPKVKTKGRPRAAASNEPKPAVPPSSEKKKHKSSLPAPSKALSGPEPAKDNVEDRTPEHFALVPLTESQGPPHSGSSSRTSGCRQAVVVQEDSRKDRLPLPLRDTKLLSPLRDTPPPQSLMVKITLDLLSRIPQPPGKGSRQRKAEDKQPPAGKKHSSEKRSSDSSSKLAKKRKGEAERDCDNKKIRLEKEIKSQSSSSSSSHKESSKTKPSRPSSQSSKKEMLPPPPVSSSSQKPAKPALKRSRREADTCGQDPPKSASSTKSNHKDSSIPKQRRVEGKGSRSSSEHKGSSGDTANPFPVPSLPNGNSKPGKPQVKFDKQQADLHMREEKKMKQKAELMTDRVGKAFKYLEAVLSFIECGIATESESQSSKSAYSVYSETVDLIKFIMSLKSFSDATAPTQEKIFAVLCMRCQSILNMAMFRCKKDIAIKYSRTLNKHFESSSKVAQAPSPCIARSTGTPSPLSPMPSPASSVGSQSSAGSVGSSGVAATISTPVTIQNMTSSYVTITSHVLTAFDLWEQAEALTRKNKEFFARLSTNVCTLALNSSLVDLVHYTRQGFQQLQELTKTP

SEQ ID NO: 862734 - protein, 1610 aa, Homo sapiens
ASLHGANMAHSCRWRFPARPGTTGGGGGGGRRGLGGAPRQRVPALLLPPGPPVGGGGPGAPPSPPAVAAAAAAAGSSGAGVPGGAAAASAASSSSASSSSSSSSSASSGPALLRVGPGFDAALQVSAAIGTNLRRFRAVFGESGGGGGSGEDEQFLGFGSDEEVRVRSPTRSPSVKTSPRKPRGRPRSGSDRNSAILSDPSVFSPLNKSETKSGDKIKKKDSKSIEKKRGRPPTFPGVKIKITHGKDISELPKGNKEDSLKKIKRTPSATFQQATKIKKLRAGKLSPLKSKFKTGKLQIGRKGVQIVRRRGRPPSTERIKTPSGLLINSELEKPQKVRKDKEGTPPLTKEDKTVVRQSPRRIKPVRIIPSSKRTDATIAKQLLQRAKKGAQKKIEKEAAQLQGRKVKTQVKNIRQFIMPVVSAISSRIIKTPRRFIEDEDYDPPIKIARLESTPNSRFSAPSCGSSEKSSAASQHSSQMSSDSSRSSSPSVDTSTDSQASEEIQVLPEERSDTPEVHPPLPISQSPENESNDRRSRRYSVSERSFGSRTTKKLSTLQSAPQQQTSSSPPPPLLTPPPPLQPASSISDHTPWLMPPTIPLASPFLPASTAPMQGKRKSILREPTFRWTSLKHSRSEPQYFSSAKYAKEGLIRKPIFDNFRPPPLTPEDVGFASGFSASGTAASARLFSPLHSGTRFDMHKRSPLLRAPRFTPSEAHSRIFESVTLPSNRTSAGTSSSGVSNRKRKRKVFSPIRSEPRSPSHSMRTRSGRLSSSELSPLTPPSSVSSSLSISVSPLATSALNPTFTFPSHSLTQSGESAEKNQRPRKQTSAPAEPFSSSSPTPLFPWFTPGSQTERGRNKDKAPEELSKDRDADKSVEKDKSRERDREREKENKRESRKEKRKKGSEIQSSSALYPVGRVSKEKVVGEDVATSSSAKKATGRKKSSSHDSGTDITSVTLGDTTAVKTKILIKKGRGNLEKTNLDLGPTAPSLEKEKTLCLSTPSSSTVKHSTSSIGSMLAQADKLPMTDKRVASLLKKAKAQLCKIEKSKSLKQTDQPKAQGQESDSSETSVRGPRIKHVCRRAAVALGRKRAVFPDDMPTLSALPWEEREKILSSMGNDDKSSIAGSEDAEPLAPPIKPIKPVTRNKAPQEPPVKKGRRSRRCGQCPGCQVPEDCGVCTNCLDKPKFGGRNIKKQCCKMRKCQNLQWMPSKAYLQKQAKAVKKKEKKSKTSEKKDSKESSVVKNVVDSSQKPTPSAREDPAPKKSSSEPPPRKPVEEKSEEGNVSAPGPESKQATTPASRKSSKQVSQPAVVIPPQPPTTGPPRKEVPKTTPSEPKKKQPPPPESGPEQSKQKKVAPRPSIPVKQKPKEKEKPPPVNKQENAGTLNILSTLSNGNSSKQKIPADGVHRIRVDFKEDCEAENVWEMGGLGILTSVPITPRVVCFLCASSGHVEKPGMVPPPPGEESQTVILPPGWQSYLSPQGRRYYVNTTTNETTWERPSSSPGIPASPGSHRSSLPPTVNGYHASGTPAHPPETAHMSVRKSTGDSQNLGSSSPSKKQKQGKHHHNKLCDVPSPRHDAGTAAAETNRRSWSGGLFGFRPRGRDIPFFTLF

SEQ ID NO: 862735 - protein, 1459 aa, Homo sapiens
ASLHGANMAHSCRWRFPARPGTTGGGGGGGRRGLGGAPRQRVPALLLPPGPPVGGGGPGAPPSPPAVAAAAAAAGSSGAGVPGGAAAASAASSSSASSSSSSSSSASSGPALLRVGPGFDAALQVSAAIGTNLRRFRAVFGESGGGGGSGEDEQFLGFGSDEEVRVRSPTRSPSVKTSPRKPRGRPRSGSDRNSAILSDPSVFSPLNKSETKSGDKIKKKDSKSIEKKRGRPPTFPGVKIKITHGKDISELPKGNKEDSLKKIKRTPSATFQQATKIKKLRAGKLSPLKSKFKTGKLQIGRKGVQIVRRRGRPPSTERIKTPSGLLINSELEKPQKVRKDKEGTPPLTKEDKTVVRQSPRRIKPVRIIPSSKRTDATIAKQLLQRAKKGAQKKIEKEAAQLQGRKVKTQVKNIRQFIMPVVSAISSRIIKTPRRFIEDEDYDPPIKIARLESTPNSRFSAPSCGSSEKSSAASQHSSQMSSDSSRSSSPSVDTSTDSQASEEIQVLPEERSDTPEVHPPLPISQSPENESNDRRSRRYSVSERSFGSRTTKKLSTLQSAPQQQTSSSPPPPLLTPPPPLQPASSISDHTPWLMPPTIPLASPFLPASTAPMQGKRKSILREPTFRWTSLKHSRSEPQYFSSAKYAKEGLIRKPIFDNFRPPPLTPEDVGFASGFSASGTAASARLFSPLHSGTRFDMHKRSPLLRAPRFTPSEAHSRIFESVTLPSNRTSAGTSSSGVSNRKRKRKVFSPIRSEPRSPSHSMRTRSGRLSSSELSPLTPPSSVSSSLSISVSPLATSALNPTFTFPSHSLTQSGESAEKNQRPRKQTSAPAEPFSSSSPTPLFPWFTPGSQTERGRNKDKAPEELSKDRDADKSVEKDKSRERDREREKENKRESRKEKRKKGSEIQSSSALYPVGRVSKEKVVGEDVATSSSAKKATGRKKSSSHDSGTDITSVTLGDTTAVKTKILIKKGRGNLEKTNLDLGPTAPSLEKEKTLCLSTPSSSTVKHSTSSIGSMLAQADKLPMTDKRVASLLKKAKAQLCKIEKSKSLKQTDQPKAQGQESDSSETSVRGPRIKHVCRRAAVALGRKRAVFPDDMPTLSALPWEEREKILSSMGNDDKSSIAGSEDAEPLAPPIKPIKPVTRNKAPQEPPVKKGRRSRRCGQCPGCQVPEDCGVCTNCLDKPKFGGRNIKKQCCKMRKCQNLQWMPSKAYLQKQAKAVKKKEKKSKTSEKKDSKESSVVKNVVDSSQKPTPSAREDPAPKKSSSEPPPRKPVEEKSEEGNVSAPGPESKQATTPASRKSSKQVSQPAVVIPPQPPTTGPPRKEVPKTTPSEPKKKQPPPPESGPEQSKQKKVAPRPSIPVKQKPKEKEKPPPVNKQENAGTLNILSTLSNGNSSKQKIPADGVHRIRVDFKFVYCQVCCEPFHKFCLEENERPLEDQVVACLDSGPGAETFPSSLFS

SEQ ID NO: 862736 - protein, 1581 aa, Homo sapiens
ASLHGANMAHSCRWRFPARPGTTGGGGGGGRRGLGGAPRQRVPALLLPPGPPVGGGGPGAPPSPPAVAAAAAAAGSSGAGVPGGAAAASAASSSSASSSSSSSSSASSGPALLRVGPGFDAALQVSAAIGTNLRRFRAVFGESGGGGGSGEDEQFLGFGSDEEVRVRSPTRSPSVKTSPRKPRGRPRSGSDRNSAILSDPSVFSPLNKSETKSGDKIKKKDSKSIEKKRGRPPTFPGVKIKITHGKDISELPKGNKEDSLKKIKRTPSATFQQATKIKKLRAGKLSPLKSKFKTGKLQIGRKGVQIVRRRGRPPSTERIKTPSGLLINSELEKPQKVRKDKEGTPPLTKEDKTVVRQSPRRIKPVRIIPSSKRTDATIAKQLLQRAKKGAQKKIEKEAAQLQGRKVKTQVKNIRQFIMPVVSAISSRIIKTPRRFIEDEDYDPPIKIARLESTPNSRFSAPSCGSSEKSSAASQHSSQMSSDSSRSSSPSVDTSTDSQASEEIQVLPEERSDTPEVHPPLPISQSPENESNDRRSRRYSVSERSFGSRTTKKLSTLQSAPQQQTSSSPPPPLLTPPPPLQPASSISDHTPWLMPPTIPLASPFLPASTAPMQGKRKSILREPTFRWTSLKHSRSEPQYFSSAKYAKEGLIRKPIFDNFRPPPLTPEDVGFASGFSASGTAASARLFSPLHSGTRFDMHKRSPLLRAPRFTPSEAHSRIFESVTLPSNRTSAGTSSSGVSNRKRKRKVFSPIRSEPRSPSHSMRTRSGRLSSSELSPLTPPSSVSSSLSISVSPLATSALNPTFTFPSHSLTQSGESAEKNQRPRKQTSAPAEPFSSSSPTPLFPWFTPGSQTERGRNKDKAPEELSKDRDADKSVEKDKSRERDREREKENKRESRKEKRKKGSEIQSSSALYPVGRVSKEKVVGEDVATSSSAKKATGRKKSSSHDSGTDITSVTLGDTTAVKTKILIKKGRGNLEKTNLDLGPTAPSLEKEKTLCLSTPSSSTVKHSTSSIGSMLAQADKLPMTDKRVASLLKKAKAQLCKIEKSKSLKQTDQPKAQGQESDSSETSVRGPRIKHVCRRAAVALGRKRAVFPDDMPTLSALPWEEREKILSSMGNDDKSSIAGSEDAEPLAPPIKPIKPVTRNKAPQEPPVKKGRRSRRCGQCPGCQVPEDCGVCTNCLDKPKFGGRNIKKQCCKMRKCQNLQWMPSKAYLQKQAKAVKKKEKKSKTSEKKDSKESSVVKNVVDSSQKPTPSAREDPAPKKSSSEPPPRKPVEEKSEEGNVSAPGPESKQATTPASRKSSKQVSQPAVVIPPQPPTTGPPRKEVPKTTPSEPKKKQPPPPESGPEQSKQKKVAPRPSIPVKQKPKEKEKPPPVNKQENAGTLNILSTLSNGNSSKQKIPADGVHRIRVDFKEDCEAENVWEMGGLGILTSVPITPRVVCFLCASSGHVEKPGMVPPPPGEESQTVILPPGWQSYLSPQGRRYYVNTTTNETTWERPSSSPGIPASPGSHRSSLPPTVNGYHASGTPAHPPETAHMSVRKSTGDSQNLGSSSPSKKQKQGVVACLDSGPGAETFPSSLFS

SEQ ID NO: 862737 - protein, 1497 aa, Homo sapiens
ASLHGANMAHSCRWRFPARPGTTGGGGGGGRRGLGGAPRQRVPALLLPPGPPVGGGGPGAPPSPPAVAAAAAAAGSSGAGVPGGAAAASAASSSSASSSSSSSSSASSGPALLRVGPGFDAALQVSAAIGTNLRRFRAVFGESGGGGGSGEDEQFLGFGSDEEVRVRSPTRSPSVKTSPRKPRGRPRSGSDRNSAILSDPSVFSPLNKSETKSGDKIKKKDSKSIEKKRGRPPTFPGVKIKITHGKDISELPKGNKEDSLKKIKRTPSATFQQATKIKKLRAGKLSPLKSKFKTGKLQIGRKGVQIVRRRGRPPSTERIKTPSGLLINSELEKPQKVRKDKEGTPPLTKEDKTVVRQSPRRIKPVRIIPSSKRTDATIAKQLLQRAKKGAQKKIEKEAAQLQGRKVKTQVKNIRQFIMPVVSAISSRIIKTPRRFIEDEDYDPPIKIARLESTPNSRFSAPSCGSSEKSSAASQHSSQMSSDSSRSSSPSVDTSTDSQASEEIQVLPEERSDTPEVHPPLPISQSPENESNDRRSRRYSVSERSFGSRTTKKLSTLQSAPQQQTSSSPPPPLLTPPPPLQPASSISDHTPWLMPPTIPLASPFLPASTAPMQGKRKSILREPTFRWTSLKHSRSEPQYFSSAKYAKEGLIRKPIFDNFRPPPLTPEDVGFASGFSASGTAASARLFSPLHSGTRFDMHKRSPLLRAPRFTPSEAHSRIFESVTLPSNRTSAGTSSSGVSNRKRKRKVFSPIRSEPRSPSHSMRTRSGRLSSSELSPLTPPSSVSSSLSISVSPLATSALNPTFTFPSHSLTQSGESAEKNQRPRKQTSAPAEPFSSSSPTPLFPWFTPGSQTERGRNKDKAPEELSKDRDADKSVEKDKSRERDREREKENKRESRKEKRKKGSEIQSSSALYPVGRVSKEKVVGEDVATSSSAKKATGRKKSSSHDSGTDITSVTLGDTTAVKTKILIKKGRGNLEKTNLDLGPTAPSLEKEKTLCLSTPSSSTVKHSTSSIGSMLAQADKLPMTDKRVASLLKKAKAQLCKIEKSKSLKQTDQPKAQGQESDSSETSVRGPRIKHVCRRAAVALGRKRAVFPDDMPTLSALPWEEREKILSSMGNDDKSSIAGSEDAEPLAPPIKPIKPVTRNKAPQEPPVKKGRRSRRCGQCPGCQVPEDCGVCTNCLDKPKFGGRNIKKQCCKMRKCQNLQWMPSKAYLQKQAKAVKKKEKKSKTSEKKDSKESSVVKNVVDSSQKPTPSAREDPAPKKSSSEPPPRKPVEEKSEEGNVSAPGPESKQATTPASRKSSKQVSQPAVVIPPQPPTTGPPRKEVPKTTPSEPKKKQPPPPESGPEQSKQKKVAPRPSIPVKQKPKEKEKPPPVNKQENAGTLNILSTLSNGNSSKQKIPADGVHRIRVDFKEDCEAENVWEMGGLGILTSVPITPRVVCFLCASSGHVEFVYCQVCCEPFHKFCLEENERPLEDQVVACLDSGPGAETFPSSLFS

SEQ ID NO: 862738 - protein, 1514 aa, Homo sapiens
ASLHGANMAHSCRWRFPARPGTTGGGGGGGRRGLGGAPRQRVPALLLPPGPPVGGGGPGAPPSPPAVAAAAAAAGSSGAGVPGGAAAASAASSSSASSSSSSSSSASSGPALLRVGPGFDAALQVSAAIGTNLRRFRAVFGESGGGGGSGEDEQFLGFGSDEEVRVRSPTRSPSVKTSPRKPRGRPRSGSDRNSAILSDPSVFSPLNKSETKSGDKIKKKDSKSIEKKRGRPPTFPGVKIKITHGKDISELPKGNKEDSLKKIKRTPSATFQQATKIKKLRAGKLSPLKSKFKTGKLQIGRKGVQIVRRRGRPPSTERIKTPSGLLINSELEKPQKVRKDKEGTPPLTKEDKTVVRQSPRRIKPVRIIPSSKRTDATIAKQLLQRAKKGAQKKIEKEAAQLQGRKVKTQVKNIRQFIMPVVSAISSRIIKTPRRFIEDEDYDPPIKIARLESTPNSRFSAPSCGSSEKSSAASQHSSQMSSDSSRSSSPSVDTSTDSQASEEIQVLPEERSDTPEVHPPLPISQSPENESNDRRSRRYSVSERSFGSRTTKKLSTLQSAPQQQTSSSPPPPLLTPPPPLQPASSISDHTPWLMPPTIPLASPFLPASTAPMQGKRKSILREPTFRWTSLKHSRSEPQYFSSAKYAKEGLIRKPIFDNFRPPPLTPEDVGFASGFSASGTAASARLFSPLHSGTRFDMHKRSPLLRAPRFTPSEAHSRIFESVTLPSNRTSAGTSSSGVSNRKRKRKVFSPIRSEPRSPSHSMRTRSGRLSSSELSPLTPPSSVSSSLSISVSPLATSALNPTFTFPSHSLTQSGESAEKNQRPRKQTSAPAEPFSSSSPTPLFPWFTPGSQTERGRNKDKAPEELSKDRDADKSVEKDKSRERDREREKENKRESRKEKRKKGSEIQSSSALYPVGRVSKEKVVGEDVATSSSAKKATGRKKSSSHDSGTDITSVTLGDTTAVKTKILIKKGRGNLEKTNLDLGPTAPSLEKEKTLCLSTPSSSTVKHSTSSIGSMLAQADKLPMTDKRVASLLKKAKAQLCKIEKSKSLKQTDQPKAQGQESDSSETSVRGPRIKHVCRRAAVALGRKRAVFPDDMPTLSALPWEEREKILSSMGNDDKSSIAGSEDAEPLAPPIKPIKPVTRNKAPQEPPVKKGRRSRRCGQCPGCQVPEDCGVCTNCLDKPKFGGRNIKKQCCKMRKCQNLQWMPSKAYLQKQAKAVKKKEKKSKTSEKKDSKESSVVKNVVDSSQKPTPSAREDPAPKKSSSEPPPRKPVEEKSEEGNVSAPGPESKQATTPASRKSSKQVSQPAVVIPPQPPTTGPPRKEVPKTTPSEPKKKQPPPPESGPEQSKQKKVAPRPSIPVKQKPKEKEKPPPVNKQENAGTLNILSTLSNGNSSKQKIPADGVHRIRVDFKFVYCQVCCEPFHKFCLEENERPLEDQLENWCCRRCKFCHVCGRQHQATKQLLECNKCRNSYHPECLGPNYPTKPTKKKKVWVVACLDSGPGAETFPSSLFS

SEQ ID NO: 862739 - protein, 1458 aa, Homo sapiens
ASLHGANMAHSCRWRFPARPGTTGGGGGGGRRGLGGAPRQRVPALLLPPGPPVGGGGPGAPPSPPAVAAAAAAAGSSGAGVPGGAAAASAASSSSASSSSSSSSSASSGPALLRVGPGFDAALQVSAAIGTNLRRFRAVFGESGGGGGSGEDEQFLGFGSDEEVRVRSPTRSPSVKTSPRKPRGRPRSGSDRNSAILSDPSVFSPLNKSETKSGDKIKKKDSKSIEKKRGRPPTFPGVKIKITHGKDISELPKGNKEDSLKKIKRTPSATFQQATKIKKLRAGKLSPLKSKFKTGKLQIGRKGVQIVRRRGRPPSTERIKTPSGLLINSELEKPQKVRKDKEGTPPLTKEDKTVVRQSPRRIKPVRIIPSSKRTDATIAKQLLQRAKKGAQKKIEKEAAQLQGRKVKTQVKNIRQFIMPVVSAISSRIIKTPRRFIEDEDYDPPIKIARLESTPNSRFSAPSCGSSEKSSAASQHSSQMSSDSSRSSSPSVDTSTDSQASEEIQVLPEERSDTPEVHPPLPISQSPENESNDRRSRRYSVSERSFGSRTTKKLSTLQSAPQQQTSSSPPPPLLTPPPPLQPASSISDHTPWLMPPTIPLASPFLPASTAPMQGKRKSILREPTFRWTSLKHSRSEPQYFSSAKYAKEGLIRKPIFDNFRPPPLTPEDVGFASGFSASGTAASARLFSPLHSGTRFDMHKRSPLLRAPRFTPSEAHSRIFESVTLPSNRTSAGTSSSGVSNRKRKRKVFSPIRSEPRSPSHSMRTRSGRLSSSELSPLTPPSSVSSSLSISVSPLATSALNPTFTFPSHSLTQSGESAEKNQRPRKQTSAPAEPFSSSSPTPLFPWFTPGSQTERGRNKDKAPEELSKDRDADKSVEKDKSRERDREREKENKRESRKEKRKKGSEIQSSSALYPVGRVSKEKVVGEDVATSSSAKKATGRKKSSSHDSGTDITSVTLGDTTAVKTKILIKKGRGNLEKTNLDLGPTAPSLEKEKTLCLSTPSSSTVKHSTSSIGSMLAQADKLPMTDKRVASLLKKAKAQLCKIEKSKSLKQTDQPKAQGQESDSSETSVRGPRIKHVCRRAAVALGRKRAVFPDDMPTLSALPWEEREKILSSMGNDDKSSIAGSEDAEPLAPPIKPIKPVTRNKAPQEPPVKKGRRSRRCGQCPGCQVPEDCGVCTNCLDKPKFGGRNIKKQCCKMRKCQNLQWMPSKAYLQKQAKAVKKKEKKSKTSEKKDSKESSVVKNVVDSSQKPTPSAREDPAPKKSSSEPPPRKPVEEKSEEGNVSAPGPESKQATTPASRKSSKQVSQPAVVIPPQPPTTGPPRKEVPKTTPSEPKKKQPPPPESGPEQSKQKKVAPRPSIPVKQKPKEKEKPPPVNKQENAGTLNILSTLSNGNSSKQKIPADGVHRIRVDFKEDCEAENVWEMGGLGILTSVPITPRGGGLFGFRPRGRDIPFFTLF

SEQ ID NO: 862740 - protein, 1434 aa, Homo sapiens
ASLHGANMAHSCRWRFPARPGTTGGGGGGGRRGLGGAPRQRVPALLLPPGPPVGGGGPGAPPSPPAVAAAAAAAGSSGAGVPGGAAAASAASSSSASSSSSSSSSASSGPALLRVGPGFDAALQVSAAIGTNLRRFRAVFGESGGGGGSGEDEQFLGFGSDEEVRVRSPTRSPSVKTSPRKPRGRPRSGSDRNSAILSDPSVFSPLNKSETKSGDKIKKKDSKSIEKKRGRPPTFPGVKIKITHGKDISELPKGNKEDSLKKIKRTPSATFQQATKIKKLRAGKLSPLKSKFKTGKLQIGRKGVQIVRRRGRPPSTERIKTPSGLLINSELEKPQKVRKDKEGTPPLTKEDKTVVRQSPRRIKPVRIIPSSKRTDATIAKQLLQRAKKGAQKKIEKEAAQLQGRKVKTQVKNIRQFIMPVVSAISSRIIKTPRRFIEDEDYDPPIKIARLESTPNSRFSAPSCGSSEKSSAASQHSSQMSSDSSRSSSPSVDTSTDSQASEEIQVLPEERSDTPEVHPPLPISQSPENESNDRRSRRYSVSERSFGSRTTKKLSTLQSAPQQQTSSSPPPPLLTPPPPLQPASSISDHTPWLMPPTIPLASPFLPASTAPMQGKRKSILREPTFRWTSLKHSRSEPQYFSSAKYAKEGLIRKPIFDNFRPPPLTPEDVGFASGFSASGTAASARLFSPLHSGTRFDMHKRSPLLRAPRFTPSEAHSRIFESVTLPSNRTSAGTSSSGVSNRKRKRKVFSPIRSEPRSPSHSMRTRSGRLSSSELSPLTPPSSVSSSLSISVSPLATSALNPTFTFPSHSLTQSGESAEKNQRPRKQTSAPAEPFSSSSPTPLFPWFTPGSQTERGRNKDKAPEELSKDRDADKSVEKDKSRERDREREKENKRESRKEKRKKGSEIQSSSALYPVGRVSKEKVVGEDVATSSSAKKATGRKKSSSHDSGTDITSVTLGDTTAVKTKILIKKGRGNLEKTNLDLGPTAPSLEKEKTLCLSTPSSSTVKHSTSSIGSMLAQADKLPMTDKRVASLLKKAKAQLCKIEKSKSLKQTDQPKAQGQESDSSETSVRGPRIKHVCRRAAVALGRKRAVFPDDMPTLSALPWEEREKILSSMGNDDKSSIAGSEDAEPLAPPIKPIKPVTRNKAPQEPPVKKGRRSRRCGQCPGCQVPEDCGVCTNCLDKPKFGGRNIKKQCCKMRKCQNLQWMPSKAYLQKQAKAVKKKEKKSKTSEKKDSKESSVVKNVVDSSQKPTPSAREDPAPKKSSSEPPPRKPVEEKSEEGNVSAPGPESKQATTPASRKSSKQVSQPAVVIPPQPPTTGPPRKEVPKTTPSEPKKKQPPPPESGPEQSKQKKVAPRPSIPVKQKPKEKLVKKKEKKSKTSEKKDSKESSVVKNVVDSSQKPTPSAREDPARSWSGGLFGFRPRGRDIPFFTLF

SEQ ID NO: 862741 - protein, 1438 aa, Homo sapiens
ASLHGANMAHSCRWRFPARPGTTGGGGGGGRRGLGGAPRQRVPALLLPPGPPVGGGGPGAPPSPPAVAAAAAAAGSSGAGVPGGAAAASAASSSSASSSSSSSSSASSGPALLRVGPGFDAALQVSAAIGTNLRRFRAVFGESGGGGGSGEDEQFLGFGSDEEVRVRSPTRSPSVKTSPRKPRGRPRSGSDRNSAILSDPSVFSPLNKSETKSGDKIKKKDSKSIEKKRGRPPTFPGVKIKITHGKDISELPKGNKEDSLKKIKRTPSATFQQATKIKKLRAGKLSPLKSKFKTGKLQIGRKGVQIVRRRGRPPSTERIKTPSGLLINSELEKPQKVRKDKEGTPPLTKEDKTVVRQSPRRIKPVRIIPSSKRTDATIAKQLLQRAKKGAQKKIEKEAAQLQGRKVKTQVKNIRQFIMPVVSAISSRIIKTPRRFIEDEDYDPPIKIARLESTPNSRFSAPSCGSSEKSSAASQHSSQMSSDSSRSSSPSVDTSTDSQASEEIQVLPEERSDTPEVHPPLPISQSPENESNDRRSRRYSVSERSFGSRTTKKLSTLQSAPQQQTSSSPPPPLLTPPPPLQPASSISDHTPWLMPPTIPLASPFLPASTAPMQGKRKSILREPTFRWTSLKHSRSEPQYFSSAKYAKEGLIRKPIFDNFRPPPLTPEDVGFASGFSASGTAASARLFSPLHSGTRFDMHKRSPLLRAPRFTPSEAHSRIFESVTLPSNRTSAGTSSSGVSNRKRKRKVFSPIRSEPRSPSHSMRTRSGRLSSSELSPLTPPSSVSSSLSISVSPLATSALNPTFTFPSHSLTQSGESAEKNQRPRKQTSAPAEPFSSSSPTPLFPWFTPGSQTERGRNKDKAPEELSKDRDADKSVEKDKSRERDREREKENKRESRKEKRKKGSEIQSSSALYPVGRVSKEKVVGEDVATSSSAKKATGRKKSSSHDSGTDITSVTLGDTTAVKTKILIKKGRGNLEKTNLDLGPTAPSLEKEKTLCLSTPSSSTVKHSTSSIGSMLAQADKLPMTDKRVASLLKKAKAQLCKIEKSKSLKQTDQPKAQGQESDSSETSVRGPRIKHVCRRAAVALGRKRAVFPDDMPTLSALPWEEREKILSSMGNDDKSSIAGSEDAEPLAPPIKPIKPVTRNKAPQEPPVKKGRRSRRCGQCPGCQVPEDCGVCTNCLDKPKFGGRNIKKQCCKMRKCQNLQWMPSKAYLQKQAKAVKKKEKKSKTSEKKDSKESSVVKNVVDSSQKPTPSAREDPAPKKSSSEPPPRKPVEEKSEEGNVSAPGPESKQATTPASRKSSKQVSQPAVVIPPQPPTTGPPRKEVPKTTPSEPKKKQPPPPESGPEQSKQKKVAPRPSIPVKQKPKEKEKPPPVNKQENAGTLNILSTLSNGNSSKQKIPADGVHRIRVDFKNIDKQYVGFATLPNQVHRKSVKKGF

SEQ ID NO: 862742 - protein, 1364 aa, Homo sapiens
ASLHGANMAHSCRWRFPARPGTTGGGGGGGRRGLGGAPRQRVPALLLPPGPPVGGGGPGAPPSPPAVAAAAAAAGSSGAGVPGGAAAASAASSSSASSSSSSSSSASSGPALLRVGPGFDAALQVSAAIGTNLRRFRAVFGESGGGGGSGEDEQFLGFGSDEEVRVRSPTRSPSVKTSPRKPRGRPRSGSDRNSAILSDPSVFSPLNKSETKSGDKIKKKDSKSIEKKRGRPPTFPGVKIKITHGKDISELPKGNKEDSLKKIKRTPSATFQQATKIKKLRAGKLSPLKSKFKTGKLQIGRKGVQIVRRRGRPPSTERIKTPSGLLINSELEKPQKVRKDKEGTPPLTKEDKTVVRQSPRRIKPVRIIPSSKRTDATIAKQLLQRAKKGAQKKIEKEAAQLQGRKVKTQVKNIRQFIMPVVSAISSRIIKTPRRFIEDEDYDPPIKIARLESTPNSRFSAPSCGSSEKSSAASQHSSQMSSDSSRSSSPSVDTSTDSQASEEIQVLPEERSDTPEVHPPLPISQSPENESNDRRSRRYSVSERSFGSRTTKKLSTLQSAPQQQTSSSPPPPLLTPPPPLQPASSISDHTPWLMPPTIPLASPFLPASTAPMQGKRKSILREPTFRWTSLKHSRSEPQYFSSAKYAKEGLIRKPIFDNFRPPPLTPEDVGFASGFSASGTAASARLFSPLHSGTRFDMHKRSPLLRAPRFTPSEAHSRIFESVTLPSNRTSAGTSSSGVSNRKRKRKVFSPIRSEPRSPSHSMRTRSGRLSSSELSPLTPPSSVSSSLSISVSPLATSALNPTFTFPSHSLTQSGESAEKNQRPRKQTSAPAEPFSSSSPTPLFPWFTPGSQTERGRNKDKAPEELSKDRDADKSVEKDKSRERDREREKENKRESRKEKRKKGSEIQSSSALYPVGRVSKEKVVGEDVATSSSAKKATGRKKSSSHDSGTDITSVTLGDTTAVKTKILIKKGRGNLEKTNLDLGPTAPSLEKEKTLCLSTPSSSTVKHSTSSIGSMLAQADKLPMTDKRVASLLKKAKAQLCKIEKSKSLKQTDQPKAQGQESDSSETSVRGPRIKHVCRRAAVALGRKRAVFPDDMPTLSALPWEEREKILSSMGNDDKSSIAGSEDAEPLAPPIKPIKPVTRNKAPQEPPVKKGRRSRRCGQCPGCQVPEDCGVCTNCLDKPKFGGRNIKKQCCKMRKCQNLQWMPSKAYLQKQAKAVKKKEKKSKTSEKKDSKESSVVKNVVDSSQKPTPSAREDPAPKKSSSEPPPRKPVEEKSEEGNVSAPGPESKQATTPASRKSSKQVSQPAVVIPPQPPTTGPPRKEVPKTTPSEPKKKQPPPPESGGGLFGFRPRGRDIPFFTLF

SEQ ID NO: 862743 - protein, 107 aa, Homo sapiens
PHQQERILPQRKAVVSLLHESPSRKRVKKGMSRPLGLNPNRPPLQLPGSQASRSPSQQWSSRLSHLLQDRQEKKFPKPLLVSPRKSSLHHQNQVSEEGKKELLNHKY

SEQ ID NO: 862744 - protein, 105 aa, Homo sapiens
FVYCQVCCEPFHKFCLEENERPLEDQLENWCCRRCKFCHVCGRQHQATKVQNLVIELQLGLCISGFCIPGLNQPWIECIWEKMSSCLCTLCEQTFSCHYFLNNTV

SEQ ID NO: 862745 - protein, 2317 aa, Homo sapiens
ASLHGANMAHSCRWRFPARPGTTGGGGGGGRRGLGGAPRQRVPALLLPPGPPVGGGGPGAPPSPPAVAAAAAAAGSSGAGVPGGAAAASAASSSSASSSSSSSSSASSGPALLRVGPGFDAALQVSAAIGTNLRRFRAVFGESGGGGGSGELTTQIPCSWRTKGHIHDKKTEPFRLLAWSWCLNDEQFLGFGSDEEVRVRSPTRSPSVKTSPRKPRGRPRSGSDRNSAILSDPSVFSPLNKSETKSGDKIKKKDSKSIEKKRGRPPTFPGVKIKITHGKDISELPKGNKEDSLKKIKRTPSATFQQATKIKKLRAGKLSPLKSKFKTGKLQIGRKGVQIVRRRGRPPSTERIKTPSGLLINSELEKPQKVRKDKEGTPPLTKEDKTVVRQSPRRIKPVRIIPSSKRTDATIAKQLLQRAKKGAQKKIEKEAAQLQGRKVKTQVKNIRQFIMPVVSAISSRIIKTPRRFIEDEDYDPPIKIARLESTPNSRFSAPSCGSSEKSSAASQHSSQMSSDSSRSSSPSVDTSTDSQASEEIQVLPEERSDTPEVHPPLPISQSPENESNDRRSRRYSVSERSFGSRTTKKLSTLQSAPQQQTSSSPPPPLLTPPPPLQPASSISDHTPWLMPPTIPLGLCSNNPLTSPFLPASTAPMQGKRKSILREPTFRWTSLKHSRSEPQYFSSAKYAKEGLIRKPIFDNFRPPPLTPEDVGFASGFSASGTAASARLFSPLHSGTRFDMHKRSPLLRAPRFTPSEAHSRIFESVTLPSNRTSAGTSSSGVSNRKRKRKVFSPIRSEPRSPSHSMRTRSGRLSSSELSPLTPPSSVSSSLSISVSPLATSALNPTFTFPSHSLTQSGESAEKNQRPRKQTSAPAEPFSSSSPTPLFPWFTPGSQTERGRNKDKAPEELSKDRDADKSVEKDKSRERDREREKENKRESRKEKRKKGSEIQSSSALYPVGRVSKEKVVGEDVATSSSAKKATGRKKSSSHDSGTDITSVTLGDTTAVKTKILIKKGRGNLEKTNLDLGPTAPSLEKEKTLCLSTPSSSTVKHSTSSIGSMLAQADKLPMTDKRVASLLKKAKAQLCKIEKSKSLKQTDQPKAQGQESDSSETSVRGPRIKHVCRRAAVALGRKRAVFPDDMPTLSALPWEEREKILSSMGNDDKSSIAGSEDAEPLAPPIKPIKPVTRNKAPQEPPVKKGRRSRRCGQCPGCQVPEDCGVCTNCLDKPKFGGRNIKKQCCKMRKCQNLQWMPSKAYLQKQAKAVKKKEKKSKTSEKKDSKESSVVKNVVDSSQKPTPSAREDPAPKKSSSEPPPRKPVEEKSEEGNVSAPGPESKQATTPASRKSSKQVSQPAVVIPPQPPTTGPPRKEVPKTTPSEPKKKQPPPPESGPEQSKQKKVAPRPSIPVKQKPKEKEKPPPVNKQENAGTLNILSTLSNGNSSKQKIPADGVHRIRVDFKTYSNEVHCVEEILKEMTHSWPPPLTAIHTPSTAEPSKFPFPTKDSQHVSSVTQNQKQYDTSSKTHSNSQQGTSSMLEDDLQLSDSEDSDSEQTPEKPPSSSAPPSAPQSLPEPVASAHSSSAESESTSDSDSSSDSESESSSSDSEENEPLETPAPEPEPPTTNKWQLDNWLTKVSSQLRHQRAPGAQSPHGGTQRVRAAATVPRVRSILNPKILPLKAPAKPPRPPEAPHPGKRSCQKSPAQQEPPQRQTVGTKQPKKPVKASARAGSRTSLQGEREPGLLPYGSRDQTSKDKPKVKTKGRPRAAASNEPKPAVPPSSEKKKHKSSLPAPSKALSGPEPAKDNVEDRTPEHFALVPLTESQGPPHSGSSSRTSGCRQAVVVQEDSRKDRLPLPLRDTKLLSPLRDTPPPQSLMVKITLDLLSRIPQPPGKGSRQRKAEDKQPPAGKKHSSEKRSSDSSSKLAKKRKGEAERDCDNKKIRLEKEIKSQSSSSSSSHKESSKTKPSRPSSQSSKKEMLPPPPVSSSSQKPAKPALKRSRREADTCGQDPPKSASSTKSNHKDSSIPKQRRVEGKGSRSSSEHKGSSGDTANPFPVPSLPNGNSKPGKPQVKFDKQQADLHMREEKKMKQKAELMTDRVGKAFKYLEAVLSFIECGIATESESQSSKSAYSVYSETVDLIKFIMSLKSFSDATAPTQEKIFAVLCMRCQSILNMAMFRCKKDIAIKYSRTLNKHFESSSKVAQAPSPCIARSTGTPSPLSPMPSPASSVGSQSSAGSVGSSGVAATISTPVTIQNMTSSYVTITSHVLTAFDLWEQAEALTRKNKEFFARLSTNVCTLALNSSLVDLVHYTRQGFQQLQELTKTP

SEQ ID NO: 862746 - protein, 164 aa, Homo sapiens
MAHSCRWRFPARPGTTGGGGGGGRRGLGGAPRQRVPALLLPPGPPVGGGGPGAPPSPPAVAAAAAAAGSSGAGVPGGAAAASAASSSSASSSSSSSSSASSGPALLRVGPGFDAALQVSAAIGTNLRRFRAVFGESGGGGGSGEVPQLKRDEETLETVLRRLKR

SEQ ID NO: 862747 - protein, 3976 aa, Homo sapiens; identical to SEQ ID NO: 862722

SEQ ID NO: 862748 - protein, 3976 aa, Homo sapiens; identical to SEQ ID NO: 862722

SEQ ID NO: 862749 - protein, 3976 aa, Homo sapiens; identical to SEQ ID NO: 862722

SEQ ID NO: 862750 - protein, 3976 aa, Homo sapiens; identical to SEQ ID NO: 862722

SEQ ID NO: 862751 - protein, 3998 aa, Homo sapiens
ASLHGANMAHSCRWRFPARPGTTGGGGGGGRRGLGGAPRQRVPALLLPPGPPVGGGGPGAPPSPPAVAAAAAAAGSSGAGVPGGAAAASAASSSSASSSSSSSSSASSGPALLRVGPGFDAALQVSAAIGTNLRRFRAVFGESGGGGGSGEDEQFLGFGSDEEVRVRSPTRSPSVKTSPRKPRGRPRSGSDRNSAILSDPSVFSPLNKSETKSGDKIKKKDSKSIEKKRGRPPTFPGVKIKITHGKDISELPKGNKEDSLKKIKRTPSATFQQATKIKKLRAGKLSPLKSKFKTGKLQIGRKGVQIVRRRGRPPSTERIKTPSGLLINSELEKPQKVRKDKEGTPPLTKEDKTVVRQSPRRIKPVRIIPSSKRTDATIAKQLLQRAKKGAQKKIEKEAAQLQGRKVKTQVKNIRQFIMPVVSAISSRIIKTPRRFIEDEDYDPPIKIARLESTPNSRFSAPSCGSSEKSSAASQHSSQMSSDSSRSRIVDSVPPSQHSSQMSSDSSRSSSPSVDTSTDSQASEEIQVLPEERSDTPEVHPPLPISQSPENESNDRRSRRYSVSERSFGSRTTKKLSTLQSAPQQQTSSSPPPPLLTPPPPLQPASSISDHTPWLMPPTIPLASPFLPASTAPMQGKRKSILREPTFRWTSLKHSRSEPQYFSSAKYAKEGLIRKPIFDNFRPPPLTPEDVGFASGFSASGTAASARLFSPLHSGTRFDMHKRSPLLRAPRFTPSEAHSRIFESVTLPSNRTSAGTSSSGVSNRKRKRKVFSPIRSEPRSPSHSMRTRSGRLSSSELSPLTPPSSVSSSLSISVSPLATSALNPTFTFPSHSLTQSGESAEKNQRPRKQTSAPAEPFSSSSPTPLFPWFTPGSQTERGRNKDKAPEELSKDRDADKSVEKDKSRERDREREKENKRESRKEKRKKGSEIQSSSALYPVGRVSKEKVVGEDVATSSSAKKATGRKKSSSHDSGTDITSVTLGDTTAVKTKILIKKGRGNLEKTNLDLGPTAPSLEKEKTLCLSTPSSSTVKHSTSSIGSMLAQADKLPMTDKRVASLLKKAKAQLCKIEKSKSLKQTDQPKAQGQESDSSETSVRGPRIKHVCRRAAVALGRKRAVFPDDMPTLSALPWEEREKILSSMGNDDKSSIAGSEDAEPLAPPIKPIKPVTRNKAPQEPPVKKGRRSRRCGQCPGCQVPEDCGVCTNCLDKPKFGGRNIKKQCCKMRKCQNLQWMPSKAYLQKQAKAVKKKEKKSKTSEKKDSKESSVVKNVVDSSQKPTPSAREDPAPKKSSSEPPPRKPVEEKSEEGNVSAPGPESKQATTPASRKSSKQVSQPAVVIPPQPPTTGPPRKEVPKTTPSEPKKKQPPPPESGPEQSKQKKVAPRPSIPVKQKPKEKEKPPPVNKQENAGTLNILSTLSNGNSSKQKIPADGVHRIRVDFKEDCEAENVWEMGGLGILTSVPITPRVVCFLCASSGHVEFVYCQVCCEPFHKFCLEENERPLEDQLENWCCRRCKFCHVCGRQHQATKQLLECNKCRNSYHPECLGPNYPTKPTKKKKVWICTKCVRCKSCGSTTPGKGWDAQWSHDFSLCHDCAKLFAKGNFCPLCDKCYDDDDYESKMMQCGKCDRWVHSKCENLSDEMYEILSNLPESVAYTCVNCTERHPAEWRLALEKELQISLKQVLTALLNSRTTSHLLRYRQAAKPPDLNPETEESIPSRSSPEGPDPPVLTEVSKQDDQQPLDLEGVKRKMDQGNYTSVLEFSDDIVKIIQAAINSDGGQPEIKKANSMVKSFFIRQMERVFPWFSVKKSRFWEPNKVSSNSGMLPNAVLPPSLDHNYAQWQEREENSHTEQPPLMKKIIPAPKPKGPGEPDSPTPLHPPTPPILSTDRSREDSPELNPPPGIEDNRQCALCLTYGDDSANDAGRLLYIGQNEWTHVNCALWSAEVFEDDDGSLKNVHMAVIRGKQLRCEFCQKPGATVGCCLTSCTSNYHFMCSRAKNCVFLDDKKVYCQRHRDLIKGEVVPENGFEVFRRVFVDFEGISLRRKFLNGLEPENIHMMIGSMTIDCLGILNDLSDCEDKLFPIGYQCSRVYWSTTDARKRCVYTCKIVECRPPVVEPDINSTVEHDENRTIAHSPTSFTESSSKESQNTAEIISPPSPDRPPHSQTSGSCYYHVISKVPRIRTPSYSPTQRSPGCRPLPSAGSPTPTTHEIVTVGDPLLSSGLRSIGSRRHSTSSLSPQRSKLRIMSPMRTGNTYSRNNVSSVSTTGTATDLESSAKVVDHVLGPLNSSTSLGQNTSTSSNLQRTVVTVGNKNSHLDGSSSSEMKQSSASDLVSKSSSLKGEKTKVLSSKSSEGSAHNVAYPGIPKLAPQVHNTTSRELNVSKIGSFAEPSSVSFSSKEALSFPHLHLRGQRNDRDQHTDSTQSANSSPDEDTEVKTLKLSGMSNRSSIINEHMGSSSRDRRQKGKKSCKETFKEKHSSKSFLEPGQVTTGEEGNLKPEFMDEVLTPEYMGQRPCNNVSSDKIGDKGLSMPGVPKAPPMQVEGSAKELQAPRKRTVKVTLTPLKMENESQSKNALKESSPASPLQIESTSPTEPISASENPGDGPVAQPSPNNTSCQDSQSNNYQNLPVQDRNLMLPDGPKPQEDGSFKRRYPRRSARARSNMFFGLTPLYGVRSYGEEDIPFYSSSTGKKRGKRSAEGQVDGADDLSTSDEDDLYYYNFTRTVISSGGEERLASHNLFREEEQCDLPKISQLDGVDDGTESDTSVTATTRKSSQIPKRNGKENGTENLKIDRPEDAGEKEHVTKSSVGHKNEPKMDNCHSVSRVKTQGQDSLEAQLSSLESSRRVHTSTPSDKNLLDTYNTELLKSDSDNNNSDDCGNILPSDIMDFVLKNTPSMQALGESPESSSSELLNLGEGLGLDSNREKDMGLFEVFSQQLPTTEPVDSSVSSSISAEEQFELPLELPSDLSVLTTRSPTVPSQNPSRLAVISDSGEKRVTITEKSVASSESDPALLSPGVDPTPEGHMTPDHFIQGHMDADHISSPPCGSVEQGHGNNQDLTRNSSTPGLQVPVSPTVPIQNQKYVPNSTDSPGPSQISNAAVQTTPPHLKPATEKLIVVNQNMQPLYVLQTLPNGVTQKIQLTSSVSSTPSVMETNTSVLGPMGGGLTLTTGLNPSLPTSQSLFPSASKGLLPMSHHQHLHSFPAATQSSFPPNISNPPSGLLIGVQPPPDPQLLVSESSQRTDLSTTVATPSSGLKKRPISRLQTRKNKKLAPSSTPSNIAPSDVVSNMTLINFTPSQLPNHPSLLDLGSLNTSSHRTVPNIIKRSKSSIMYFEPAPLLPQSVGGTAATAAGTSTISQDTSHLTSGSVSGLASSSSVLNVVSMQTTTTPTSSASVPGHVTLTNPRLLGTPDIGSISNLLIKASQQSLGIQDQPVALPPSSGMFPQLGTSQTPSTAAITAASSICVLPSTQTTGITAASPSGEADEHYQLQHVNQLLASKTGIHSSQRDLDSASGPQVSNFTQTVDAPNSMGLEQNKALSSAVQASPTSPGGSPSSPSSGQRSASPSVPGPTKPKPKTKRFQLPLDKGNGKKHKVSHLRTSSSEAHIPDQETTSLTSGTGTPGAEAEQQDTASVEQSSQKECGQPAGQVAVLPEVQVTQNPANEQESAEPKTVEEEESNFSSPLMLWLQQEQKRKESITEKKPKKGLVFEISSDDGFQICAESIEDAWKSLTDKVQEARSNARLKQLSFAGVNGLRMLGILHDAVVFLIEQLSGAKHCRNYKFRFHKPEEANEPPLNPHGSARAEVHLRKSAFDMFNFLASKHRQPPEYNPNDEEEEEVQLKSARRATSMDLPMPMRFRHLKKTSKEAVGVYRSPIHGRGLFCKRNIDAGEMVIEYAGNVIRSIQTDKREKYYDSKGIGCYMFRIDDSEVVDATMHGNAARFINHSCEPNCYSRVINIDGQKHIVIFAMRKIYRGEELTYDYKFPIEDASNKLPCNCGAKKCRKFLN

SEQ ID NO: 862752 - protein, 3938 aa, Homo sapiens
ASLHGANMAHSCRWRFPARPGTTGGGGGGGRRGLGGAPRQRVPALLLPPGPPVGGGGPGAPPSPPAVAAAAAAAGSSGAGVPGGAAAASAASSSSASSSSSSSSSASSGPALLRVGPGFDAALQVSAAIGTNLRRFRAVFGESGGGGGSGEDEQFLGFGSDEEVRVRSPTRSPSVKTSPRKPRGRPRSGSDRNSAILSDPSVFSPLNKSETKSGDKIKKKDSKSIEKKRGRPPTFPGVKIKITHGKDISELPKGNKEDSLKKIKRTPSATFQQATKIKKLRAGKLSPLKSKFKTGKLQIGRKGVQIVRRRGRPPSTERIKTPSGLLINSELEKPQKVRKDKEGTPPLTKEDKTVVRQSPRRIKPVRIIPSSKRTDATIAKQLLQRAKKGAQKKIEKEAAQLQGRKVKTQVKNIRQFIMPVVSAISSRIIKTPRRFIEDEDYDPPIKIARLESTPNSRFSAPSCGSSEKSSAASQHSSQMSSDSSRSSSPSVDTSTDSQASEEIQVLPEERSDTPEVHPPLPISQSPENESNDRRSRRYSVSERSFGSRTTKKLSTLQSAPQQQTSSSPPPPLLTPPPPLQPASSISDHTPWLMPPTIPLASPFLPASTAPMQGKRKSILREPTFRWTSLKHSRSEPQYFSSAKYAKEGLIRKPIFDNFRPPPLTPEDVGFASGFSASGTAASARLFSPLHSGTRFDMHKRSPLLRAPRFTPSEAHSRIFESVTLPSNRTSAGTSSSGVSNRKRKRKVFSPIRSEPRSPSHSMRTRSGRLSSSELSPLTPPSSVSSSLSISVSPLATSALNPTFTFPSHSLTQSGESAEKNQRPRKQTSAPAEPFSSSSPTPLFPWFTPGSQTERGRNKDKAPEELSKDRDADKSVEKDKSRERDREREKENKRESRKEKRKKGSEIQSSSALYPVGRVSKEKVVGEDVATSSSAKKATGRKKSSSHDSGTDITSVTLGDTTAVKTKILIKKGRGNLEKTNLDLGPTAPSLEKEKTLCLSTPSSSTVKHSTSSIGSMLAQADKLPMTDKRVASLLKKAKAQLCKIEKSKSLKQTDQPKAQGQESDSSETSVRGPRIKHVCRRAAVALGRKRAVFPDDMPTLSALPWEEREKILSSMGNDDKSSIAGSEDAEPLAPPIKPIKPVTRNKAPQEPPVKKGRRSRRCGQCPGCQVPEDCGVCTNCLDKPKFGGRNIKKQCCKMRKCQNLQWMPSKAYLQKQAKAVKKKEKKSKTSEKKDSKESSVVKNVVDSSQKPTPSAREDPAPKKSSSEPPPRKPVEEKSEEGNVSAPGPESKQATTPASRKSSKQVSQPAVVIPPQPPTTGPPRKEVPKTTPSEPKKKQPPPPESGPEQSKQKKVAPRPSIPVKQKPKEKEKPPPVNKQENAGTLNILSTLSNGNSSKQKIPADGVHRIRVDFKFVYCQVCCEPFHKFCLEENERPLEDQLENWCCRRCKFCHVCGRQHQATKQLLECNKCRNSYHPECLGPNYPTKPTKKKKVWICTKCVRCKSCGSTTPGKGWDAQWSHDFSLCHDCAKLFAKGNFCPLCDKCYDDDDYESKMMQCGKCDRWVHSKCENLSDEMYEILSNLPESVAYTCVNCTERHPAEWRLALEKELQISLKQVLTALLNSRTTSHLLRYRQAAKPPDLNPETEESIPSRSSPEGPDPPVLTEVSKQDDQQPLDLEGVKRKMDQGNYTSVLEFSDDIVKIIQAAINSDGGQPEIKKANSMVKSFFIRQMERVFPWFSVKKSRFWEPNKVSSNSGMLPNAVLPPSLDHNYAQWQEREENSHTEQPPLMKKIIPAPKPKGPGEPDSPTPLHPPTPPILSTDRSREDSPELNPPPGIEDNRQCALCLTYGDDSANDAGRLLYIGQNEWTHVNCALWSAEVFEDDDGSLKNVHMAVIRGKQLRCEFCQKPGATVGCCLTSCTSNYHFMCSRAKNCVFLDDKKVYCQRHRDLIKGEVVPENGFEVFRRVFVDFEGISLRRKFLNGLEPENIHMMIGSMTIDCLGILNDLSDCEDKLFPIGYQCSRVYWSTTDARKRCVYTCKIVECRPPVVEPDINSTVEHDENRTIAHSPTSFTESSSKESQNTAEIISPPSPDRPPHSQTSGSCYYHVISKVPRIRTPSYSPTQRSPGCRPLPSAGSPTPTTHEIVTVGDPLLSSGLRSIGSRRHSTSSLSPQRSKLRIMSPMRTGNTYSRNNVSSVSTTGTATDLESSAKVVDHVLGPLNSSTSLGQNTSTSSNLQRTVVTVGNKNSHLDGSSSSEMKQSSASDLVSKSSSLKGEKTKVLSSKSSEGSAHNVAYPGIPKLAPQVHNTTSRELNVSKIGSFAEPSSVSFSSKEALSFPHLHLRGQRNDRDQHTDSTQSANSSPDEDTEVKTLKLSGMSNRSSIINEHMGSSSRDRRQKGKKSCKETFKEKHSSKSFLEPGQVTTGEEGNLKPEFMDEVLTPEYMGQRPCNNVSSDKIGDKGLSMPGVPKAPPMQVEGSAKELQAPRKRTVKVTLTPLKMENESQSKNALKESSPASPLQIESTSPTEPISASENPGDGPVAQPSPNNTSCQDSQSNNYQNLPVQDRNLMLPDGPKPQEDGSFKRRYPRRSARARSNMFFGLTPLYGVRSYGEEDIPFYSSSTGKKRGKRSAEGQVDGADDLSTSDEDDLYYYNFTRTVISSGGEERLASHNLFREEEQCDLPKISQLDGVDDGTESDTSVTATTRKSSQIPKRNGKENGTENLKIDRPEDAGEKEHVTKSSVGHKNEPKMDNCHSVSRVKTQGQDSLEAQLSSLESSRRVHTSTPSDKNLLDTYNTELLKSDSDNNNSDDCGNILPSDIMDFVLKNTPSMQALGESPESSSSELLNLGEGLGLDSNREKDMGLFEVFSQQLPTTEPVDSSVSSSISAEEQFELPLELPSDLSVLTTRSPTVPSQNPSRLAVISDSGEKRVTITEKSVASSESDPALLSPGVDPTPEGHMTPDHFIQGHMDADHISSPPCGSVEQGHGNNQDLTRNSSTPGLQVPVSPTVPIQNQKYVPNSTDSPGPSQISNAAVQTTPPHLKPATEKLIVVNQNMQPLYVLQTLPNGVTQKIQLTSSVSSTPSVMETNTSVLGPMGGGLTLTTGLNPSLPTSQSLFPSASKGLLPMSHHQHLHSFPAATQSSFPPNISNPPSGLLIGVQPPPDPQLLVSESSQRTDLSTTVATPSSGLKKRPISRLQTRKNKKLAPSSTPSNIAPSDVVSNMTLINFTPSQLPNHPSLLDLGSLNTSSHRTVPNIIKRSKSSIMYFEPAPLLPQSVGGTAATAAGTSTISQDTSHLTSGSVSGLASSSSVLNVVSMQTTTTPTSSASVPGHVTLTNPRLLGTPDIGSISNLLIKASQQSLGIQDQPVALPPSSGMFPQLGTSQTPSTAAITAASSICVLPSTQTTGITAASPSGEADEHYQLQHVNQLLASKTGIHSSQRDLDSASGPQVSNFTQTVDAPNSMGLEQNKALSSAVQASPTSPGGSPSSPSSGQRSASPSVPGPTKPKPKTKRFQLPLDKGNGKKHKVSHLRTSSSEAHIPDQETTSLTSGTGTPGAEAEQQDTASVEQSSQKECGQPAGQVAVLPEVQVTQNPANEQESAEPKTVEEEESNFSSPLMLWLQQEQKRKESITEKKPKKGLVFEISSDDGFQICAESIEDAWKSLTDKVQEARSNARLKQLSFAGVNGLRMLGILHDAVVFLIEQLSGAKHCRNYKFRFHKPEEANEPPLNPHGSARAEVHLRKSAFDMFNFLASKHRQPPEYNPNDEEEEEVQLKSARRATSMDLPMPMRFRHLKKTSKEAVGVYRSPIHGRGLFCKRNIDAGEMVIEYAGNVIRSIQTDKREKYYDSKGIGCYMFRIDDSEVVDATMHGNAARFINHSCEPNCYSRVINIDGQKHIVIFAMRKIYRGEELTYDYKFPIEDASNKLPCNCGAKKCRKFLN

SEQ ID NO: 862753 - protein, 3851 aa, Homo sapiens
ASLHGANMAHSCRWRFPARPGTTGGGGGGGRRGLGGAPRQRVPALLLPPGPPVGGGGPGAPPSPPAVAAAAAAAGSSGAGVPGGAAAASAASSSSASSSSSSSSSASSGPALLRVGPGFDAALQVSAAIGTNLRRFRAVFGESGGGGGSGEDEQFLGFGSDEEVRVRSPTRSPSVKTSPRKPRGRPRSGSDRNSAILSDPSVFSPLNKSETKSGDKIKKKDSKSIEKKRGRPPTFPGVKIKITHGKDISELPKGNKEDSLKKIKRTPSATFQQATKIKKLRAGKLSPLKSKFKTGKLQIGRKGVQIVRRRGRPPSTERIKTPSGLLINSELEKPQKVRKDKEGTPPLTKEDKTVVRQSPRRIKPVRIIPSSKRTDATIAKQLLQRAKKGAQKKIEKEAAQLQGRKVKTQVKNIRQFIMPVVSAISSRIIKTPRRFIEDEDYDPPIKIARLESTPNSRFSAPSCGSSEKSSAASQHSSQMSSDSSRSSSPSVDTSTDSQASEEIQVLPEERSDTPEVHPPLPISQSPENESNDRRSRRYSVSERSFGSRTTKKLSTLQSAPQQQTSSSPPPPLLTPPPPLQPASSISDHTPWLMPPTIPLASPFLPASTAPMQGKRKSILREPTFRWTSLKHSRSEPQYFSSAKYAKEGLIRKPIFDNFRPPPLTPEDVGFASGFSASGTAASARLFSPLHSGTRFDMHKRSPLLRAPRFTPSEAHSRIFESVTLPSNRTSAGTSSSGVSNRKRKRKVFSPIRSEPRSPSHSMRTRSGRLSSSELSPLTPPSSVSSSLSISVSPLATSALNPTFTFPSHSLTQSGESAEKNQRPRKQTSAPAEPFSSSSPTPLFPWFTPGSQTERGRNKDKAPEELSKDRDADKSVEKDKSRERDREREKENKRESRKEKRKKGSEIQSSSALYPVGRVSKEKVVGEDVATSSSAKKATGRKKSSSHDSGTDITSVTLGDTTAVKTKILIKKGRGNLEKTNLDLGPTAPSLEKEKTLCLSTPSSSTVKHSTSSIGSMLAQADKLPMTDKRVASLLKKAKAQLCKIEKSKSLKQTDQPKAQGQESDSSETSVRGPRIKHVCRRAAVALGRKRAVFPDDMPTLSALPWEEREKILSSMGNDDKSSIAGSEDAEPLAPPIKPIKPVTRNKAPQEPPVKKGRRSRRCGQCPGCQVPEDCGVCTNCLDKPKFGGRNIKKQCCKMRKCQNLQWMPSKAYLQKQAKAVKKKEKKSKTSEKKDSKESSVVKNVVDSSQKPTPSAREDPAPKKSSSEPPPRKPVEEKSEEGNVSAPGPESKQATTPASRKSSKQVSQPAVVIPPQPPTTGPPRKEVPKTTPSEPKKKQPPPPESGPEQSKQKKVAPRPSIPVKQKPKEKEKPPPVNKQENAGTLNILSTLSNGNSSKQKIPADGVHRIRVDFKEDCEAENVWEMGGLGILTSVPITPRVVCFLCASSGHVEFVYCQVCCEPFHKFCLEENERPLEDQLENWCCRRCKFCHVCGRQHQATKQLLECNKCRNSYHPECLGPNYPTKPTKKKKVWICTKCVRCKSCGSTTPGKGWDAQWSHDFSLCHDCAKLFAKGNFCPLCDKCYDDDDYESKMMQCGKCDRWVHSKCENLSDEMYEILSNLPESVAYTCVNCTERHPAEWRLALEKELQISLKQVLTALLNSRTTSHLLRYRQAAKPPDLNPETEESIPSRSSPEGPDPPVLTEVSKQDDQQPLDLEGVKRKMDQGNYTSVLEFSDDIVKIIQAAINSDGGQPEIKKANSMVKSFFIRQMERVFPWFSVKKSRFWEPNKVSSNSGMLPNAVLPPSLDHNYAQWQEREENSHTEQPPLMKKIIPAPKPKGPGEPDSPTPLHPPTPPILSTDRSREDSPELNPPPGIEDNRQCALCLTYGDDSANDAGRLLYIGQNEWTHVNCALWSAEVFEDDDGSLKNVHMAVIRGKQLRCEFCQKPGATVGCCLTSCTSNYHFMCSRAKNCVFLDDKKVYCQRHRDLIKGEVVPENGFEVFRRVFVDFEGISLRRKFLNGLEPENIHMMIGSMTIDCLGILNDLSDCEDKLFPIGYQCSRVYWSTTDARKRCVYTCKIVECRPPVVEPDINSTVEHDENRTIAHSPTSFTESSSKESQNTAEIISPPSPDRPPHSQTSGSCYYHVISKVPRIRTPSYSPTQRSPGCRPLPSAGSPTPTTHEIVTVGDPLLSSGLRSIGSRRHSTSSLSPQRSKLRIMSPMRTGNTYSRNNVSSVSTTGTATDLESSAKVVDHVLGPLNSSTSLGQNTSTSSNLQRTVVTVGNKNSHLDGSSSSEMKQSSASDLVSKSSSLKGEKTKVLSSKSSEGSAHNVAYPGIPKLAPQVHNTTSRELNVSKIGSFAEPSSVSFSSKEALSFPHLHLRGQRNDRDQHTDSTQSANSSPDEDTEVKTLKLSGMSNRSSIINEHMGSSSRDRRQKGKKSCKETFKEKHSSKSFLEPGQVTTGEEGNLKPEFMDEVLTPEYMGQRPCNNVSSDKIGDKGLSMPGVPKAPPMQVEGSAKELQAPRKRTVKVTLTPLKMENESQSKNALKESSPASPLQIESTSPTEPISASENPGDGPVAQPSPNNTSCQDSQSNNYQNLPVQDRNLMLPDGPKPQEDGSFKRRYPRRSARARSNMFFGLTPLYGVRSYGEEDIPFYSSSTGKKRGKRSAEGQVDGADDLSTSDEDDLYYYNFTRTVISSGGEERLASHNLFREEEQCDLPKISQLDGVDDGTESDTSVTATTRKSSQIPKRNGKENGTENLKIDRPEDAGEKEHVTKSSVGHKNEPKMDNCHSVSRVKTQGQDSLEAQLSSLESSRRVHTSTPSDKNLLDTYNTELLKSDSDNNNSDDCGNILPSDIMDFVLKNTPSMQALGESPESSSSELLNLGEGLGLDSNREKDMGLFEVFSQQLPTTEPVDSSVSSSISAEEQFELPLELPSDLSVLTTRSPTVPSQNPSRLAVISDSGEKRVTITEKSVASSESDPALLSPGVDPTPEGHMTPDHFIQGHMDADHISSPPCGSVEQGHGNNQDLTRNSSTPGLQVPVSPTVPIQNQKYVPNSTDSPGPSQISNAAVQTTPPHLKPATEKLIVVNQNMQPLYVLQTLPNGVTQKIQLTSSVSSTPSVMETNTSVLGPMGGGLTLTTGLNPSLPTSQSLFPSASKGLLPMSHHQHLHSFPAATQSSFPPNISNPPSGLLIGVQPPPDPQLLVSESSQRTDLSTTVATPSSGLKKRPISRLQTRKNKKLAPSSTPSNIAPSDVVSNMTLINFTPSQLPNHPSLLDLGSLNTSSHRTVPNIIKRSKSSIMYFEPAPLLPQSVGGTAATAAGTSTISQDTSHLTSGSVSGLASSSSVLNVVSMQTTTTPTSSASVPGHVTLTNPRLLGTPDIGSISNLLIKASQQSLGIQDQPVALPPSSGMFPQLGTSQTPSTAAITAASSICVLPSTQTTGITAASPSGEADEHYQLQHVNQLLASKTGIHSSQRDLDSASGPQVSNFTQTVDAPNSMGLEQNKALSSAVQASPTSPGGSPSSPSSGQRSASPSVPGPTKPKPKTKRFQLPLDKGNGKKHKVSHLRTSSSEAHIPDQETTSLTSGTGTPGAEAEQQDTASVEQSSQKECGQPAGQVAVLPEVQVTQNPANEQESAEPKTVEEEESNFSSPLMLWLQQEQKRKESITEKKPKKGLVFEISSDDGFQICAESIEDAWKSLTDKVQEARSNARLKQLSFAGVNGLRMLGILHDAVVFLIEQLSGAKHCRNYKFRFHKPEEANEPPLNPHGSARAEVHLRKSAFDMFNFLASKHRQPPEYNPNDEEEEEVQLKSARRATSMDLPMPMRFRHLKKTSKEAVGVYRPPANAVSTM

SEQ ID NO: 862754 - protein, 1343 aa, Homo sapiens
MFFGLTPLYGVRSYGEEDIPFYSSSTGKKRGKRSAEGQVDGADDLSTSDEDDLYYYNFTRTVISSGGEERLASHNLFREEEQCDLPKISQLDGVDDGTESDTSVTATTRKSSQIPKRNGKENGTENLKIDRPEDAGEKEHVTKSSVGHKNEPKMDNCHSVSRVKTQGQDSLEAQLSSLESSRRVHTSTPSDKNLLDTYNTELLKSDSDNNNSDDCGNILPSDIMDFVLKNTPSMQALGESPESSSSELLNLGEGLGLDSNREKDMGLFEVFSQQLPTTEPVDSSVSSSISAEEQFELPLELPSDLSVLTTRSPTVPSQNPSRLAVISDSGEKRVTITEKSVASSESDPALLSPGVDPTPEGHMTPDHFIQGHMDADHISSPPCGSVEQGHGNNQDLTRNSSTPGLQVPVSPTVPIQNQKYVPNSTDSPGPSQISNAAVQTTPPHLKPATEKLIVVNQNMQPLYVLQTLPNGVTQKIQLTSSVSSTPSVMETNTSVLGPMGGGLTLTTGLNPSLPTSQSLFPSASKGLLPMSHHQHLHSFPAATQSSFPPNISNPPSGLLIGVQPPPDPQLLVSESSQRTDLSTTVATPSSGLKKRPISRLQTRKNKKLAPSSTPSNIAPSDVVSNMTLINFTPSQLPNHPSLLDLGSLNTSSHRTVPNIIKRSKSSIMYFEPAPLLPQSVGGTAATAAGTSTISQDTSHLTSGSVSGLASSSSVLNVVSMQTTTTPTSSASVPGHVTLTNPRLLGTPDIGSISNLLIKASQQSLGIQDQPVALPPSSGMFPQLGTSQTPSTAAITAASSICVLPSTQTTGITAASPSGEADEHYQLQHVNQLLASKTGIHSSQRDLDSASGPQVSNFTQTVDAPNSMGLEQNKALSSAVQASPTSPGGSPSSPSSGQRSASPSVPGPTKPKPKTKRFQLPLDKGNGKKHKVSHLRTSSSEAHIPDQETTSLTSGTGTPGAEAEQQDTASVEQSSQKECGQPAGQVAVLPEVQVTQNPANEQESAEPKTVEEEESNFSSPLMLWLQQEQKRKESITEKKPKKGLVFEISSDDGFQICAESIEDAWKSLTDKVQEARSNARLKQLSFAGVNGLRMLGILHDAVVFLIEQLSGAKHCRNYKFRFHKPEEANEPPLNPHGSARAEVHLRKSAFDMFNFLASKHRQPPEYNPNDEEEEEVQLKSARRATSMDLPMPMRFRHLKKTSKEAVGVYRSPIHGRGLFCKRNIDAGEMVIEYAGNVIRSIQTDKREKYYDSKGIGCYMFRIDDSEVVDATMHGNAARFINHSCEPNCYSRVINIDGQKHIVIFAMRKIYRGEELTYDYKFPIEDASNKLPCNCGAKKCRKFLN

SEQ ID NO: 862755 - protein, 1714 aa, Homo sapiens
ASLHGANMAHSCRWRFPARPGTTGGGGGGGRRGLGGAPRQRVPALLLPPGPPVGGGGPGAPPSPPAVAAAAAAAGSSGAGVPGGAAAASAASSSSASSSSSSSSSASSGPALLRVGPGFDAALQVSAAIGTNLRRFRAVFGESGGGGGSGEDEQFLGFGSDEEVRVRSPTRSPSVKTSPRKPRGRPRSGSDRNSAILSDPSVFSPLNKSETKSGDKIKKKDSKSIEKKRGRPPTFPGVKIKITHGKDISELPKGNKEDSLKKIKRTPSATFQQATKIKKLRAGKLSPLKSKFKTGKLQIGRKGVQIVRRRGRPPSTERIKTPSGLLINSELEKPQKVRKDKEGTPPLTKEDKTVVRQSPRRIKPVRIIPSSKRTDATIAKQLLQRAKKGAQKKIEKEAAQLQGRKVKTQVKNIRQFIMPVVSAISSRIIKTPRRFIEDEDYDPPIKIARLESTPNSRFSAPSCGSSEKSSAASQHSSQMSSDSSRSSSPSVDTSTDSQASEEIQVLPEERSDTPEVHPPLPISQSPENESNDRRSRRYSVSERSFGSRTTKKLSTLQSAPQQQTSSSPPPPLLTPPPPLQPASSISDHTPWLMPPTIPLASPFLPASTAPMQGKRKSILREPTFRWTSLKHSRSEPQYFSSAKYAKEGLIRKPIFDNFRPPPLTPEDVGFASGFSASGTAASARLFSPLHSGTRFDMHKRSPLLRAPRFTPSEAHSRIFESVTLPSNRTSAGTSSSGVSNRKRKRKVFSPIRSEPRSPSHSMRTRSGRLSSSELSPLTPPSSVSSSLSISVSPLATSALNPTFTFPSHSLTQSGESAEKNQRPRKQTSAPAEPFSSSSPTPLFPWFTPGSQTERGRNKDKAPEELSKDRDADKSVEKDKSRERDREREKENKRESRKEKRKKGSEIQSSSALYPVGRVSKEKVVGEDVATSSSAKKATGRKKSSSHDSGTDITSVTLGDTTAVKTKILIKKGRGNLEKTNLDLGPTAPSLEKEKTLCLSTPSSSTVKHSTSSIGSMLAQADKLPMTDKRVASLLKKAKAQLCKIEKSKSLKQTDQPKAQGQESDSSETSVRGPRIKHVCRRAAVALGRKRAVFPDDMPTLSALPWEEREKILSSMGNDDKSSIAGSEDAEPLAPPIKPIKPVTRNKAPQEPPVKKGRRSRRCGQCPGCQVPEDCGVCTNCLDKPKFGGRNIKKQCCKMRKCQNLQWMPSKAYLQKQAKAVKKKEKKSKTSEKKDSKESSVVKNVVDSSQKPTPSAREDPAPKKSSSEPPPRKPVEEKSEEGNVSAPGPESKQATTPASRKSSKQVSQPAVVIPPQPPTTGPPRKEVPKTTPSEPKKKQPPPPESGPEQSKQKKVAPRPSIPVKQKPKEKEKPPPVNKQENAGTLNILSTLSNGNSSKQKIPADGVHRIRVDFKEDCEAENVWEMGGLGILTSVPITPRVVCFLCASSGHVEFVYCQVCCEPFHKFCLEENERPLEDQLENWCCRRCKFCHVCGRQHQATKQLLECNKCRNSYHPECLGPNYPTKPTKKKKVWICTKCVRCKSCGSTTPGKGWDAQWSHDFSLCHDCAKLFAKGNFCPLCDKCYDDDDYESKMMQCGKCDRWVHSKCENLSDEMYEILSNLPESVAYTCVNCTERHPAEWRLALEKELQISLKQVLTALLNSRTTSHLLRYRQAAKPPDLNPETEESIPSRSSPEGGGLFGFRPRGRDIPFFTLF

SEQ ID NO: 862756 - protein, 1552 aa, Homo sapiens
ASLHGANMAHSCRWRFPARPGTTGGGGGGGRRGLGGAPRQRVPALLLPPGPPVGGGGPGAPPSPPAVAAAAAAAGSSGAGVPGGAAAASAASSSSASSSSSSSSSASSGPALLRVGPGFDAALQVSAAIGTNLRRFRAVFGESGGGGGSGEDEQFLGFGSDEEVRVRSPTRSPSVKTSPRKPRGRPRSGSDRNSAILSDPSVFSPLNKSETKSGDKIKKKDSKSIEKKRGRPPTFPGVKIKITHGKDISELPKGNKEDSLKKIKRTPSATFQQATKIKKLRAGKLSPLKSKFKTGKLQIGRKGVQIVRRRGRPPSTERIKTPSGLLINSELEKPQKVRKDKEGTPPLTKEDKTVVRQSPRRIKPVRIIPSSKRTDATIAKQLLQRAKKGAQKKIEKEAAQLQGRKVKTQVKNIRQFIMPVVSAISSRIIKTPRRFIEDEDYDPPIKIARLESTPNSRFSAPSCGSSEKSSAASQHSSQMSSDSSRSSSPSVDTSTDSQASEEIQVLPEERSDTPEVHPPLPISQSPENESNDRRSRRYSVSERSFGSRTTKKLSTLQSAPQQQTSSSPPPPLLTPPPPLQPASSISDHTPWLMPPTIPLASPFLPASTAPMQGKRKSILREPTFRWTSLKHSRSEPQYFSSAKYAKEGLIRKPIFDNFRPPPLTPEDVGFASGFSASGTAASARLFSPLHSGTRFDMHKRSPLLRAPRFTPSEAHSRIFESVTLPSNRTSAGTSSSGVSNRKRKRKVFSPIRSEPRSPSHSMRTRSGRLSSSELSPLTPPSSVSSSLSISVSPLATSALNPTFTFPSHSLTQSGESAEKNQRPRKQTSAPAEPFSSSSPTPLFPWFTPGSQTERGRNKDKAPEELSKDRDADKSVEKDKSRERDREREKENKRESRKEKRKKGSEIQSSSALYPVGRVSKEKVVGEDVATSSSAKKATGRKKSSSHDSGTDITSVTLGDTTAVKTKILIKKGRGNLEKTNLDLGPTAPSLEKEKTLCLSTPSSSTVKHSTSSIGSMLAQADKLPMTDKRVASLLKKAKAQLCKIEKSKSLKQTDQPKAQGQESDSSETSVRGPRIKHVCRRAAVALGRKRAVFPDDMPTLSALPWEEREKILSSMGNDDKSSIAGSEDAEPLAPPIKPIKPVTRNKAPQEPPVKKGRRSRRCGQCPGCQVPEDCGVCTNCLDKPKFGGRNIKKQCCKMRKCQNLQWMPSKAYLQKQAKAVKKKEKKSKTSEKKDSKESSVVKNVVDSSQKPTPSAREDPAPKKSSSEPPPRKPVEEKSEEGNVSAPGPESKQATTPASRKSSKQVSQPAVVIPPQPPTTGPPRKEVPKTTPSEPKKKQPPPPESGPEQSKQKKVAPRPSIPVKQKPKEKEKPPPVNKQENAGTLNILSTLSNGNSSKQKIPADGVHRIRVDFKLENAGGDLKDGHHHYEGAVVILDAGAQYGKVIDRRVRELFVQSEIFPLETPAFAIKEQGFRAIIISGGPNSVYAEDAPWFDPAIFTIGKPVLGICYGMQMMNKVFGGTVHKKSDRGRWSVVACLDSGPGAETFPSSLFS

SEQ ID NO: 862757 - protein, 1510 aa, Homo sapiens
ASLHGANMAHSCRWRFPARPGTTGGGGGGGRRGLGGAPRQRVPALLLPPGPPVGGGGPGAPPSPPAVAAAAAAAGSSGAGVPGGAAAASAASSSSASSSSSSSSSASSGPALLRVGPGFDAALQVSAAIGTNLRRFRAVFGESGGGGGSGEDEQFLGFGSDEEVRVRSPTRSPSVKTSPRKPRGRPRSGSDRNSAILSDPSVFSPLNKSETKSGDKIKKKDSKSIEKKRGRPPTFPGVKIKITHGKDISELPKGNKEDSLKKIKRTPSATFQQATKIKKLRAGKLSPLKSKFKTGKLQIGRKGVQIVRRRGRPPSTERIKTPSGLLINSELEKPQKVRKDKEGTPPLTKEDKTVVRQSPRRIKPVRIIPSSKRTDATIAKQLLQRAKKGAQKKIEKEAAQLQGRKVKTQVKNIRQFIMPVVSAISSRIIKTPRRFIEDEDYDPPIKIARLESTPNSRFSAPSCGSSEKSSAASQHSSQMSSDSSRSSSPSVDTSTDSQASEEIQVLPEERSDTPEVHPPLPISQSPENESNDRRSRRYSVSERSFGSRTTKKLSTLQSAPQQQTSSSPPPPLLTPPPPLQPASSISDHTPWLMPPTIPLASPFLPASTAPMQGKRKSILREPTFRWTSLKHSRSEPQYFSSAKYAKEGLIRKPIFDNFRPPPLTPEDVGFASGFSASGTAASARLFSPLHSGTRFDMHKRSPLLRAPRFTPSEAHSRIFESVTLPSNRTSAGTSSSGVSNRKRKRKVFSPIRSEPRSPSHSMRTRSGRLSSSELSPLTPPSSVSSSLSISVSPLATSALNPTFTFPSHSLTQSGESAEKNQRPRKQTSAPAEPFSSSSPTPLFPWFTPGSQTERGRNKDKAPEELSKDRDADKSVEKDKSRERDREREKENKRESRKEKRKKGSEIQSSSALYPVGRVSKEKVVGEDVATSSSAKKATGRKKSSSHDSGTDITSVTLGDTTAVKTKILIKKGRGNLEKTNLDLGPTAPSLEKEKTLCLSTPSSSTVKHSTSSIGSMLAQADKLPMTDKRVASLLKKAKAQLCKIEKSKSLKQTDQPKAQGQESDSSETSVRGPRIKHVCRRAAVALGRKRAVFPDDMPTLSALPWEEREKILSSMGNDDKSSIAGSEDAEPLAPPIKPIKPVTRNKAPQEPPVKKGRRSRRCGQCPGCQVPEDCGVCTNCLDKPKFGGRNIKKQCCKMRKCQNLQWMPSKAYLQKQAKAVKKKEKKSKTSEKKDSKESSVVKNVVDSSQKPTPSAREDPAPKKSSSEPPPRKPVEEKSEEGNVSAPGPESKQATTPASRKSSKQVSQPAVVIPPQPPTTGPPRKEVPKTTPSEPKKKQPPPPESGPEQSKQKKVAPRPSIPVKQKPKEKEKPPPVNKQENAGTLNILSTLSNGNSSKQKIPADGVHRIRVDFKTYTSTSNNSISGSLKRLEDTTARFTNANFQEVSAHTSSGKDVSETRGSEGKGKKSSAHSSGQRGRKPGGGRNPGTKLEWWPVWIQAQGPRHSLLHSF

SEQ ID NO: 862758 - protein, 1423 aa, Homo sapiens
ASLHGANMAHSCRWRFPARPGTTGGGGGGGRRGLGGAPRQRVPALLLPPGPPVGGGGPGAPPSPPAVAAAAAAAGSSGAGVPGGAAAASAASSSSASSSSSSSSSASSGPALLRVGPGFDAALQVSAAIGTNLRRFRAVFGESGGGGGSGEDEQFLGFGSDEEVRVRSPTRSPSVKTSPRKPRGRPRSGSDRNSAILSDPSVFSPLNKSETKSGDKIKKKDSKSIEKKRGRPPTFPGVKIKITHGKDISELPKGNKEDSLKKIKRTPSATFQQATKIKKLRAGKLSPLKSKFKTGKLQIGRKGVQIVRRRGRPPSTERIKTPSGLLINSELEKPQKVRKDKEGTPPLTKEDKTVVRQSPRRIKPVRIIPSSKRTDATIAKQLLQRAKKGAQKKIEKEAAQLQGRKVKTQVKNIRQFIMPVVSAISSRIIKTPRRFIEDEDYDPPIKIARLESTPNSRFSAPSCGSSEKSSAASQHSSQMSSDSSRSSSPSVDTSTDSQASEEIQVLPEERSDTPEVHPPLPISQSPENESNDRRSRRYSVSERSFGSRTTKKLSTLQSAPQQQTSSSPPPPLLTPPPPLQPASSISDHTPWLMPPTIPLASPFLPASTAPMQGKRKSILREPTFRWTSLKHSRSEPQYFSSAKYAKEGLIRKPIFDNFRPPPLTPEDVGFASGFSASGTAASARLFSPLHSGTRFDMHKRSPLLRAPRFTPSEAHSRIFESVTLPSNRTSAGTSSSGVSNRKRKRKVFSPIRSEPRSPSHSMRTRSGRLSSSELSPLTPPSSVSSSLSISVSPLATSALNPTFTFPSHSLTQSGESAEKNQRPRKQTSAPAEPFSSSSPTPLFPWFTPGSQTERGRNKDKAPEELSKDRDADKSVEKDKSRERDREREKENKRESRKEKRKKGSEIQSSSALYPVGRVSKEKVVGEDVATSSSAKKATGRKKSSSHDSGTDITSVTLGDTTAVKTKILIKKGRGNLEKTNLDLGPTAPSLEKEKTLCLSTPSSSTVKHSTSSIGSMLAQADKLPMTDKRVASLLKKAKAQLCKIEKSKSLKQTDQPKAQGQESDSSETSVRGPRIKHVCRRAAVALGRKRAVFPDDMPTLSALPWEEREKILSSMGNDDKSSIAGSEDAEPLAPPIKPIKPVTRNKAPQEPPVKKGRRSRRCGQCPGCQVPEDCGVCTNCLDKPKFGGRNIKKQCCKMRKCQNLQWMPSKAYLQKQAKAVKKKEKKSKTSEKKDSKESSVVKNVVDSSQKPTPSAREDPAPKKSSSEPPPRKPVEEKSEEGNVSAPGPESKQATTPASRKSSKQVSQPAVVIPPQPPTTGPPRKEVPKTTPSEPKKKQPPPPESGPEQSKQKKVAPRPSIPVKQKPKEKEKPPPVNKQENAGTLNILSTLSNGNSSKQKIPADGVHRIRVDFKVKVFSDHKVY

SEQ ID NO: 862759 - protein, 1633 aa, Homo sapiens
ASLHGANMAHSCRWRFPARPGTTGGGGGGGRRGLGGAPRQRVPALLLPPGPPVGGGGPGAPPSPPAVAAAAAAAGSSGAGVPGGAAAASAASSSSASSSSSSSSSASSGPALLRVGPGFDAALQVSAAIGTNLRRFRAVFGESGGGGGSGEDEQFLGFGSDEEVRVRSPTRSPSVKTSPRKPRGRPRSGSDRNSAILSDPSVFSPLNKSETKSGDKIKKKDSKSIEKKRGRPPTFPGVKIKITHGKDISELPKGNKEDSLKKIKRTPSATFQQATKIKKLRAGKLSPLKSKFKTGKLQIGRKGVQIVRRRGRPPSTERIKTPSGLLINSELEKPQKVRKDKEGTPPLTKEDKTVVRQSPRRIKPVRIIPSSKRTDATIAKQLLQRAKKGAQKKIEKEAAQLQGRKVKTQVKNIRQFIMPVVSAISSRIIKTPRRFIEDEDYDPPIKIARLESTPNSRFSAPSCGSSEKSSAASQHSSQMSSDSSRSSSPSVDTSTDSQASEEIQVLPEERSDTPEVHPPLPISQSPENESNDRRSRRYSVSERSFGSRTTKKLSTLQSAPQQQTSSSPPPPLLTPPPPLQPASSISDHTPWLMPPTIPLASPFLPASTAPMQGKRKSILREPTFRWTSLKHSRSEPQYFSSAKYAKEGLIRKPIFDNFRPPPLTPEDVGFASGFSASGTAASARLFSPLHSGTRFDMHKRSPLLRAPRFTPSEAHSRIFESVTLPSNRTSAGTSSSGVSNRKRKRKVFSPIRSEPRSPSHSMRTRSGRLSSSELSPLTPPSSVSSSLSISVSPLATSALNPTFTFPSHSLTQSGESAEKNQRPRKQTSAPAEPFSSSSPTPLFPWFTPGSQTERGRNKDKAPEELSKDRDADKSVEKDKSRERDREREKENKRESRKEKRKKGSEIQSSSALYPVGRVSKEKVVGEDVATSSSAKKATGRKKSSSHDSGTDITSVTLGDTTAVKTKILIKKGRGNLEKTNLDLGPTAPSLEKEKTLCLSTPSSSTVKHSTSSIGSMLAQADKLPMTDKRVASLLKKAKAQLCKIEKSKSLKQTDQPKAQGQESDSSETSVRGPRIKHVCRRAAVALGRKRAVFPDDMPTLSALPWEEREKILSSMGNDDKSSIAGSEDAEPLAPPIKPIKPVTRNKAPQEPPVKKGRRSRRCGQCPGCQVPEDCGVCTNCLDKPKFGGRNIKKQCCKMRKCQNLQWMPSKAYLQKQAKAVKKKEKKSKTSEKKDSKESSVVKNVVDSSQKPTPSAREDPAPKKSSSEPPPRKPVEEKSEEGNVSAPGPESKQATTPASRKSSKQVSQPAVVIPPQPPTTGPPRKEVPKTTPSEPKKKQPPPPESGPEQSKQKKVAPRPSIPVKQKPKEKEKPPPVNKQENAGTLNILSTLSNGNSSKQKIPADGVHRIRVDFKEDCEAENVWEMGGLGILTSVPITPRVVCFLCASSGHVEFVYCQVCCEPFHKFCLEENERPLEDQLENWCCRRCKFCHVCGRQHQATKQLLECNKCRNSYHPECLGPNYPTKPTKKKKVWICTKCVRCKSCGSTTPGKGWDAQWSHDFSLCHDCAKLFAKGNFCPLCDKCYDDDDYESKMMQCGKCDRWVHSKCENLSGTEGWSLFISVFFFLGTTTFISL

SEQ ID NO: 862760 - protein, 1433 aa, Homo sapiens
ASLHGANMAHSCRWRFPARPGTTGGGGGGGRRGLGGAPRQRVPALLLPPGPPVGGGGPGAPPSPPAVAAAAAAAGSSGAGVPGGAAAASAASSSSASSSSSSSSSASSGPALLRVGPGFDAALQVSAAIGTNLRRFRAVFGESGGGGGSGEDEQFLGFGSDEEVRVRSPTRSPSVKTSPRKPRGRPRSGSDRNSAILSDPSVFSPLNKSETKSGDKIKKKDSKSIEKKRGRPPTFPGVKIKITHGKDISELPKGNKEDSLKKIKRTPSATFQQATKIKKLRAGKLSPLKSKFKTGKLQIGRKGVQIVRRRGRPPSTERIKTPSGLLINSELEKPQKVRKDKEGTPPLTKEDKTVVRQSPRRIKPVRIIPSSKRTDATIAKQLLQRAKKGAQKKIEKEAAQLQGRKVKTQVKNIRQFIMPVVSAISSRIIKTPRRFIEDEDYDPPIKIARLESTPNSRFSAPSCGSSEKSSAASQHSSQMSSDSSRSSSPSVDTSTDSQASEEIQVLPEERSDTPEVHPPLPISQSPENESNDRRSRRYSVSERSFGSRTTKKLSTLQSAPQQQTSSSPPPPLLTPPPPLQPASSISDHTPWLMPPTIPLASPFLPASTAPMQGKRKSILREPTFRWTSLKHSRSEPQYFSSAKYAKEGLIRKPIFDNFRPPPLTPEDVGFASGFSASGTAASARLFSPLHSGTRFDMHKRSPLLRAPRFTPSEAHSRIFESVTLPSNRTSAGTSSSGVSNRKRKRKVFSPIRSEPRSPSHSMRTRSGRLSSSELSPLTPPSSVSSSLSISVSPLATSALNPTFTFPSHSLTQSGESAEKNQRPRKQTSAPAEPFSSSSPTPLFPWFTPGSQTERGRNKDKAPEELSKDRDADKSVEKDKSRERDREREKENKRESRKEKRKKGSEIQSSSALYPVGRVSKEKVVGEDVATSSSAKKATGRKKSSSHDSGTDITSVTLGDTTAVKTKILIKKGRGNLEKTNLDLGPTAPSLEKEKTLCLSTPSSSTVKHSTSSIGSMLAQADKLPMTDKRVASLLKKAKAQLCKIEKSKSLKQTDQPKAQGQESDSSETSVRGPRIKHVCRRAAVALGRKRAVFPDDMPTLSALPWEEREKILSSMGNDDKSSIAGSEDAEPLAPPIKPIKPVTRNKAPQEPPVKKGRRSRRCGQCPGCQVPEDCGVCTNCLDKPKFGGRNIKKQCCKMRKCQNLQWMPSKAYLQKQAKAVKKKEKKSKTSEKKDSKESSVVKNVVDSSQKPTPSAREDPAPKKSSSEPPPRKPVEEKSEEGNVSAPGPESKQATTPASRKSSKQVSQPAVVIPPQPPTTGPPRKEVPKTTPSEPKKKQPPPPESGPEQSKQKKVAPRPSIPVKQKPKEKEKPPPVNKQENAGTLNILSTLSNGNSSKQKIPADGVHRIRVDFKVVACLDSGPGAETFPSSLFS

SEQ ID NO: 862761 - protein, 1423 aa, Homo sapiens; identical to SEQ ID NO: 862758

SEQ ID NO: 862762 - protein, 171 aa, Homo sapiens
MAHSCRWRFPARPGTTGGGGGGGRRGLGGAPRQRVPALLLPPGPPVGGGGPGAPPSPPAVAAAAAAAGSSGAGVPGGAAAASAASSSSASSSSSSSSSASSGPALLRVGPGFDAALQVSAAIGTNLRRFRAVFGESGGGGGSGEDEQFLGFGSDEEVRVRSPTRSPSGTAN

SEQ ID NO: 862763 - protein, 71 aa, Homo sapiens
MSSDSSRSSSPSVDTSTDSQASEEIQVLPEERSDTPEVHPPLPISQSPENESNDRRSRRYSVSERSFGSRT

SEQ ID NO: 862764 - protein, 255 aa, Homo sapiens
MKALLALPLLLLLSTPPCAPQVSGIRGDALERFCLQQPLDCDDIYAQGYQSDGVYLIYPSGPSVPVPVFCDMTTEGGKWTVFQKRFNGSVSFFRGWNDYKLGFGRADGEYWLGLQNMHLLTLKQKYELRVDLEDFENNTAYAKYADFSISPNAVSAEEDGYTLFVAGFEDGGAGDSLSYHSGQKFSTFDRDQDLFVQNCAALSSGAFWFRSCHFANLNGFYLGGSHLSYANGINWAQWKGFYYSLKRTEMKIRRA

SEQ ID NO: 862765 - protein, 263 aa, Homo sapiens [sequence omitted]

SEQ ID NO: 862766 - protein, 255 aa, Homo sapiens; identical to SEQ ID NO: 862764

SEQ ID NO: 862767 - protein, 255 aa, Homo sapiens; identical to SEQ ID NO: 862764

SEQ ID NO: 862768 - protein, 255 aa, Homo sapiens; identical to SEQ ID NO: 862764

SEQ ID NO: 862769 - protein, 255 aa, Homo sapiens; identical to SEQ ID NO: 862764

SEQ ID NO: 862770 - protein, 175 aa, Homo sapiens
MSHGAGLVRTTCSSGSALGPGAGAAQPSASPLEGLLDLSYPRTHAALLKVAQMVTLLIAFICVRSSLWTNYSAYSYFEVVTICDLIMILAFYLVHLFRFYRVLTCISWPLSELLHYLIGTLLLLIASIVAASKSYNQSGLVAGAIFGFMATFLCMASIWLSYKISCVTQSTDAAV

SEQ ID NO: 862771 - protein, 175 aa, Homo sapiens; identical to SEQ ID NO: 862770

SEQ ID NO: 862772 - protein, 175 aa, Homo sapiens; identical to SEQ ID NO: 862770

SEQ ID NO: 862773 - protein, 142 aa, Homo sapiens
MSHGAGLVRTTCSSGSALGPGAGAAQPSASPLEGLLDLSYPRTHAALLKVAQMVTLLIAFICVRSSLWTNYSAYSYFEVVTICDLIMILAFYLVHLFRFYRVLTCISWPLSIFGFMATFLCMASIWLSYKISCVTQSTDAAV

SEQ ID NO: 862774 - protein, 151 aa, Homo sapiens
MSHGAGLVRTTCSSGSALGPGAGAAQPSASPLEGLLDLSYPRTHAALLKVAQMVTLLIAFICVRSSLWTNYSAYSYFEVVTICDLIMILAFYLVHLFRFYRVLTCISWPLSELLHYLIGTLLLLIASIVAASKSYNQSGLVAGADNQSPLA

SEQ ID NO: 862775 - protein, 175 aa, Homo sapiens; identical to SEQ ID NO: 862770

SEQ ID NO: 862776 - protein, 132 aa, Homo sapiens
PRPPQVLGLQVTLLIAFICVRSSLWTNYSAYSYFEVVTICDLIMILAFYLVHLFRFYRVLTCISWPLSELLHYLIGTLLLLIASIVAASKSYNQSGLVAGAIFGFMATFLCMASIWLSYKISCVTQSTDAAV

SEQ ID NO: 862777 - protein, 207 aa, Homo sapiens
MSHGAGLVRTTCSSGSALGPGAGAAQPSASPLEGLLDLSYPRTHAALLKVAQMVTLLIAFICVRSSLWTNYSAYSYFEVVTICDLIMILAFYLVHLFRFYRVLTCISWPLSMQPSDEATTPRPLRSFAERRTCTPGEASGPVFLCQSPVRLVGTRKGLHPLPALPGSQLPELLSQPETLPPAFRGEHPSHSGKGKQPPGKCFLPSCF

SEQ ID NO: 862778 - protein, 1101 aa, Homo sapiens
MEQPGAAASGAGGGSEEPGGGRSNKRSAGNRAANEEETKNKPKLNIQIKTLADDVRDRITSFRKSTVKKEKPLIQHPIDSQVAMSEFPAAQPLYDERSLNLSEKEVLDLFEKMMEDMNLNEEKKAPLRNKDFTTKREMVVQYISATAKSGGLKNSKHECTLSSQEYVHELRSGISDEKLLNCLESLRVSLTSNPVSWVNNFGHEGLGLLLDELEKLLDKKQQENIDKKNQYKLIQCLKAFMNNKFGLQRILGDERSLLLLARAIDPKQPNMMTEIVKILSAICIVGEENILDKLLGAITTAAERNNRERFSPIVEGLENQEALQLQVACMQFINALVTSPYELDFRIHLRNEFLRSGLKTMLPDLKEKENDELDIQLKVFDENKEDDLTELSHRLNDIRAEMDDMNEVYHLLYNMLKDTAAENYFLSILQHFLLIRNDYYIRPQYYKIIEECVSQIVLHCSGMDPDFKYRQRLDIDLTHLIDSCVNKAKVEESEQKAAEFSKKFDEEFTARQEAQAELQKRDEKIKELEAEIQQLRTQAQVLSSSSGIPGPPAAPPLPGVGPPPPPPAPPLPGGAPLPPPPPPLPGMMGIPPPPPPPLLFGGPPPPPPLGGVPPPPGISLNLPYGMKQKKMYKPEVSMKRINWSKIEPTELSENCFWLRVKEDKFENPDLFAKLALNFATQIKVQKNAEALEEKKTGPTKKKVKELRILDPKTAQNLSIFLGSYRMPYEDIRNVILEVNEDMLSEALIQNLVKHLPEQKILNELAELKNEYDDLCEPEQFGVVMSSVKMLQPRLSSILFKLTFEEHINNIKPSIIAVTLACEELKKSESFNRLLELVLLVGNYMNSGSRNAQSLGFKINFLCKIRDTKSADQKTTLLHFIADICEEKYRDILKFPEELEHVESASKVSAQILKSNLASMEQQIVHLERDIKKFPQAENQHDKFVEKMTSFTKTAREQYEKLSTMHNNMMKLYENLGEYFIFDSKTVSIEEFFGDLNNFRTLFLEAVRENNKRREMEEKTRRAKLAKEKAEQEKLERQKKKKQLIDINKEGDETGVMDNLLEALQSGAAFRDRRKRIPRNPDNRRVPLERSRSRHNGAISSK

SEQ ID NO: 862779 - protein, 856 aa, Homo sapiens [sequence omitted]

SEQ ID NO: 862780 - protein, 710 aa, Homo sapiens
  misc_feature (348)..(348): Xaa can be any naturally occurring amino acid
MSFRKPLLAHQSLPFGPKFMSVSCVKDIHPILTLPKVSTHYINPKSKISFKYHRFKSSKAYQFRSSKSGMSETLGMVFPEAKSSSSENQGNRKVNLLSNYNGGNRHRITVTDISVSKRREWKLEWSLLSQSFSKSSQANFCSISRPGSNPLSQGSTLWACSSSFLDYGLGLCLCAYGLHFFLCSHTWASASVPAALLSGWCFLYLEGWHMFAAEKFYQRVSYLENSGSLTIFFHFFLSLSLLGPVGSVSDGRTFSKILWVFYVCHIDSHIQKRGSSQIFPEQPHLYSWLLLKQSNKIHKLMPNLFSTSQRLSRHTLGLIYRAHFSNSESPNFSIFFVFFYNHSDCEFXAQNLPSHQILIPFVHLYSYFLFKKKFFLMYVEMRSHSVTQAAVSGANIAPCNLKLPGSRDPPASAFQVAGSTGACHHAWLIFCIFLRDLILLCCPGCSRTPSLKQSTHLGLLKCRITGEATMPSLFCQCICFLSYFTISTKKKLSYISNTRLENFLSYTSKFIIYSTFHTTVVDNLDRYNFLPLYDKDSLSSIFQIKSSFPSKPSLEMPLTFILLPSGKGNLVFSITATKILLVSTHYPIPKPFSHFKTFVTEVPNPSQFHNLHEIPMAAVTNYPLAQWLKTIEIYYLVVLEAKSPKLRGGRAERLLETLRETLFPCLPVSCGCHHSLVCDCISLSSVFTSLPLCIYNLPLPLSYKDTCDGT

SEQ ID NO: 862781 - protein, 163 aa, Homo sapiens
MEQPGAAASGAGGGSEEPGGGRSNKRSAGNRAANEEETKNKPKLNIQIKTLADDVRDRITSFRKSTVKKEKPLIQHPIDSQVAMSEFPAAQPLYDERSLNLSEKEVLDLFEKMMEDMNLNEEKKAPLRNKDFTTKREMVVQYISATAKSIVGSKVGWAEKQQT

SEQ ID NO: 862782 - protein, 709 aa, Homo sapiens
MSFRKPLLAHQSLPFGPKFMSVSCVKDIHPILTLPKVSTHYINPKSKISFKYHRFKSSKAYQFRSSKSGMSETLGMVFPEAKSSSSENQCNRKVNLLSNYNGGNRHRITVTDISVSKRREWKLEWSLLSQSFSKSSQANFCSISRPGSNPLSQGSTLWACSSSFLDYGLGLCLCAYGLHFFLCSHTWASASVPAALLSGWCFLYLEGWHMFAAEKFYQRVSYLENSGSLTIFFHFFLSLSLLGPVGSVSDGRTFSKILWVFYVCHIDSHIQKRGSSQIFPEQPHLYSWLLLKQSNKSSKLMPNLFSTSQRLSRHTLGLIYRAHFSNSESPNFSIFFFFFTIIQIVNSGSELPSHQILIPFVHLYSYFLFKKKFFLMYVEMRSHSVTQAAVSGANIAPCNLKLPGSRDPPASAFQVAGSTGACHHAWLIFAFFCRDLILLCCPGCSRTPSLKQSTHLGLLKCRITGEATMPSLFCQCICFLSYFTISTKKKLSYISNTRLENFLSYTSKFIIYSTFHTTVVDNLDRYNFLPLYDKDSLSSIFQIKSSFPSKPSLEMPLTFILLPSGKGNLVFSITATKILLVSTHYPIPKPFSHFKTFVTEVPNPSQFHNLHEIPMAAVTNYPLAQWLKTIEIYYLVVLEAKSPKLRGWQAERLLETLRETLFPCLPVSCGCHHSLVCDCISLSSVFTSLPLCIYNLPLPLSYKDTCDGT

SEQ ID NO: 862783 - protein, 930 aa, Homo sapiens
MEYERRGGRGDRTGRYGATDRSQDDGGENRSRDHDYRDMDYRSYPREYGSQEGKHDYDDSSEEQSAEDSYEASPGSETQRRRRRRHRHSPTGPPGFPRDGDYRDQDYRTEQGEEEEEEEDEEEEEKASNIVMLRMLPQAATEDDIRGQLQSHGVQAREVRLMRNKSSGQSRGFAFVEFSHLQDATRWMEANQHSLNILGQKVSMHYSDPKPKINEDWLCNKCGVQNFKRREKCFKCGVPKSEAEQKLPLGTRLDQQTLPLGGRELSQGLLPLPQPYQAQGVLASQALSQGSEPSSENANDTIILRNLNPHSTMDSILGALAPYAVLSSSNVRVIKDKQTQLNRGFAFIQLSTIVEAAQLLQILQALHPPLTIDGKTINVEFAKGSKRDMASNEGSRISAASVASTAIAAAQWAISQASQGGEGTWATSEEPPVDYSYYQQDEGYGNSQGTESSLYAHGYLKGTKGPGITGTKGDPTGAGPEASLEPGADSVSMQAFSRAQPGAAPGIYQQSAEASSSQGTAANSQSYTIMSPAVLKSELQSPTHPSSALPPATSPTAQESYSQYPVPDVSTYQYDETSGYYYDPQTGLYYDPNSQYYYNAQSQQYLYWDGERRTYVPALEQSADGHKETGAPSKEGKEKKEKHKTKTAQQIAKDMERWARSLNKQKENFKNSFQPISSLRDDERRESATADAGYAILEKKGALAERQHTSMDLPKLASDDRPSPPRGLVAAYSGESDSEEEQERGGPEREEKLTDWQKLACLLCRRQFPSKEALIRHQQLSGLHKQNLEIHRRAHLSENELEALEKNDMEQMKYRDRAAERREKYGIPEPPEPKRRKYGGISTASVDFEQPTRDGLGSDNIGSRMLQAMGWKEGSGLGRKKQGIVTPIEAQTRVRGSGLGARGSSYGVTSTESYKETLHKTMVTRFNEAQ

SEQ ID NO: 862784 - protein, 930 aa, Homo sapiens; identical to SEQ ID NO: 862783

SEQ ID NO: 862785 - protein, 920 aa, Homo sapiens
MKDVVVVVTGLAAMEPLTARRMMVGRTAAETTTTGTWTTVHILASMAARRASMTMTTHLRSRVRRIPTRPPRAPRLSVGGGGGTGFPRDGDYRDQDYRTEQGEEEEEEEDEEEEEKASNIVMLRMLPQAATEDDIRGQLQSHGVQAREVRLMRNKSSGQSRGFAFVEFSHLQDATRWMEANQHSLNILGQKVSMHYSDPKPKINEDWLCNKCGVQNFKRREKCFKCGVPKSEAEQKLPLGTRLDQQTLPLGGRELSQGLLPLPQPYQAQGVLASQALSQGSEPSSENANDTIILRNLNPHSTMDSILGALAPYAVLSSSNVRVIKDKQTQLNRGFAFIQLSTIVEAAQLLQILQALHPPLTIDGKTINVEFAKGSKRDMASNEGSRISAASVASTAIAAAQWAISQASQGGEGTWATSEEPPVDYSYYQQDEGYGNSQGTESSLYAHGYLKGTKGPGITGTKGDPTGAGPEASLEPGADSVSMQAFSRAQPGAAPGIYQQSAEASSSQGTAANSQSYTIMSPAVLKSELQSPTHPSSALPPATSPTAQESYSQYPVPDVSTYQYDETSGYYYDPQTGLYYDPNSQYYYNAQSQQYLYWDGERRTYVPALEQSADGHKETGAPSKEGKEKKEKHKTKTAQQIAKDMERWARSLNKQKENFKNSFQPISSLRDDERRESATADAGYAILEKKGALAERQHTSMDLPKLASDDRPSPPRGLVAAYSGESDSEEEQERGGPEREEKLTDWQKLACLLCRRQFPSKEALIRHQQLSGLHKQNLEIHRRAHLSENELEALEKNDMEQMKYRDRAAERREKYGIPEPPEPKRRKYGGISTASVDFEQPTRDGLGSDNIGSRMLQAMGWKEGSGLGRKKQGIVTPIEAQTRVRGSGLGARGSSYGVTSTESYKETLHKTMVTRFNEAQ

SEQ ID NO: 862786 - protein, 930 aa, Homo sapiens; identical to SEQ ID NO: 862783

SEQ ID NO: 862787 - protein, 987 aa, Homo sapiens
MEYERRGGRGDRTGRYGATDRSQDDGGENRSRDHDYRDMDYRSYPREYGSQEGKHDYDDSSEEQSAEDSYEASPGSETQRRRRRRHRHSPTGPPGFPRDGDYRDQDYRTEQGEEEEEEEDEEEEEKASNIVMLRMLPQAATEDDIRGQLQSHGVQAREVRLMRNKSSGQSRGFAFVEFSHLQDATRWMEANQHSLNILGQKVSMHYSDPKPKINEDWLCNKCGVQNFKRREKCFKCGVPKSEAEQKLPLGTRLDQQTLPLGGRELSQGLLPLPQPYQAQGVLASQALSQGSEPSSENANDTIILRNLNPHSTMDSILGALAPYAVLSSSNVRVIKDKQTQLNRGFAFIQLSTIVEAAQLLQILQALHPPLTIDGKTINVEFAKGSKRDMASNEGSRISAASVASTAIAAAQWAISQASQGGEGTWATSEEPPVDYSYYQQDEGYGNSQGTESSLYAHGYLKGTKGPGITGTKGDPTGAGPEASLEPGADSVSMQAFSRAQPGAAPGIYQQSAEASSSQGTAANSQSYTIMSPAVLKSELQSPTHPSSALPPATSPTAQESYSQYPVPDVSTYQYDETSGYYYDPQTGLYYDPNSQYYYNAQSQQYLYWDGERRTYVPALEQSADGHKETGAPSKEGKEKKEKHKTKTAQQIAKDMERWARSLNKQKENFKNSFQPISSLRDDERRESATADAGYAILEKKVCWGHPPAPCPQSCPSFGPSVESLNFCVPPPQGALAERQHTSMDLPKLASDDRPVSAQGREEAGALIWPGLTAHPHPLQSPPRGLVAAYSGESDSEEEQERGGPEREEKLTDWQKLACLLCRRQFPSKEALIRHQQLSGLHKQNLEIHRRAHLSENELEALEKNDMEQMKYRDRAAERREKYGIPEPPEPKRRKYGGISTASVDFEQPTRDGLGSDNIGSRMLQAMGWKEGSGLGRKKQGIVTPIEAQTRVRGSGLGARGSSYGVTSTESYKETLHKTMVTRFNEAQ

SEQ ID NO: 862788 - protein, 855 aa, Homo sapiens
MEYERRGGRGDRTGRYGATDRSQDDGGENRSRDHDYRDMDYRSYPREYGSQEGKHDYDDSSEEQSAEDSYEASPGSETQRRRRRRHRHSPTGPPGFPRDGDYRDQDYRTEQGEEEEEEEDEEEEEKASNIVMLRMLPQAATEDDIRGQLQSHGVQAREVRLMRNKSSGQSRGFAFVEFSHLQDATRWMEANQHSLNILGQKVSMHYSDPKPKINEDWLCNKCGVQNFKRREKCFKCGVPKSEAEQKLPLGTRLDQQTLPLGGRELSQGLLPLPQPYQAQGVLASQALSQGSEPSSENANDTIILRNLNPHSTMDSILGALAPYAVLSSSNVRVIKDKQTQLNRGFAFIQLSTIVEAAQLLQILQALHPPLTIDGKTINVEFAKGSKRDMASNEGSRISAASVASTAIAAAQWAISQASQGGEGTWATSEEPPVDYSYYQQDEGYGNSQGTESSLYAHGYLKGTKGPGITGTKGDPTGAGPEASLEPGADSVSMQAFSRAQPGAAPGIYQQSAEASSSQGTAANSQSYTIMSPAVLKSELQSPTHPSSALPPATSPTAQESYSQYPVPDVSTYQYDETSGYYYDPQTGLYYDPNSQYYYNAQSQQYLYWDGERRTYVPALEQSADGHKETGAPSKEGKEKKEKHKTKTAQQIAKDMERWARSLNKQKENFKNSFQPISSLRDDERRESATADAGYAILEKKGALAERQHTSMDLPKLASDDRPSPPRGLVAAYSGESDSEEEQERGGPEREEKLTDWQKLACLLCRRQFPSKEALIRHQQLSGLHKQNLEIHRRAHLSENELEALEKQGIVTPIEAQTRVRGSGLGARGSSYGVTSTESYKETLHKTMVTRFNEAQ

SEQ ID NO: 862789 - protein, 429 aa, Homo sapiens
GTRPGYCSLRLIVGRCQGTAANSQSYTIMSPAVLKSELQSPTHPSSALPPATSPTAQESYSQYPVPDVSTYQYDETSGYYYDPQTGLYYDPNSQYYYNAQSQQYLYWDGERRTYVPALEQSADGHKETGAPSKEGKEKKEKHKTKTAQQIAKDMERWARSLNKQKENFKNSFQPISSLRDDERRESATADAGYAILEKKGALAERQHTSMDLPKLASDDRPSPPRGLVAAYSGESDSEEEQERGGPEREEKLTDWQKLACLLCRRQFPSKEALIRHQQLSGLHKQNLEIHRRAHLSENELEALEKNDMEQMKYRDRAAERREKYGIPEPPEPKRRKYGGISTASVDFEQPTRDGLGSDNIGSRMLQAMGWKEGSGLGRKKQGIVTPIEAQTRVRGSGLGARGSSYGVTSTESYKETLHKTMVTRFNEAQ

SEQ ID NO: 862790 - protein, 683 aa, Homo sapiens
MEYERRGGRGDRTGRYGATDRSQDDGGENRSRDHDYRDMDYRSYPREYGSQEGKHDYDDSSEEQSAEDSYEASPGSETQRRRRRRHRHSPTGPPGFPRDGDYRDQDYRTEQGEEEEEEEDEEEEEKASNIVMLRMLPQAATEDDIRGQLQSHGVQAREVRLMRNKSSGQSRGFAFVEFSHLQDATRWMEANQHSLNILGQKVSMHYSDPKPKINEDWLCNKCGVQNFKRREKCFKCGVPKSEAEQKLPLGTRLDQQTLPLGGRELSQGLLPLPQPYQAQGVLASQALSQGSEPSSENANDTIILRNLNPHSTMDSILGALAPYAVLSSSNVRVIKDKQTQLNRGFAFIQLSTIVEAAQLLQILQALHPPLTIDGKTINVEFAKGSKRDMASNEGSRISAASVASTAIAAAQWAISQASQGGEGTWATSEEPPVDYSYYQQDEGYGNSQGTESSLYAHGYLKGTKGPGITGTKGDPTGAGPEASLEPGADSVSMQAFSRAQPGAAPGIYQQSAEASSSQGTAANSQSYTIMSPAVLKSELQSPTHPSSALPPATSPTAQESYSQYPVPDVSTYQYDETSGYYYDPQTGLYYDPNSQYYYNAQSQQYLYWDGERRTYVPALEQSADGHKETGAPSKQGIVTPIEAQTRVRGSGLGARGSSYGVTSTESYKETLHKTMVTRFNEAQ

SEQ ID NO: 862791 - protein, 492 aa, Homo sapiens
MEYERRGGRGDRTGRYGATDRSQDDGGENRSRDHDYRDMDYRSYPREYGSQEGKHDYDDSSEEQSAEDSYEASPGSETQRRRRRRHRHSPTGPPGFPRDGDYRDQDYRTEQGEEEEEEEDEEEEEKASNIVMLRMLPQAATEDDIRGQLQSHGVQAREVRLMRNKSSGQSRGFAFVEFSHLQDATRWMEANQHSLNILGQKVSMHYSDPKPKINEDWLCNKCGVQNFKRREKCFKCGVPKSEAEQKLPLGTRLDQQTLPLGGRELSQGLLPLPQPYQAQGVLASQALSQGSEPSSENANDTIILRNLNPHSTMDSILGALAPYAVLSSSNVRVIKDKQTQLNRGFAFIQLSTIVEAAQLLQILQALHPPLTIDGKTINVEFAKGSKRDMASNEGSRISAASVASTAIAAAQWAISQASQGGEGTWATSEEPPVDYSYYQQDEGYGNSQGTESSLYAHGYLKDRVLDGWDGALLLSASPLPSQRGLDQIKLRW

SEQ ID NO: 862792 - protein, 157 aa, Homo sapiens
QSPRGGSTAAYPQPLCEWLGQVRGSGARGRGGRPTTHAVHRPCRDFEQPTRDGLGSDNIGSRMLQAMGWKEGSGLGRKKQGIVTPIEAESQAVLSHPPAPLTASPTSLTEPASLTQAQTRVRGSGLGARGSSYGVTSTESYKETLHKTMVTRFNEAQ

SEQ ID NO: 862793 - protein, 69 aa, Homo sapiens
MGSGQVASGTASPAGSLHKVFPHIPSSLLLPQYYYNAQSQQYLYWDGERRTYVPALEQSADGHKETGAP

SEQ ID NO: 862794 - protein, 853 aa, Homo sapiens
MEYERRGGRGDRTGRYGATDRSQDDGGENRSRDHDYRDMDYRSYPREYGSQEGKHDYDDSSEEQSAEIRGQLQSHGVQAREVRLMRNKSSGQSRGFAFVEFSHLQDATRWMEANQHSLNILGQKVSMHYSDPKPKINEDWLCNKCGVQNFKRREKCFKCGVPKSEAEQKLPLGTRLDQQTLPLGGRELSQGLLPLPQPYQAQGVLASQALSQGSEPSSENANDTIILRNLNPHSTMDSILGALAPYAVLSSSNVRVIKDKQTQLNRGFAFIQLSTIVEAAQLLQILQALHPPLTIDGKTINVEFAKGSKRDMASNEGSRISAASVASTAIAAAQWAISQASQGGEGTWATSEEPPVDYSYYQQDEGYGNSQGTESSLYAHGYLKGTKGPGITGTKGDPTGAGPEASLEPGADSVSMQAFSRAQPGAAPGIYQQSAEASSSQGTAANSQSYTIMSPAVLKSELQSPTHPSSALPPATSPTAQESYSQYPVPDVSTYQYDETSGYYYDPQTGLYYDPNSQYYYNAQSQQYLYWDGERRTYVPALEQSADGHKETGAPSKEGKEKKEKHKTKTAQQIAKDMERWARSLNKQKENFKNSFQPISSLRDDERRESATADAGYAILEKKGALAERQHTSMDLPKLASDDRPSPPRGLVAAYSGESDSEEEQERGGPEREEKLTDWQKLACLLCRRQFPSKEALIRHQQLSGLHKQNLEIHRRAHLSENELEALEKNDMEQMKYRDRAAERREKYGIPEPPEPKRRKYGGISTASVDFEQPTRDGLGSDNIGSRMLQAMGWKEGSGLGRKKQGIVTPIEAQTRVRGSGLGARGSSYGVTSTESYKETLHKTMVTRFNEAQ

SEQ ID NO: 862795 - protein, 930 aa, Homo sapiens; identical to SEQ ID NO: 862783

SEQ ID NO: 862796 - protein, 729 aa, Homo sapiens
PGIYQQSAEASSSQALLYNEVWRQNFKRREKCFKCGVPKSEAEQKLPLGTRLDQQTLPLGGRELSQGLLPLPQPYQAQGVLASQALSQGSEPSSENANDTIILRNLNPHSTMDSILGALAPYAVLSSSNVRVIKDKQTQLNRGFAFIQLSTIVEAAQLLQILQALHPPLTIDGKTINVEFAKGSKRDMASNEGSRISAASVASTAIAAAQWAISQASQGGEGTWATSEEPPVDYSYYQQDEGYGNSQGTESSLYAHGYLKGTKGPGITGTKGDPTGAGPEASLEPGADSVSMQAFSRAQPGAAPGIYQQSAEASSSQGTAANSQSYTIMSPAVLKSELQSPTHPSSALPPATSPTAQESYSQYPVPDVSTYQYDETSGYYYDPQTGLYYDPNSQYYYNAQSQQYLYWDGERRTYVPALEQSADGHKETGAPSKEGKEKKEKHKTKTAQQIAKDMERWARSLNKQKENFKNSFQPISSLRDDERRESATADAGYAILEKKGALAERQHTSMDLPKLASDDRPSPPRGLVAAYSGESDSEEEQERGGPEREEKLTDWQKLACLLCRRQFPSKEALIRHQQLSGLHKQNLEIHRRAHLSENELEALEKNDMEQMKYRDRAAERREKYGIPEPPEPKRRKYGGISTASVDFEQPTRDGLGSDNIGSRMLQAMGWKEGSGLGRKKQGIVTPIEAQTRVRGSGLGARGSSYGVTSTESYKETLHKTMVTRFNEAQ

SEQ ID NO: 862797 - protein, 438 aa, Homo sapiens [sequence omitted]

SEQ ID NO: 862798 - protein, 930 aa, Homo sapiens
  misc_feature (831)..(833): Xaa can be any naturally occurring amino acid
  misc_feature (841)..(841): Xaa can be any naturally occurring amino acid
  misc_feature (854)..(854): Xaa can be any naturally occurring amino acid
  misc_feature (856)..(856): Xaa can be any naturally occurring amino acid
  misc_feature (858)..(858): Xaa can be any naturally occurring amino acid
  misc_feature (860)..(860): Xaa can be any naturally occurring amino acid
  misc_feature (864)..(865): Xaa can be any naturally occurring amino acid
  misc_feature (868)..(868): Xaa can be any naturally occurring amino acid
  misc_feature (871)..(871): Xaa can be any naturally occurring amino acid
  misc_feature (876)..(876): Xaa can be any naturally occurring amino acid
MEYERRGGRGDRTGRYGATDRSQDDGGENRSRDHDYRDMDYRSYPREYGSQEGKHDYDDSSEEQSAEDSYEASPGSETQRRRRRRHRHSPTGPPGFPRDGDYRDQDYRTEQGEEEEEEEDEEEEEKASNIVMLRMLPQAATEDDIRGQLQSHGVQAREVRLMRNKSSGQSRGFAFVEFSHLQDATRWMEANQHSLNILGQKVSMHYSDPKPKINEDWLCNKCGVQNFKRREKCFKCGVPKSEAEQKLPLGTRLDQQTLPLGGRELSQGLLPLPQPYQAQGVLASQALSQGSEPSSENANDTIILRNLNPHSTMDSILGALAPYAVLSSSNVRVIKDKQTQLNRGFAFIQLSTIVEAAQLLQILQALHPPLTIDGKTINVEFAKGSKRDMASNEGSRISAASVASTAIAAAQWAISQASQGGEGTWATSEEPPVDYSYYQQDEGYGNSQGTESSLYAHGYLKGTKGPGITGTKGDPTGAGPEASLEPGADSVSMQAFSRAQPGAAPGIYQQSAEASSSQGTAANSQSYTIMSPAVLKSELQSPTHPSSALPPATSPTAQESYSQYPVPDVSTYQYDETSGYYYDPQTGLYYDPNSQYYYNAQSQQYLYWDGERRTYVPALEQSADGHKETGAPSKEGKEKKEKHKTKTAQQIAKDMERWARSLNKQKENFKNSFQPISSLRDDERRESATADAGYAILEKKGALAERQHTSMDLPKLASDDRPSPPRGLVAAYSGESDSEEEQERGGPEREEKLTDWQKLACLLCRRQFPSKEALIRHQQLSGLHKQNLEIHRRAHLSENELEALEKNDMEQMKYRDRAAERREKYGIPEPXXXKKKKYSKXSTTYVNFEKKKQXKXKXKXISNXXQQXMSXKKSSXLDPKNQGILTPFEAQTRVRGPRLGARGSSYGVTSTESYKETLHKTMVTRFNEAQ

SEQ ID NO: 862799 - protein, 172 aa, Homo sapiens
MKDVVVVVTGLAAMEPLTARRMMVGRTAAETTTTGTWTTVHILASMAARRASMTMTTHLRSRVRRIPTRPPRAPRLSVGGGGGTGFPRDGDYRDQDYRTEQGEEEEEEEDEEEEEKASNIVMLRMLPQAATEDDIRGQLQSHGVQAREVRLMRNKSSALPQHPGPEGVDALQ

SEQ ID NO: 862800 - protein, 291 aa, Homo sapiens
MEYERRGGRGDRTGRYGATDRSQDDGGENRSRDHDYRDMDYRSYPREYGSQEGKHDYDDSSEEQSAEDSYEASPGSETQRRRRRRHRHSPTGPPGFPRDGDYRDQDYRTEQGEEEEEEEDEEEEEKASNIVMLRMLPQAATEDDIRGQLQSHGVQAREVRLMRNKSSGQSRGFAFVEFSHLQDATRWMEANQHSLNILGQKVSMHYSDPKPKINEDWLCNKCGVPPKVGRVPGPPPRSRRSTTATTNRMRAMATARAQSLPSMPMATSRAPRALASLEPKGIPLEQVPRPP

SEQ ID NO: 862801 - protein, 76 aa, Homo sapiens
MHSTENNIRRFRRHLPPLPRGFPSWGTAGSLGDLFIQVWRVQWEIPAPSDGLACASQCGVQNFKRREKCFKCGVPK

SEQ ID NO: 862802 - protein, 105 aa, Homo sapiens
MVLGSSLGTPQPPGASGGVCNRVIPPPSCPPYPQGKGSLSPSPSDWMCLYPLMPQSLSEHPHSPPVGGGCSSTHPDLTVQGASPAIPPPILYPPFLGPHHCGRRG

SEQ ID NO: 862803 - protein, 434 aa, Homo sapiens
RSRRRWQGEVEAVERQRQQRVPGLRQQRGRRRAEAEVTKAAAAAAVSLTVAETKAAAADGERPGPGPLLVGCGRAAVGPARLPPPAAPPPAPPPGRRRGPGPARTQTAAAAAAGGVGGGGGAMGGLASGGDVEPGLPVEVRGSNGAFYKGFVKDVHEDSVTIFFENNWQSERQIPFGDVRLPPPADYNKEITEGDEVEVYSRANEQEPCGWWLARVRMMKGDFYVIEYAACDATYNEIVTLERLRPVNPNPLATKGSFFKVTMAVPEDLREACSNENVHKEFKKALGANCIFLNITNSELFILSTTEAPVKRASLLGDMHFRSLRTKLLLMSRNEEATKHLETSKQLAAAFQEEFTVREDLMGLAIGTHGANIQQARKVPGVTAIELGEETCTFRIYGETPEACRQARSYLEFSEDSVQVPRNLVGELVVCIYS

SEQ ID NO: 862804 - protein, 332 aa, Homo sapiens [sequence omitted]

SEQ ID NO: 862805 - protein, 333 aa, Homo sapiens
TTPQFKSARGRENISNAQALLEYHLSYLQEVEQLRLERLQIDEQLRQIGLGFRPPGSGRGSGGSDKAGYSTDESSSSSLHATRTYGGSYGGRGRGRRTGGPAYGPSSDVSTASETESEKREEPNRAGPGDRDPPTRGEESRRRPTGGRGRGPPPAPRPTSRYNSSSISSVLKDPDSNPYSLLDTSEPEPPVDSEPGEPPPASARRRRSRRRRTDEDRTVMDGGLESDGPNMTENGLEDESRPQRRNRSRRRRNRGNRTDGSISGDRQPVTVADYISRAESQSRQRPPLERTKPSEDSLSGQKGDSVSKLPKGPSENGELSAPLELGSMVNGVS

SEQ ID NO: 862806 - protein, 531 aa, Homo sapiens
RSRRRWQGEVEAVERQRQQRVPGLRQQRGRRRAEAEVTKAAAAAAVSLTVAETKAAAADGERPGPGPLLVGCGRAAVGPARLPPPAAPPPAPPPGRRRGPGPARTQTAAAAAAGGVGGGGGAMGGLASGGDVEPGLPVEVRGSNGAFYKGFVKDVHEDSVTIFFENNWQSERQIPFGDVRLPPPADYNKEITEGDEVEVYSRANEQEPCGWWLARVRMMKGDFYVIEYAACDATYNEIVTLERLRPVNPNPLATKGSFFKVTMAVPEDLREACSNENVHKEFKKALGANCIFLNITNSELFILSTTEAPVKRASLLGDMHFRSLRTKLLLMSRNEEATKHLETSKQLAAAFQEEFTVREDLMGLAIGTHGANIQQARKVPGVTAIELGEETCTFRIYGETPEACRQARSYLEFSEDSVQVPRNLVGKVIGKNGKVIQEIVDKSGVVRVRVEGDNDKKNPREEGMVPFIFVGTRENISNAQALLEYHLSYLQEVEQLRLERLQIDEQLRQIGLGFRPPGSGRGSGGSDKAGR

SEQ ID NO: 862807 - protein, 114 aa, Homo sapiens [sequence omitted]

SEQ ID NO: 862808 - protein, 137 aa, Homo sapiens
SELRSRHCTPAWATERDAISKKKQKVPDLSTQVLVVRGLQSGSSFLLISHSFPYLSYAKGRVPGTVRFYHHDSYSDFSFQTSKQLAAAFQEEFTVREDLMGLAIGTHGANIQQARKVPGVTAIELGEETCTFRIYGE

SEQ ID NO: 862809 - protein, 795 aa, Homo sapiens
RSRRRWQGEVEAVERQRQQRVPGLRQQRGRRRAEAEVTKAAAAAAVSLTVAETKAAAADGERPGPGPLLVGCGRAAVGPARLPPPAAPPPAPPPGRRRGPGPARTQTAAAAAAGGVGGGGGAMGGLASGGDVEPGLPVEVRGSNGAFYKGFVKDVHEDSVTIFFENNWQSERQIPFGDVRLPPPADYNKEITEGDEVEVYSRANEQEPCGWWLARVRMMKGDFYVIEYAACDATYNEIVTLERLRPVNPNPLATKGSFFKVTMAVPEDLREACSNENVHKEFKKALGANCIFLNITNSELFILSTTEAPVKRASLLGDMHFRSLRTKLLLMSRNEEATKHLETSKQLAAAFQEEFTVREDLMGLAIGTHGANIQQARKVPGVTAIELGEETCTFRIYGETPEACRQARSYLEFSEDSVQVPRNLVGKVIGKNGKVIQEIVDKSGVVRVRVEGDNDKKNPREEGMVPFIFVGTRENISNAQALLEYHLSYLQEVEQLRLERLQIDEQLRQIGLGFRPPGSGRGSGGSDKAGYSTDESSSSSLHATRTYGGSYGGRGRGRRTGGPAYGPSSDVSTASETESEKREEPNRAGPGDRDPPTRGEESRRRPTGGRGRGPPPAPRPTSRYNSSSISSVLKDPDSNPYSLLDTSEPEPPVDSEPGEPPPASARRRRSRRRRTDEDRTVMDGGLESDGPNMTENGLEDESRPQRRNRSRRRRNRGNRTDGSISGDRQPVTVADYISRAESQSRQRPPLERTKPSEDSLSGQKGDSVSKLPKGPSENGELSAPLELGSMVNGVS

SEQ ID NO: 862810 - protein, 572 aa, Homo sapiens
STLEDPHGADDYNEIVTLERLRPVNPNPLATKGSFFKVTMAVPEDLREACSNENVHKEFKKALGANCIFLNITNSELFILSTTEAPVKRASLLGDMHFRSLRTKLLLMSRNEEATKHLETSKQLAAAFQEEFTVREDLMGLAIGTHGANIQQARKVPGVTAIELGEETCTFRIYGETPEACRQARSYLEFSEDSVQVPRNLVGKVIGKNGKVIQEIVDKSGVVRVRVEGDNDKKNPREEGMVPFIFVGTRENISNAQALLEYHLSYLQEVEQLRLERLQIDEQLRQIGLGFRPPGSGRGSGGSDKAGYSTDESSSSSLHATRTYGGSYGGRGRGRRTGGPAYGPSSDVSTASETESEKREEPNRAGPGDRDPPTRGEESRRRPTGGRGRGPPPAPRPTSRYNSSSISSVLKDPDSNPYSLLDTSEPEPPVDSEPGEPPPASARRRRSRRRRTDEDRTVMDGGLESDGPNMTENGLEDESRPQRRNRSRRRRNRGNRTDGSISGDRQPVTVADYISRAESQSRQRPPLERTKPSEDSLSGQKGDSVSKLPKGPSENGELSAPLELGSMVNGVS

SEQ ID NO: 862811 - protein, 775 aa, Homo sapiens
RSRRRWQGEVEAVERQRQQRVPGLRQQRGRRRAEAEVTKAAAAAAVSLTVAETKAAAADGERPGPGPLLVGCGRAAVGPARLPPPAAPPPAPPPGRRRGPGPARTQTAAAAAAGGVGGGGGAMGGLASGGDVEPGLPVEVRGSNGAFYKGFVKDVHEDSVTIFFENNWQSERQIPFGDVRLPPPADYNKEITEGDEVEVYSRANEQEPCGWWLARVRMMKGDFYVIEYAACDATYNEIVTLERLRPVNPNPLATKGSFFKVTMAVPEDLREACSNENVHKEFKKALGANCIFLNITNSELFILSTTEAPVKRASLLGDMHFRSLRTKLLLMSRNEEATKHLETSKQLAAAFQEEFTVREDLMGLAIGTHGANIQQARKVPGVTAIELGEETCTFRIYGETPEACRQARSYLEFSEDSVQVPRNLVGKVIGKNGKVIQEIVDKSGVVRVRVEGDNDKKNPREEGMVPFIFVGTRENISNAQALLEYHLSYLQEVEQLRLERLQIDEQLRQIGLGFRPPGSGRGSGGSDKAGYSTDESSSSSLHATRTYGGSYGGRGRGRRTGGPAYGPSSDVSTASETESEKREEPNRAGPGDRDPPTRGEESRRRPTGGRGRGPPPAPRPTSRYNSSSISSVLKDPDSNPYSLLDTSEPEPPVDSEPGEPPPASARRRRSRRRRTDEDRTVMDGGLESDGPNMTENGLEDESRPQRRNRSRRRRNRGNRTDGSISGDRQPVTVADYISRAESQSRQRPPLERTKPSEDSLSGQKRQLCLMEFRPV

SEQ ID NO: 862812 - protein, 434 aa, Homo sapiens; identical to SEQ ID NO: 862803

SEQ ID NO: 862813 - protein, 434 aa, Homo sapiens; identical to SEQ ID NO: 862803

SEQ ID NO: 862814 - protein, 791 aa, Homo sapiens
AGMACREGAGSRRARSNGCRLPRRGRRRGGRRRTVGPGPIHCRGRRALGPRVFRVMEALIPVINKLQDVFNTVGADIIQLPQIVVVGTQSSGKSSVLESLVGRDLLPRGTGIVTRRPLILQLVHVSQEDKRKTTGEENGVEAEEWGKFLHTKNKLYTDFDEIRQEIENETERISGNNKGVSPEPIHLKIFSPNVVNLTLVDLPGMTKVPVGDQPKDIELQIRELILRFISNPNSIILAVTAANTDMATSEALKISREVDPDGRRTLAVITKLDLMDAGTDAMDVLMGRVIPVKLGIIGVVNRSQLDINNKKSVTDSIRDEYAFLQKKYPSLANRNGTKYLARTLNRLLMHHIRDCLPELKTRINVLAAQYQSLLNSYGEPVDDKSATLLQLITKFATEYCNTIEGTAKYIETSELCGGARICYIFHETFGRTLESVDPLGGLNTIDILTAIRNATGPRPALFVPEVSFELLVKRQIKRLEEPSLRCVELVHEEMQRIIQHCSNYSTQELLRFPKLHDAIVEVVTCLLRKRLPVTNEMVHNLVAIELAYINTKHPDFADACGLMNNNIEEQRRNRLARELPSAVSRDKSSKVPSALAPASQEPSPAASAEADGKLIQDSRRETKNVASGGGGVGDGVQEPTTGNWRGMLKTSKAEELLAEEKSKPIPIMPASPQKGHAVNLLDVPVPVARKLSAREQRDCEVIERLIKSYFLIVRKNIQDSVPKAVMHFLVNHVKDTLQSELVGQLYKSSLLDDLLTESEDMAQRRKEAADMLKALQGASQIIAEIRETHLW

SEQ ID NO: 862815 - protein, 791 aa, Homo sapiens; identical to SEQ ID NO: 862814

SEQ ID NO: 862816 - protein, 791 aa, Homo sapiens; identical to SEQ ID NO: 862814

SEQ ID NO: 862817 - protein, 791 aa, Homo sapiens; identical to SEQ ID NO: 862814

SEQ ID NO: 862818 - protein, 791 aa, Homo sapiens; identical to SEQ ID NO: 862814

SEQ ID NO: 862819 - protein, 791 aa, Homo sapiens; identical to SEQ ID NO: 862814

SEQ ID NO: 862820 - protein, 763 aa, Homo sapiens
MACREGAGSRRARSNGCRLPRRGRRRGGRRRTVGPGPIHCRGRRALGPRVFRVMEALIPVINKLQDVFNTVGADIIQLPQIVVVGTQSSGKSSVLESLVGRDLLPRGTGIVTRRPLILQLVHVSQEDKRKTTGEENGVEAEEWGKFLHTKNKLYTDFDEIRQEIENETERISGNNKGVSPEPIHLKIFSPNVVNLTLVDLPGMTKVPVGDQPKDIELQIRELILRFISNPNSIILAVTAANTDMATSEALKISREVDPDGRRTLAVITKLDLMDAGTDAMDVLMGRVIPVKLGIIGVVNRSQLDINNKKSVTDSIRDEYAFLQKKYPSLANRNGTKYLARTLNRLLMHHIRDCLPELKTRINVLAAQYQSLLNSYGEPVDDKSATLLQLITKFATEYCNTIEGTAKYIETSELCGGARICYIFHETFGRTLESVDPLGGLNTIDILTAIRNATGPRPALFVPEVSFELLVKRQIKRLEEPSLRCVELVHEEMQRIIQHCSNYSTQELLRFPKLHDAIVEVVTCLLRKRLPVTNEMVHNLVAIELAYINTKHPDFADACGLMNNNIEEQRRNRLARELPSAVSRDKLIQDSRRETKNVASGGGGVGDGVQEPTTGNWRGMLKTSKAEELLAEEKSKPIPIMPASPQKGHAVNLLDVPVPVARKLSAREQRDCEVIERLIKSYFLIVRKNIQDSVPKAVMHFLVNHVKDTLQSELVGQLYKSSLLDDLLTESEDMAQRRKEAADMLKALQGASQIIAEIRETHLW

SEQ ID NO: 862821 - protein, 791 aa, Homo sapiens; identical to SEQ ID NO: 862814

SEQ ID NO: 862822 - protein, 690 aa, Homo sapiens
AGMACREGAGSRRARSNGCRLPRRGRRRGGRRRTVGPGPIHCRGRRALGPRVFRVMEALIPVINKLQDVFNTVGADIIQLPQIVVVGTQSSGKSSVLESLVGRDLLPRGTGIVTRRPLILQLVHVSQEDKRKTTGEENGVEAEEWGKFLHTKNKLYTDFDEIRQEIENETERISGNNKGVSPEPIHLKIFSPNVVNLTLVDLPGMTKVPVGDQPKDIELQIRELILRFISNPNSIILAVTAANTDMATSEALKISREVDPDGRRTLAVITKLDLMDAGTDAMDVLMGRVIPVKLGIIGVVNRSQLDINNKKSVTDSIRDEYAFLQKKYPSLANRNGTKYLARTLNRLLMHHIRDCLPELKTRINVLAAQYQSLLNSYGEPVDDKSATLLQLITKFATEYCNTIEGTAKYIETSELCGGARICYIFHETFGRTLESVDPLGGLNTIDILTAIRNATGPRPALFVPEVSFELLVKRQIKRLEEPSLRCVELVHEEMQRIIQHCSNYSTQELLRFPKLHDAIVEVVTCLLRKRLPVTNEMVHNLVAIELAYINTKHPDFADACGLMNNNIEEQRRNRLARELPSAVSRDKSSKVPSALAPASQEPSPAASAEADGKLIQDSRRETKNVASGGGGVGDGVQEPTTGNWRGMLKTSKAEELLAEEKSKPIPIMPASPQKGHAVNLLDVVSHDNLV

SEQ ID NO: 862823 - protein, 811 aa, Homo sapiens
AGMACREGAGSRRARSNGCRLPRRGRRRGGRRRTVGPGPIHCRGRRALGPRVFRVMEALIPVINKLQDVFNTVGADIIQLPQIVVVGTQSSGKSSVLESLVGRDLLPRGTGIVTRRPLILQLVHVSQEDKRKTTGEENGVEAEEWGKFLHTKNKLYTDFDEIRQEIENETERISGNNKGVSPEPIHLKIFSPNVVNLTLVDLPGMTKDTTLYRFISSLTGHSFSVSFAVSSHLPNVYTVPVGDQPKDIELQIRELILRFISNPNSIILAVTAANTDMATSEALKISREVDPDGRRTLAVITKLDLMDAGTDAMDVLMGRVIPVKLGIIGVVNRSQLDINNKKSVTDSIRDEYAFLQKKYPSLANRNGTKYLARTLNRLLMHHIRDCLPELKTRINVLAAQYQSLLNSYGEPVDDKSATLLQLITKFATEYCNTIEGTAKYIETSELCGGARICYIFHETFGRTLESVDPLGGLNTIDILTAIRNATGPRPALFVPEVSFELLVKRQIKRLEEPSLRCVELVHEEMQRIIQHCSNYSTQELLRFPKLHDAIVEVVTCLLRKRLPVTNEMVHNLVAIELAYINTKHPDFADACGLMNNNIEEQRRNRLARELPSAVSRDKSSKVPSALAPASQEPSPAASAEADGKVASGGGGVGDGVQEPTTGNWRGMLKTSKAEELLAEEKSKPIPIMPASPQKGHAVNLLDVPVPVARKLSAREQRDCEVIERLIKSYFLIVRKNIQDSVPKAVMHFLVNHVKDTLQSELVGQLYKSSLLDDLLTESEDMAQRRKEAADMLKALQGASQIIAEIRETHLW

SEQ ID NO: 862824 - protein, 743 aa, Homo sapiens
AGMACREGAGSRRARSNGCRLPRRGRRRGGRRRTVGPGPIHCRGRRALGPRVFRVMEALIPVINKLQDVFNTVGADIIQLPQIVVVGTQSSGKSSVLESLVGRDLLPRGTGIVTRRPLILQLVHVSQEDKRKTTGEENGVEAEEWGKFLHTKNKLYTDFDEIRQEIENETERISGNNKGVSPEPIHLKIFSPNVVNLTLVDLPGMTKVPVGDQPKDIELQIRELILRFISNPNSIILAVTAANTDMATSEALKISREVDPDGRRTLAVITKLDLMDAGTDAMDVLMGRVIPVKLGIIGVVNRSQLDINNKKSVTDSIRDEYAFLQKKYPSLANRNGTKYLARTLNRLLMHHIRDCLPELKTRINVLAAQYQSLLNSYGEPVDDKSATLLQLITKFATEYCNTIEGTAKYIETSELCGGARICYIFHETFGRTLESVDPLGGLNTIDILTAIRNATGPRPALFVPEVSFELLVKRQIKRLEEPSLRCVELVHEEMQRIIQHCSNYSTQELLRFPKLHDAIVEVVTCLLRKRLPVTNEMVHNLVAIELAYINTKHPDFADACGLMNNNIEEQRRNRLARELPSAVSRDKVASGGGGVGDGVQEPTTGNWRGMLKTSKAEELLADSNYASQSTKRSCREPARCASSCCTKTIYCEVIERLIKSYFLIVRKNIQDSVPKAVMHFLVNHVKDTLQSELVGQLYKSSLLDDLLTESEDMAQRRKEAADMLKALQGASQIIAEIRETHLW

SEQ ID NO: 862825 - protein, 592 aa, Homo sapiens
AGMACREGAGSRRARSNGCRLPRRGRRRGGRRRTVGPGPIHCRGRRALGPRVFRVMEALIPVINKLQDVFNTVGADIIQLPQIVVVGTQSSGKSSVLESLVGRDLLPRGTGIVTRRPLILQLVHVSQEDKRKTTGEENGVEAEEWGKFLHTKNKLYTDFDEIRQEIENETERISGNNKGVSPEPIHLKIFSPNVVNLTLVDLPGMTKVPVGDQPKDIELQIRELILRFISNPNSIILAVTAANTDMATSEALKISREVDPDGRRTLAVITKLDLMDAGTDAMDVLMGRVIPVKLGIIGVVNRSQLDINNKKSVTDSIRDEYAFLQKKYPSLANRNGTKYLARTLNRLLMHHIRDCLPELKTRINVLAAQYQSLLNSYGEPVDDKSATLLQLITKFATEYCNTIEGTAKYIETSELCGGARICYIFHETFGRTLESVDPLGGLNTIDILTAIRNATGPRPALFVPEVSFELLVKRQIKRLEEPSLRCVELVHEEMQRIIQHCSNYSTQELLRFPKLHDAIVEVVTCLLRKRLPVTNEMVHNLVAIELAYINTKHPDFADACGLMNNNIEEQRRNRLARELPSAVSRDKVKKCF

SEQ ID NO: 862826 - protein, 791 aa, Homo sapiens; identical to SEQ ID NO: 862814

SEQ ID NO: 862827 - protein, 791 aa, Homo sapiens; identical to SEQ ID NO: 862814

SEQ ID NO: 862828 - protein, 752 aa, Homo sapiens
MACREGAGSRRARSNGCRLPRRGRRRGGRRRTVGPGPIHCRGRRALGPRVFRVMEALIPVINKLQDVFNTVGADIIQLPQIVVVGTQSSGKSSVLESLVGRDLLPRGTGIVTRRPLILQLVHVSQEDKRKTTGEENGVEAEEWGKFLHTKNKLYTDFDEIRQEIENETERISGNNKGVSPEPIHLKIFSPNVVNLTLVDLPGMTKVPVGDQPKDIELQIRELILRFISNPNSIILAVTAANTDMATSEALKISREVDPDGRRTLAVITKLDLMDAGTDAMDVLMGRVIPVKLGIIGVVNRSQLDINNKKSVTDSIRDEYAFLQKKYPSLANRNGTKYLARTLNRLLMHHIRDCLPELKTRINVLAAQYQSLLNSYGEPVDDKSATLLQLITKFATEYCNTIEGTAKYIETSELCGGARICYIFHETFGRTLESVDPLGGLNTIDILTAIRNATGPRPALFVPEVSFELLVKRQIKRLEEPSLRCVELVHEEMQRIIQHCSNYSTQELLRFPKLHDAIVEVVTCLLRKRLPVTNEMVHNLVAIELAYINTKHPDFADACGLMNNNIEEQRRNRLARELPSAVSRDKVASGGGGVGDGVQEPTTGNWRGMLKTSKAEELLAEEKSKPIPIMPASPQKGHAVNLLDVPVPVARKLSAREQRDCEVIERLIKSYFLIVRKNIQDSVPKAVMHFLVNHVKDTLQSELVGQLYKSSLLDDLLTESEDMAQRRKEAADMLKALQGASQIIAEIRETHLW

SEQ ID NO: 862829 - protein, 778 aa, Homo sapiens
MACREGAGSRRARSNGCRLPRRGRRRGGRRRTVGPGPIHCRGRRALGPRVFRVMEALIPVINKLQDVFNTVGADIIQLPQIVVVGTQSSGKSSVLESLVGRDLLPRGTGIVTRRPLILQLVHVSQEDKRKTTGEENGVEAEEWGKFLHTKNKLYTDFDEIRQEIENETERISGNNKGVSPEPIHLKIFSPNVVNLTLVDLPGMTKVPVGDQPKDIELQIRELILRFISNPNSIILAVTAANTDMATSEALKISREVDPDGRRTLAVITKLDLMDAGTDAMDVLMGRVIPVKLGIIGVVNRSQLDINNKKSVTDSIRDEYAFLQKKYPSLANRNGTKYLARTLNRLLMHHIRDCLPELKTRINVLAAQYQSLLNSYGEPVDDKSATLLQLITKFATEYCNTIEGTAKYIETSELCGGARICYIFHETFGRTLESVDPLGGLNTIDILTAIRNATGPRPALFVPEVSFELLVKRQIKRLEEPSLRCVELVHEEMQRIIQHCSNYSTQELLRFPKLHDAIVEVVTCLLRKRLPVTNEMVHNLVAIELAYINTKHPDFADACGLMNNNIEEQRRNRLARELPSAVSRDKSSKVPSALAPASQEPSPAASAEADGKVASGGGGVGDGVQEPTTGNWRGMLKTSKAEELLAEEKSKPIPIMPASPQKGHAVNLLDVPVPVARKLSAREQRDCEVIERLIKSYFLIVRKNIQDSVPKAVMHFLVNHVKDTLQSELVGQLYKSSLLDDLLTESEDMAQRRKEAADMLKALQGASQIIAEIRETHLW

SEQ ID NO: 862830 - protein, 791 aa, Homo sapiens; identical to SEQ ID NO: 862814

SEQ ID NO: 862831 - protein, 592 aa, Homo sapiens; identical to SEQ ID NO: 862825

SEQ ID NO: 862832 - protein, 793 aa, Homo sapiens
AGMACREGAGSRRARSNGCRLPRRGRRRGGRRRTVGPGPIHCRGRRALGPRVFRVMEALIPVINKLQDVFNTVGADIIQLPQIVVVGTQSSGKSSVLESLVGRDLLPRGTGIVTRRPLILQLVHVSQEDKRKTTGEENDPATWKNSRHLSKGVEAEEWGKFLHTKNKLYTDFDEIRQEIENETERISGNNKGVSPEPIHLKIFSPNVVNLTLVDLPGMTKVPVGDQPKDIELQIRELILRFISNPNSIILAVTAANTDMATSEALKISREVDPDGRRTLAVITKLDLMDAGTDAMDVLMGRVIPVKLGIIGVVNRSQLDINNKKSVTDSIRDEYAFLQKKYPSLANRNGTKYLARTLNRLLMHHIRDCLPELKTRINVLAAQYQSLLNSYGEPVDDKSATLLQLITKFATEYCNTIEGTAKYIETSELCGGARICYIFHETFGRTLESVDPLGGLNTIDILTAIRNATGPRPALFVPEVSFELLVKRQIKRLEEPSLRCVELVHEEMQRIIQHCSNYSTQELLRFPKLHDAIVEVVTCLLRKRLPVTNEMVHNLVAIELAYINTKHPDFADACGLMNNNIEEQRRNRLARELPSAVSRDKSSKVPSALAPASQEPSPAASAEADGKVASGGGGVGDGVQEPTTGNWRGMLKTSKAEELLAEEKSKPIPIMPASPQKGHAVNLLDVPVPVARKLSAREQRDCEVIERLIKSYFLIVRKNIQDSVPKAVMHFLVNHVKDTLQSELVGQLYKSSLLDDLLTESEDMAQRRKEAADMLKALQGASQIIAEIRETHLW

SEQ ID NO: 862833 - protein, 752 aa, Homo sapiens; identical to SEQ ID NO: 862828

SEQ ID NO: 862834 - protein, 761 aa, Homo sapiens
MACREGAGSRRARSNGCRLPRRGRRRGGRRRTVGPGPIHCRGRRALGPRVFRVMEALIPVINKLQDVFNTVGADIIQLPQIVVVGTQSSGKSSVLESLVGRDLLPRGTGIVTRRPLILQLVHVSQEDKRKTTGEENGVEAEEWGKFLHTKNKLYTDFDEIRQEIENETERISGNNKGVSPEPIHLKIFSPNVVNLTLVDLPGMTKVPVGDQPKDIELQIRELILRFISNPNSIILAVTAANTDMATSEALKISREVDPDGRRTLAVITKLDLMDAGTDAMDVLMGRVIPVKLGIIGVVNRSQLDINNKKSVTDSIRDEYAFLQKKYPSLANRNGTKYLARTLNRLLMHHIRDCLPELKTRINVLAAQYQSLLNSYGEPVDDKSATLLQLITKFATEYCNTIEGTAKYIETSELCGGARICYIFHETFGRTLESVDPLGGLNTIDILTAIRNATGPRPALFVPEVSFELLVKRQIKRLEEPSLRCVELVHEEMQRIIQHCSNYSTQELLRFPKLHDAIVEVVTCLLRKRLPVTNEMVHNLVAIELAYINTKHPDFADACGLMNNNIEEQRRNRLARELPSAVSRDKSSKVPSALAPASQEPSPAASAEADGKVASGGGGVGDGVQEPTTGNWRGMLKTSKAEELLAEEKSKPIPIMPASPQKGHAVNLLDVPVPVARKLSAREQRDCEVIERLIKSYFLIVRKNIQDSVPKAVMHFLVNHVKDTLQSELVGQLYKSSLLDDLLTESEDMAQRRKEAADMLKL

SEQ ID NO: 862835 - protein, 435 aa, Homo sapiens
AGMACREGAGSRRARSNGCRLPRRGRRRGGRRRTVGPGPIHCRGRRALGPRVFRVMEALIPVINKLQDVFNTVGADIIQLPQIVVVGTQSSGKSSVLESLVGRDLLPRGTGIVTRRPLILQLVHVSQEDKRKTTGEENGVEAEEWGKFLHTKNKLYTDFDEIRQEIENETERISGNNKGVSPEPIHLKIFSPNVVNLTLVDLPGMTKVPVGDQPKDIELQIRELILRFISNPNSIILAVTAANTDMATSEALKISREVDPDGRRTLAVITKLDLMDAGTDAMDVLMGRVIPVKLGIIGVVNRSQLDINNKKSVTDSIRDEYAFLQKKYPSLANRNGTKYLARTLNRLLMHHIRDCLPELKTRINVLAAQYQSLLNSYGEPVDDKSATLLQLITKFATEYCNTIEGTAKYIETSELCGGVEIDRPISTQVYFKRKA

SEQ ID NO: 862836 - protein, 194 aa, Homo sapiens
MEEKLKKTKIIFVVGGPGSGKGTQCEKIVQKYGYTHLSTGDLLRSEVSSGSARGKKLSEIMEKGQLVPLETVLDMLRDAMVAKVNTSKGFLIDGYPREVQQGEEFERRIGQPTLLLYVDAGPETMTQRLLKRGETSGRVDDNEETIKKRLETYYKATEPVIAFYEKRGIVRKVNAEGSVDSVFSQVCTHLDALK

SEQ ID NO: 862837 - protein, 243 aa, Homo sapiens
VAKPPLPGEAGDGPAQGLRGEGQGAQETRQDGTMGCCSSSDPRREDDLRAREKLKKTKIIFVVGGPGSGKGTQCEKIVQKYGYTHLSTGDLLRSEVSSGSARGKKLSEIMEKGQLVPLETVLDMLRDAMVAKVNTSKGFLIDGYPREVQQGEEFERRIGQPTLLLYVDAGPETMTQRLLKRGETSGRVDDNEETIKKRLETYYKATEPVIAFYEKRGIVRKVNAEGSVDSVFSQVCTHLDALK

SEQ ID NO: 862838 - protein, 194 aa, Homo sapiens; identical to SEQ ID NO: 862836

SEQ ID NO: 862839 - protein, 194 aa, Homo sapiens; identical to SEQ ID NO: 862836

SEQ ID NO: 862840 - protein, 234 aa, Homo sapiens
MEEKLKKTKIIFVVGGPGSGKGTQCEKIVQKYGYTHLSTGDLLRSEVSSGSARGKKLSEIMEKGQLVPLETVLDMLRDAMVAKVNTSKGFLIDGYPREVQQGEEFERRIGQPTLLLYVDAGPETMTQRLLKRGETSGRVDDNEETIKKRLETYYKATEPVIAFYEKRGIVRKVNAEGSVDSVFSICFFLFSCSTLSSSFLIFSSYSSLIRAFSLSSSTLWSSCIACVCFWISSS

SEQ ID NO: 862841 - protein, 194 aa, Homo sapiens; identical to SEQ ID NO: 862836

SEQ ID NO: 862842 - protein, 194 aa, Homo sapiens; identical to SEQ ID NO: 862836

SEQ ID NO: 862843 - protein, 138 aa, Homo sapiens
MRPQDHVFRLGAPSKAILSFFSSQWPVRCVFLHLEWRPGGSGDGGGVRSQARLAFPVPTSPCLCDHGQVTSPLRAPIPSRAKGDQTLPSRSSGSRRGGAPWYTRKNSHRSWEKSLSSECRRGEGKDIPGHRARGLSAP

SEQ ID NO: 862844 - protein, 455 aa, Homo sapiens
RVGPRTPEVVRRSLAAEGAGSRGLDCFRLARRSKMADISLDELIRKRGAAAKGRLNARPGVGGVRSRVGIQQGLLSQSTRTATFQQRFDARQKIGLSDARLKLGVKDAREKLLQKDARFRIKGKVQDAREMLNSRKQQTTVPQKPRQVADAREKISLKRSSPAAFINPPIGTVTPALKLTKTIQVPQQKAMAPLHPHPAGMRINVVNNHQAKQNLYDLDEDDDGIASVPTKQMKFAASGGFLHHMAGLSSSKLSMSKALPLTKVVQNDAYTAPALPSSIRTKALTNMSRTLVNKEEPPKELPAAEPVLSPLEGTKMTVNNLHPRVTEEDIVELFCVCGALKRARLVHPGVAEVVFVKKDDAITAYKKYNNRCLDGQPMKCNLHMNGNVITSDQPILLRLSDSPSMKKESELPRRVNSASSSNPPAEVDPDTILKALFKSSGASVTTQPTEFKIKL

SEQ ID NO: 862845 - protein, 421 aa, Homo sapiens
MADISLDELIRKRGAAAKGRLNARPGVGGVRSRVGIQQGLLSQSTRTATFQQRFDARQKIGLSDARLKLGVKDAREKLLQKDARFRIKGKVQDAREMLNSRKQQTTVPQKPRQVADAREKISLKRSSPAAFINPPIGTVTPALKLTKTIQVPQQKAMAPLHPHPAGMRINVVNNHQAKQNLYDLDEDDDGIASVPTKQMKFAASGGFLHHMAGLSSSKLSMSKALPLTKVVQNDAYTAPALPSSIRTKALTNMSRTLVNKEEPPKELPAAEPVLSPLEGTKMTVNNLHPRVTEEDIVELFCVCGALKRARLVHPGVAEVVFVKKDDAITAYKKYNNRCLDGQPMKCNLHMNGNVITSDQPILLRLSDSPSMKKESELPRRVNSASSSNPPAEVDPDTILKALFKSSGASVTTQPTEFKIKL

SEQ ID NO: 862846 - protein, 377 aa, Homo sapiens
RVGPRTPEVVRRSLAAEGAGSRGLDCFRLARRSKMADISLDELIRKRGAAAKGRLNARPGVGGVRSRVGIQQGLLSQSTRTATFQQRFDARQKIGLSDARLKLGVKDAREKLLQKDARFRIKGKVQDAREMLNSRKQQTTVPQKPRQVADAREKISLKRSSPAAFINPPIGTVTPALKLTKTIQVPQQKAMAPLHPHPAGMRINVVNNHQAKQNLYDLDEDDDGIASVPTKQMKFAASGGFLHHMAGLSSSKLSMSKALPLTKVVQNDAYTAPALPSSIRTKALTNMSRTLVNKEEPPKELPAAEPVLSPLEGTKMTVNNLHPRVTEEDIVELFCVCGALKRARLVHPGVAEVVFVKKDDAITAYKKYNNRCLDAAE

SEQ ID NO: 862847 - protein, 397 aa, Homo sapiens
RVGPRTPEVVRRSLAAEGAGSRGLDCFRLARRSKMADISLDELIRKRGAAAKGRLNARPGVGGVRSRVGIQQGLLSQSTRTATFQQRFDARQKIGLSDARLKLGVKDAREKLLQKDARFRIKGKVQDAREMLNSRKQQTTVPQKPRQVADAREKISLKRSSPAAFINPPIGTVTPALKLTKTIQVPQQKAMAPLHPHPAGMRINVVNNHQAKQNLYDLDEDDDGIASVPTKQMKFAASGGFLHHMAGLSSSKLSMSKALPLTKVVQNDAYTAPALPSSIRTKALTNMSRTLVNKEEPPKELPAAEPVLSPLEGTKMTVNNLHPRVTEEDIVELFCVCGALKRARLVHPGVAEVVFVKKDDAITAYKKYNNRCLDGQPMKCNLHMNGNVITSDQPILL

SEQ ID NO: 862848 - protein, 477 aa, Homo sapiens
RVGPRTPEVVRRSLAAEGAGSRGLDCFRLARRSKMADISLDELIRKRGAAAKGRLNARPGVGGVRSRVGIQQGLLSQSTRTATFQQRFDARQKIGLSDARLKLGVKDAREKLLQKDARFRIKGKVQDAREMLNSRKQQTTVPQKPRQVADAREKISLKRSSPAAFINPPIGTVTPALKLTKTIQVPQQKAMAPLHPHPAGMRINVVNNHQAKQNLYDLDEDDDGIASVPTKQMKFAASGGFLHHMGPGLSRIRLLKSAIKGTISLLRAGLSSSKLSMSKALPLTKVVQNDAYTAPALPSSIRTKALTNMSRTLVNKEEPPKELPAAEPVLSPLEGTKMTVNNLHPRVTEEDIVELFCVCGALKRARLVHPGVAEVVFVKKDDAITAYKKYNNRCLDGQPMKCNLHMNGNVITSDQPILLRLSDSPSMKKESELPRRVNSASSSNPPAEVDPDTILKALFKSSGASVTTQPTEFKIKL

SEQ ID NO: 862849 - protein, 108 aa, Homo sapiens
MPHPSSLSLLGVFAGRGLCCEPSRFSPRLALNHTLVLCSRQLSSGWAFERLSLPLCSAWVWSLFEWKRSVCSWLSISGLSCLQDSGQGCLEAYIQLPPRGTVCSHLCE

SEQ ID NO: 862850 - protein, 455 aa, Homo sapiens; identical to SEQ ID NO: 862844

SEQ ID NO: 862851 - protein, 455 aa, Homo sapiens; identical to SEQ ID NO: 862844

SEQ ID NO: 862852 - protein, 455 aa, Homo sapiens; identical to SEQ ID NO: 862844

SEQ ID NO: 862853 - protein, 455 aa, Homo sapiens; identical to SEQ ID NO: 862844

SEQ ID NO: 862854 - protein, 455 aa, Homo sapiens; identical to SEQ ID NO: 862844

SEQ ID NO: 862855 - protein, 414 aa, Homo sapiens
RVGPRTPEVVRRSLAAEGAGSRGLDCFRLARRSKMADISLDELIRKRGAAAKGRLNARPGVGGVRSRVGIQQGLLSQSTRTATFQQRFDARQKIGLSDARLKLGVKDAREKLLQKDARFRIKGKVQDAREMLNSRKQQTTVPQKPRQVADAREKISLKRSSPAAFINPPIGTVTPALKLTKTIQVPQQKAMAPLHPHPAGMRINVVNNHQAKQNLYDLDEDDDGIASVPTKQMKFAASGGFLHHMAGLSSSKLSMSKALPLTKVVQNDAYTAPALPSSIRTKALTNMSRTLVNKEEPPKELPAAEPVLSPLEGTKMTVNNLHPRVTEEDIVELFCVCGALKRARLVHPGVAEVVFVKKDDAITAYKKYNNRCLDGQPMKCNLHMNGNVITSDQPILLAATWPSGAGAIGDHLVH

SEQ ID NO: 862856 - protein, 115 aa, Homo sapiens
QSVVRSQNLDTLERSNRMNDLGNISRDSWAVYLKYVLGMGQDIKQSLDKFLILKYFLMVLRCIEPAISNYVFNEFLVVLIICHVWDLEPSSAVPFIGLELNHSFFDLEVKAMGRS

SEQ ID NO: 862857 - protein, 343 aa, Homo sapiens
RVGPRTPEVVRRSLAAEGAGSRGLDCFRLARRSKMADISLDELIRKRGAAAKGRLNARPGVGGVRSRVGIQQGLLSQSTRTATFQQRFDARQKIGLSDARLKLGVKDAREKLLQKDARFRIKGKVQDAREMLNSRKQQTTVPQKPRQVADAREKISLKRSSPAAFINPPIGTVTPALKLTKTIQVPQQKAMAPLHPHPAGMRINVVNNHQAKQNLYDLDEDDDGIASVPTKQMKFAASGGFLHHMAGLSSSKLSMSKALPLTKVVQNDAYTAPALPSSIRTKALTNMSRTLVNKEEPPKELPAAEPVLSPLEGTKMTVLLHFPCLYVTHLCLLCRRRGRGIKR

SEQ ID NO: 862858 - protein, 252 aa, Homo sapiens
RVGPRTPEVVRRSLAAEGAGSRGLDCFRLARRSKMADISLDELIRKRGAAAKGRLNARPGVGGVRSRVGIQQGLLSQSTRTATFQQRFDARQKIGLSDARLKLGVKDAREKLLQKDARFRIKGKVQDAREMLNSRKQQTTVPQKPRQVADAREKISLKRSSPAAFINPPIGTVTPALKLTKTIQVPQQKAMAPLHPHPAGMRINVVNNHQAKQNLYDLDEDDDGIASVPTKQMKFAASGGFLHHMGPGLSSN

SEQ ID NO: 862859 - protein, 196 aa, Homo sapiens
RVGPRTPEVVRRSLAAEGAGSRGLDCFRLARRSKMADISLDELIRKRGAAAKGRLNARPGVGGVRSRVGIQQGLLSQSTRTATFQQRFDARQKIGLSDARLKLGVKDAREKLLQKDARFRIKGKVQDAREMLNSRKQQTTVPQKPRQVADAREKISLKRSSPAAFINPPIGTVTPALKLTKTIQVSCGFCHEFPES

SEQ ID NO: 862860 - protein, 299 aa, Homo sapiens
QERCSECRHSGVNFSDAGQECQDHIPGPLALQKRGAAAKGRLNARPGVGGVRSRVGIQQGLLSQSTRTATFQQRFDARQKIGLSDARLKLGVKDAREKLLQKDARFRIKGKVQDAREMLNSRKQQTTVPQKPRQVADAREKISLKRSSPAAFINPPIGTVTPALKLTKTIQVPQQKAMAPLHPHPAGMRINVVNNHQAKQNLYDLDEDDDGIASVPTKQMKFAASGGFLHHMVWHFMFSYTACLIRQVGEVVLNRTCCFFCFETTSRSSPPGCWSAMAQSWLTATSVSWVQAIILPQPP

SEQ ID NO: 862861 - protein, 223 aa, Homo sapiens [sequence omitted]

SEQ ID NO: 862862 - protein, 442 aa, Homo sapiens
RVGPRTPEVVRRSLAAEGAGSRGLDCFRLARRSKMADISLDELIRKRGAAAKGRLNARPGVGGVRSRVGIQQGLLSQSTRTATFQQRFDARQKIGLSDARLKLGVKDAREKLLQKDARFRIKGKVQDAREMLNSRKQQTTVPQKPRQVADAREKISLKRSSPAAFINPPIGTVTPALKLTKTIQVPQQKAMAPLHPHPAGMRINVVNNHQAKQNLYDLDEDDDGIASVPTKQMKFAASGGFLHHMAGLSSSKLSMSKALPLTKVVQNDAYTAPALPSSIRTKALTNMSRTLVNKEEPPKELPAAEPVLSPLEGTKMTVNNLHPRVTEEDIVELFCVCGALKRARLVHPGVAEVVFVKKDDAITAYKKYNNRCLDGQPMKCNLHMNGNVITSDQPILLRLSDSPSMKKESELPRRVALFPQGKAYDQWAIGLETPDCGKGCQG

SEQ ID NO: 862863 - protein, 455 aa, Homo sapiens; identical to SEQ ID NO: 862844

SEQ ID NO: 862864 - protein, 455 aa, Homo sapiens; identical to SEQ ID NO: 862844

SEQ ID NO: 862865 - protein, 455 aa, Homo sapiens; identical to SEQ ID NO: 862844

SEQ ID NO: 862866 - protein, 455 aa, Homo sapiens; identical to SEQ ID NO: 862844

SEQ ID NO: 862867 - protein, 455 aa, Homo sapiens; identical to SEQ ID NO: 862844

SEQ ID NO: 862868 - protein, 378 aa, Homo sapiens
RVGPRTPEVVRRSLAAEGAGSRGLDCFRLARRSKMADISLDELIRKRGAAAKGRLNARPGVGGVRSRVGIQQGLLSQSTRTATFQQRFDARQKIGLSDARLKLGVKDAREKLLQKDARFRIKGKVQDAREMLNSRKQQTTVPQKPRQVADAREKISLKRSSPAAFINPPIGTVTPALKLTKTIQVPQQKAMAPLHPHPAGMRINVVNNHQAKQNLYDLDEDDDGIASVPTKQMKFAASGGFLHHMAGLSSSKLSMSKALPLTKVVQNDAYTAPALPSSIRTKALTNMSRTLVNKEEPPKELPAAEPVLSPLEGTKMTVNNLHPRVTEEDIVELFCVCGALKRARLVHPGVAEVLLHFPCLYVTHLCLLCRRRGRGIKR

SEQ ID NO: 862869 - protein, 252 aa, Homo sapiens; identical to SEQ ID NO: 862858

SEQ ID NO: 862870 - protein, 312 aa, Homo sapiens
RVGPRTPEVVRRSLAAEGAGSRGLDCFRLARRSKMADISLDELIRKRGAAAKGRLNARPGVGGVRSRVGIQQGLLSQSTRTATFQQRFDARQKIGLSDARLKLGVKDAREKLLQKDARFRIKGKVQDAREMLNSRKQQTTVPQKPRQVADAREKISLKRSSPAAFINPPIGTVTPALKLTKTIQVPQQKAMAPLHPHPAGMRINVVNNHQAKQNLYDLDEDDDGIASVPTKQMKFAASGGFLHHMVWHFMFSYTACLIRQVGEVVLNRTCCFFCFETTSRSSPPGCWSAMAQSWLTATSVSWVQAIILPQPP

SEQ ID NO: 862871 - protein, 319 aa, Homo sapiens
MFISGSVAGSSDSRVPADADININSIKDYKINSNPYFSLMVRVNSDGGKYPELSLEKLLDREEQRSHSLILTALDGGDPPRSATAHIEISVKDTNDNPPVFSRDEYRISLSENLPPGSPVLQVTATDQDEGVNAEINYYFRSTAQSTKHMFSLDEKTGMIKNNQSFDFEDVERYTMEVEAKDGGGLSTQCKVIIEILDENDNSPEIIITSLSDQILENSPPGMVVALFKTRDLDFGGNGEVRCNIETDIPFKIYFFFFPHLTVVLLAIGMFFTAWFFVYEVTSTKYTRDIYKELLISLVASLFMGFGVLFLLLWVGIYV

SEQ ID NO: 862872 - protein, 112 aa, Homo sapiens
EGQARWFTPVIPALWEAEASGSGGQKFKTSLAQQELEAMSRYTSPVNPAVFPHLTVVLLAIGMFFTAWFFVYEVTSTKYTRDIYKELLISLVASLFMGFGVLFLLLWVGIYV

SEQ ID NO: 862873 - protein, 77 aa, Homo sapiens
NRRTTSPSMPLAPEALPFPVVLGACSCRRVLPVAERRISLRGAKFFPHLTVVLLAIGMFFTAWFFVYPFTEQPEDQH

SEQ ID NO: 862874 - protein, 143 aa, Homo sapiens
HDPLVDGDRLSGMGRDTRHLCLFPCPSYGFEPNVTLSSELTWPKASICLWDVPPRSVDAGIPWLYIYILRSQTPVTWRGCWEVSWLKGGQDPGLKTCCRQSTKQATRNQLWWLILRGVCSIALAPGAQGCRERRRKEGPLVLF

SEQ ID NO: 862875 - protein, 91 aa, Homo sapiens
MWGEPGRPPDKKLLETQPTRGGGRGTPQEENVHRRSKRVHIETSRVKNAEGGGVPPKRKRPRGKRGLCVTTPQEAWHGTRRTQKHRGDEKP

SEQ ID NO: 862876 - protein, 102 aa, Homo sapiens
MSALHYSAGVETYYMPPWRPDSGQLQIEAVEGLEALGRLDVLGLAQHADVHCHLEVVLLLAHKGVVAHRKVEALVRIHAVGFTFISVQEKEQTQPKRSTRPA

SEQ ID NO: 862877 - protein, 233 aa, Homo sapiens
MATGQKLMRAVRVFEFGGPEVLKLRSDIAVPIPKDHQVLIKVHACGVNPVETYIRSGTYSRKPLLPYTPGSDVAGVIEAVGDNASAFKKGDRVFTSSTISGGYAEYALAADHTVYKLPEKLDFKQGAAIGIPYFTAYRALIHRVQLCTNSPLMCDSWILFTLVPSFWYLKDSGFGRSTFAWSYKSVPRLPLSGIVENYEELMNCPTRLCWSIKKFGQKFSNNCYGPSLLGLIV

SEQ ID NO: 862878 - protein, 329 aa, Homo sapiens
MATGQKLMRAVRVFEFGGPEVLKLRSDIAVPIPKDHQVLIKVHACGVNPVETYIRSGTYSRKPLLPYTPGSDVAGVIEAVGDNASAFKKGDRVFTSSTISGGYAEYALAADHTVYKLPEKLDFKQGAAIGIPYFTAYRALIHSACVKAGESVLVHGASGGVGLAACQIARAYGLKILGTAGTEEGQKIVLQNGAHEVFNHREVNYIDKIKKYVGEKGIDIIIEMLANVNLSKDLSLLSHGGRVIVVGSRGTIEINPRDTMAKESSIIGVTLFSSTKEEFQQYAAALQAGMEIGWLKPVIGSQYPLEKVAEAHENIIHGSGATGKMILLL

SEQ ID NO: 862879 - protein, 329 aa, Homo sapiens; identical to SEQ ID NO: 862878

SEQ ID NO: 862880 - protein, 295 aa, Homo sapiens
MATGQKLMRAVRVFEFGGPEVLKLRSDIAVPIPKDHQVLIKVHACGVNPVETYIRSGTYSRKPLLPYTPGSDVAGVIEAVGDNASAFKKGDRVFTSSTISGGYAEYALAADHTVYKLPEKLDFKQGAAIGIPYFTAYRALIHSACVKAGESVLVHGASGGVGLAACQIARAYGLKILGTAGTEEGQKIVLQNGAHEVFNHREVNYIDKIKVVGSRGTIEINPRDTMAKESSIIGVTLFSSTKEEFQQYAAALQAGMEIGWLKPVIGSQYPLEKVAEAHENIIHGSGATGKMILLL

SEQ ID NO: 862881 - protein, 311 aa, Homo sapiens
MATGQKLMRAVRVFEFGGPEVLKLRSDIAVPIPKDHQVLIKVHACGVNPVETYIRSGTYSSVGDNASAFKKGDRVFTSSTISGGYAEYALAADHTVYKLPEKLDFKQGAAIGIPYFTAYRALIHSACVKAGESVLVHGASGGVGLAACQIARAYGLKILGTAGTEEGQKIVLQNGAHEVFNHREVNYIDKIKKYVGEKGIDIIIEMLANVNLSKDLSLLSHGGRVIVVGSRGTIEINPRDTMAKESSIIGVTLFSSTKEEFQQYAAALQAGMEIGWLKPVIGSQYPLEKVAEAHENIIHGSGATGKMILLL

SEQ ID NO: 862882 - protein, 257 aa, Homo sapiens
MATGQKLMRAVRVFEFGGPEVLKLRSDIAVPIPKDHQVLIKVHACGVNPVETYIRSGTYSRKPLLPYTPGSDVAGVIEAVGDNASAFKVGLAACQIARAYGLKILGTAGTEEGQKIVLQNGAHEVFNHREVNYIDKIKKYVGEKGIDIIIEMLANVNLSKDLSLLSHGGRVIVVGSRGTIEINPRDTMAKESSIIGVTLFSSTKEEFQQYAAALQAGMEIGWLKPVIGSQYPLEKVAEAHENIIHGSGATGKMILLL

SEQ ID NO: 862883 - protein, 263 aa, Homo sapiens
MATGQKLMRAVRVFEFGGPEVLKLRSDIAVPIPKDHQVLIKVHACGVNPVETYIRSGTYSRKPLLPYTPGSDVAGVIEAVGDNASAFKKGDRVFTSSTISGGYAEYALAADHTVYKLPEKLDFKQGAAIGIPYFTAYRALIHSACVKAGESVLVHGASGGVGLAACQIARAYGLKILGTAGTEEGQKIVLQNGAHEVFNHREVNYIDKIKKYVGEKGIDIIIEMLANVNLSKDLSLLSHGGRVICWQCLDSGHCLDSGHCLDS

SEQ ID NO: 862884 - protein, 254 aa, Homo sapiens
MATGQKLMRAVRVFEFGGPEVLKLRSDIAVPIPKDHQVLIKVHACGVNPVETYIRSGTYSRKPLLPYTPGSDVAGVIEAVGDNASAFKKGDRVFTSSTISGGYAEYALAADHTVYKLPEKLDFKQGAAIGIPYFTAYRALIHSACVKAGESVLVHGASGGVGLAACQIARAYGLKILGTAGTEEGQKIVLQNGAHEVFNHREVNYIDKIKKYVGEKGIDIIIEMLANVNLSKDLSLLSHGGRVICWQQRNYELG

SEQ ID NO: 862885 - protein, 125 aa, Homo sapiens
MATGQKLMRAVRVFEFGGPEVLKLRSDIAVPIPKDHQVLIKVHACGVNPVETYIRSGTYSRKPLLPYTPGSDVAGVIEAVGDNASAFKKGDRVFTSSTISGGYAEYALAADHTVYKLPEKLEFMM

SEQ ID NO: 862886 - protein, 329 aa, Homo sapiens; identical to SEQ ID NO: 862878

SEQ ID NO: 862887 - protein, 114 aa, Homo sapiens
MATGQKLMRAVRVFEFGGPEVLKLRSDIAVPIPKDHQVLIKVHACGVNPVETYIRSGTYSRKPLLPYTPGSDVAGVIEAVGDNASAFKCLCESWRECSGSWGKWRSWISSMPNC

SEQ ID NO: 862888 - protein, 329 aa, Homo sapiens; identical to SEQ ID NO: 862878

SEQ ID NO: 862889 - protein, 329 aa, Homo sapiens; identical to SEQ ID NO: 862878

SEQ ID NO: 862890 - protein, 311 aa, Homo sapiens; identical to SEQ ID NO: 862881

SEQ ID NO: 862891 - protein, 96 aa, Homo sapiens
GAGGEKLISHVQKLHKLYHILVNTALPAEVRFAQTLRLPFPELLRCDPWVTDSGSALGSFMVASSLPGGSHIEASGGRKGPNFLFVLNLGNSSAFA

SEQ ID NO: 862892 - protein, 128 aa, Homo sapiens
MSGGRRKEEPPQPQLANGALKVSVWSKVLRSDAAWEDKDEFLDVIYWFRQIIAVVLGVIWGVLPLRGFLGIAGFCLINAGVLYLYFSNYLQIDEEEYGGTWELTKEGFMTSFAFVHGHLDHLLHCHPL

SEQ ID NO: 862893 - protein, 128 aa, Homo sapiens; identical to SEQ ID NO: 862892

SEQ ID NO: 862894 - protein, 120 aa, Homo sapiens
MSGGRRKEEPPQPQLANGALKVSVWSKVLRSDAAWEDKDEFLDVIYWFRQIIAVVLGVIWGVLPLRGFLGIAGFCLINAGVLYLYFSNYLQIDEEEYGGTWELTKEGFMTSFAFVHGMCS

SEQ ID NO: 862895 - protein, 128 aa, Homo sapiens; identical to SEQ ID NO: 862892

SEQ ID NO: 862896 - protein, 128 aa, Homo sapiens; identical to SEQ ID NO: 862892

SEQ ID NO: 862897 - protein, 128 aa, Homo sapiens; identical to SEQ ID NO: 862892

SEQ ID NO: 862898 - protein, 128 aa, Homo sapiens; identical to SEQ ID NO: 862892

SEQ ID NO: 862899 - protein, 120 aa, Homo sapiens; identical to SEQ ID NO: 862894

SEQ ID NO: 862900 - protein, 32 aa, Homo sapiens
MFGTCSLLLQFCLINAGVLYLYFSNYLQIDEE

SEQ ID NO: 862901 - protein, 123 aa, Homo sapiens
MSGGRRKEEPPQPQLANGALKVSVWSKVLRSDAAWEDKDEFLDVIYWFRQIIAVVLGVIWGVLPLRGFLGIAGKGHCCSGAVCVCDDYKQRSSPTVALLGLVHHSSGASQVIWIIFYTAIHYD

SEQ ID NO: 862902 - protein, 165 aa, Homo sapiens
MSGGRRKEEPPQPQLANGALKVSVWSKVLRSDAAWEDKDEFLDVIYWFRQIIAVVLGVIWGVLPLRGFLGIAGKGHCCSGAVCVCDDYKQRSSPTVALLGLVHHSSGASQFCLINAGVLYLYFSNYLQIDEEEYGGTWELTKEGFMTSFAFVHGHLDHLLHCHPL

SEQ ID NO: 862903 - protein, 128 aa, Homo sapiens; identical to SEQ ID NO: 862892

SEQ ID NO: 862904 - protein, 128 aa, Homo sapiens; identical to SEQ ID NO: 862892

SEQ ID NO: 862905 - protein, 128 aa, Homo sapiens; identical to SEQ ID NO: 862892

SEQ ID NO: 862906 - protein, 128 aa, Homo sapiens; identical to SEQ ID NO: 862892

SEQ ID NO: 862907 - protein, 104 aa, Homo sapiens
MPLKLEEAISFLGPTTRSPGTREKLSVPQILPPERLLAFYLVALLRARWVTSSCTGATRENSARVLALVVSVQTGTVLIRKYGLNMCRQCFRQYAKDIGFIKLD

SEQ ID NO: 862908 - protein, 80 aa, Homo sapiens
PTPPGTHLGRCEARLMEEALLRARWVTSSCTGATRENSARVLALVVSVQTGTVLIRKYGLNMCRQCFRQYAKDIGFIKLD

SEQ ID NO: 862909 - protein, 78 aa, Homo sapiens
DPELNFFPPPPRFYLVALLRARWVTSSCTGATRENSARVLALVVSVQTGTVLIRKYGLNMCRQCFRQYAKDIGFIKLD

SEQ ID NO: 862910 - protein, 78 aa, Homo sapiens
  misc_feature (1)..(1): Xaa can be any naturally occurring amino acid
XGTRRNGHYGRGFYLVALLRARWVTSSCTGATRENSARVLALVVSVQTGTVLIRKYGLNMCRQCFRQYAKDIGFIKLD

SEQ ID NO: 862911 - protein, 70 aa, Homo sapiens
LLPRCTAESRWSQQCTEPPRKFGQGSRSCRVWFNTRGNRAPGIPGEKLIGASKLIVCPAQGWFFPPGSKA

SEQ ID NO: 862912 - protein, 70 aa, Homo sapiens
MRRGNSEDRKRAQETQKKREHRGNAKDSRTEGKRTRGTKGKNQIATKARAAEKRKQNKSVESTKKNDSRY

SEQ ID NO: 862913 - protein, 78 aa, Homo sapiens; identical to SEQ ID NO: 862909

SEQ ID NO: 862914 - protein, 78 aa, Homo sapiens; identical to SEQ ID NO: 862909

SEQ ID NO: 862915 - protein, 98 aa, Homo sapiens
RIPRVSAVDALRVAGARRAAVSRGKAGVPLRYRERHLELSEWPRKPSEGAFPGADGLLVVLVAALRRHTWHVEGGLYMAVFDLAIPAEQIIFHGGETT

SEQ ID NO: 862916 - protein, 107 aa, Homo sapiens [sequence omitted]

SEQ ID NO: 862917 - protein, 98 aa, Homo sapiens; identical to SEQ ID NO: 862915

SEQ ID NO: 862918 - protein, 98 aa, Homo sapiens; identical to SEQ ID NO: 862915

SEQ ID NO: 862919 - protein, 98 aa, Homo sapiens; identical to SEQ ID NO: 862915

SEQ ID NO: 862920 - protein, 98 aa, Homo sapiens; identical to SEQ ID NO: 862915

SEQ ID NO: 862921 - protein, 98 aa, Homo sapiens; identical to SEQ ID NO: 862915

SEQ ID NO: 862922 - protein, 104 aa, Homo sapiens
MRGPASSFYLVALLRARWVTSSCTGATRENSARVLALVVSVQTGTVLIRKYGLNMCRQCFRQYAKDIGFIKVGVCRRTPCCLGREGCGGYFFRERQTDRSSLEW

SEQ ID NO: 862923 - protein, 112 aa, Homo sapiens
MRGPASSFYLVALLRARWVTSSCTGATRENSARVLALVVSVQTGTVLIRKYGLNMCRQCFRQYAKDIGFIKEIGSPSVAQVEVQWRCYGSLQPRTPPGLRRSSCLGVPSSWD

SEQ ID NO: 862924 - protein, 78 aa, Homo sapiens; identical to SEQ ID NO: 862909

SEQ ID NO: 862925 - protein, 78 aa, Homo sapiens; identical to SEQ ID NO: 862910
  misc_feature (1)..(1): Xaa can be any naturally occurring amino acid

SEQ ID NO: 862926 - protein, 66 aa, Homo sapiens
PFLGALLRGRWVTSSCTGATRENSARVLALVVSVQTGTVLIRKYGLNMCRQCFRQYAKDIGFIKLD

SEQ ID NO: 862927 - protein, 73 aa, Homo sapiens
RGRGRVGFYLVALLRARWVTSSCTGATRENSARVLALVVSVQTGTVLIRKYGLNMCRQCFRQYAKDIGFIKLD

SEQ ID NO: 862928 - protein, 98 aa, Homo sapiens; identical to SEQ ID NO: 862915

SEQ ID NO: 862929 - protein, 78 aa, Homo sapiens; identical to SEQ ID NO: 862910
  misc_feature (1)..(1): Xaa can be any naturally occurring amino acid

SEQ ID NO: 862930 - protein, 78 aa, Homo sapiens; identical to SEQ ID NO: 862909

SEQ ID NO: 862931 - protein, 78 aa, Homo sapiens; identical to SEQ ID NO: 862909

SEQ ID NO: 862932 - protein, 98 aa, Homo sapiens; identical to SEQ ID NO: 862915

SEQ ID NO: 862933 - protein, 98 aa, Homo sapiens; identical to SEQ ID NO: 862915

SEQ ID NO: 862934 - protein, 98 aa, Homo sapiens; identical to SEQ ID NO: 862915

SEQ ID NO: 862935 - protein, 98 aa, Homo sapiens; identical to SEQ ID NO: 862915

SEQ ID NO: 862936 - protein, 98 aa, Homo sapiens; identical to SEQ ID NO: 862915

SEQ ID NO: 862937 - protein, 66 aa, Homo sapiens; identical to SEQ ID NO: 862926

SEQ ID NO: 862938 - protein, 98 aa, Homo sapiens; identical to SEQ ID NO: 862915

SEQ ID NO: 862939 - protein, 152 aa, Homo sapiens
QCDKMLGGDALVTDLLVDFCGSRSGVEIPRTPQLYVAHEIGTIKTVTPPEDRDSESGVAGGQGTLQEPGFGEASEAISVSRNRQPIPLLMNKENSTKTSKVELTLASPYMKQEKEEEKEGFSESDFSDGNTSSNAESWRNPSSEHLKFFNSQ

SEQ ID NO: 862940 - protein, 130 aa, Homo sapiens
MAEYGTLLQDLTNNITLEDLEQLKSACKEDIPSEKSEEITTGSAWFSFLESHNKLDKDNLSYIEHIFEISRRPDLLTMVVDYRTRVLKISEEDELDTKLTRIPSAKKYKDIIRQPSEEEIIKLAPPPKKA

SEQ ID NO: 862941 - protein, 141 aa, Homo sapiens
NRRKRWWGEGVMAEYGTLLQDLTNNITLEDLEQLKSACKEDIPSEKSEEITTGSAWFSFLESHNKLDKDNLSYIEHIFEISRRPDLLTMVVDYRTRVLKISEEDELDTKLTRIPSAKKYKDIIRQPSEEEIIKLAPPPKKA

SEQ ID NO: 862942 - protein, 130 aa, Homo sapiens; identical to SEQ ID NO: 862940

SEQ ID NO: 862943 - protein, 130 aa, Homo sapiens; identical to SEQ ID NO: 862940

SEQ ID NO: 862944 - protein, 130 aa, Homo sapiens; identical to SEQ ID NO: 862940

SEQ ID NO: 862945 - protein, 66 aa, Homo sapiens
EEDNERLGTRLGVIGLRLRGRKRRRRRQKRRRRRRREPRRRFRTLLRNRGLRSARALSAQLQRRHG

SEQ ID NO: 862946 - protein, 130 aa, Homo sapiens; identical to SEQ ID NO: 862940

SEQ ID NO: 862947 - protein, 130 aa, Homo sapiens; identical to SEQ ID NO: 862940

SEQ ID NO: 862948 - protein, 130 aa, Homo sapiens; identical to SEQ ID NO: 862940

SEQ ID NO: 862949 - protein, 130 aa, Homo sapiens; identical to SEQ ID NO: 862940

SEQ ID NO: 862950 - protein, 130 aa, Homo sapiens; identical to SEQ ID NO: 862940

SEQ ID NO: 862951 - protein, 130 aa, Homo sapiens; identical to SEQ ID NO: 862940

SEQ ID NO: 862952 - protein, 169 aa, Homo sapiens
MSSGGGKRSAGADGSRESSGRCENRTQDARPDAHSSVVIMAEYGTLLQDLTNNITLEDLEQLKSACKEDIPSEKSEEITTGSAWFSFLESHNKLDKDNLSYIEHIFEISRRPDLLTMVVDYRTRVLKISEEDELDTKLTRIPSAKKYKDIIRQPSEEEIIKLAPPPKKA

SEQ ID NO: 862953 - protein, 108 aa, Homo sapiens
MAEYGTLLQDLTNNITLEDLEQLKSACKEDIPSEKNNLSYIEHIFEISRRPDLLTMVVDYRTRVLKISEEDELDTKLTRIPSAKKYKDIIRQPSEEEIIKLAPPPKKA

SEQ ID NO: 862954 - protein, 103 aa, Homo sapiens
MAEYGTLLQDLTNNITLEDLEQLKSACKEDIPSEKSEEITTGSAWFSFLESHNKLDKDNLSYIEHIFEISRRPDLLTMVVDYRTRVLKISHLVPLLKGMGVRG

SEQ ID NO: 862955 - protein, 130 aa, Homo sapiens; identical to SEQ ID NO: 862940

SEQ ID NO: 862956 - protein, 130 aa, Homo sapiens; identical to SEQ ID NO: 862940

SEQ ID NO: 862957 - protein, 130 aa, Homo sapiens; identical to SEQ ID NO: 862940

SEQ ID NO: 862958 - protein, 130 aa, Homo sapiens; identical to SEQ ID NO: 862940

SEQ ID NO: 862959 - protein, 66 aa, Homo sapiens; identical to SEQ ID NO: 862945

SEQ ID NO: 862960 - protein, 126 aa, Homo sapiens
MSIGVPIKVLHEAEGHIVTCETNTGEVYRGKLIEAEDNMNCQMSNITVTYRDGRVAQLEQVYIRGSKIRFLILPDMLKNAPMLKSMKNKNQGSGAGRGKAAILKAQVAARGRGRGMGRGNIFQKRR

SEQ ID NO: 862961 - protein, 78 aa, Homo sapiens
GPALDSLAGGREGSKHLHGNEANLLRLIRFRLWLRYCIVCFCPRGRETETICCRLDSPRDCLEHQLGSSHTILVGISQ

SEQ ID NO: 862962 - protein, 126 aa, Homo sapiens; identical to SEQ ID NO: 862960

SEQ ID NO: 862963 - protein, 126 aa, Homo sapiens; identical to SEQ ID NO: 862960

SEQ ID NO: 862964 - protein, 126 aa, Homo sapiens; identical to SEQ ID NO: 862960

SEQ ID NO: 862965 - protein, 126 aa, Homo sapiens; identical to SEQ ID NO: 862960

SEQ ID NO: 862966 - protein, 126 aa, Homo sapiens; identical to SEQ ID NO: 862960

SEQ ID NO: 862967 - protein, 126 aa, Homo sapiens; identical to SEQ ID NO: 862960

SEQ ID NO: 862968 - protein, 181 aa, Homo sapiens
MATEPEAAEPVVPSLVDRYFTRWYKPDVKGKFCEDHCILQHSNRICVITLAESHPVLQSGKTIKSISYQISTNCSRLQNKVSGKFKRGAQFLTELAPLCKIYCSDGEEYTVSSCVRGRLMEVNENILHKPSILQEKPSTEGYIAVVLPKFEESKSITEGLLTQKQYEEVMVKRINATTATS

SEQ ID NO: 862969 - protein, 156 aa, Homo sapiens
MGGKIIPSNHTGSTFSPCRICVITLAESHPVLQSGKTIKSISYQISTNCSRLQNKVSGKFKRGAQFLTELAPLCKIYCSDGEEYTVSSCVRGRLMEVNENILHKPSILQEKPSTEGYIAVVLPKFEESKSITEGLLTQKQYEEVMVKRINATTATS

SEQ ID NO: 862970 - protein, 115 aa, Homo sapiens
MATEPEAAEPVVPSLVDRYFTRWYKPDVKGKFCEDHCILQHSNRICVITLAESHPVLQSGKTIKSISYQISTNCSRLQNKVSGKFKRRIIYLEKVEDVIKRKMMPLSLGLHLPHS

SEQ ID NO: 862971 - protein, 224 aa, Homo sapiens
MSNPKAAVIGGGGGGGGTCGPESSARAHDTRCAPEEHAQSGLRGGSAGVPEGGGGGAGGRHGYRARSRGAGGAFARGSILHSLVQTGICVITLAESHPVLQSGKTIKSISYQISTNCSRLQNKVSGKFKRGAQFLTELAPLCKIYCSDGEEYTVSSCVRGRLMEVNENILHKPSILQEKPSTEGYIAVVLPKFEESKSITEGLLTQKQYEEVMVKRINATTATS

SEQ ID NO: 862972 - protein, 102 aa, Homo sapiens
MSKENFVRTTVYYSTLTGKQIGNFKLSKIFFSWYCSLVWSCGLGLNKCSLNKHALIIFYCVEDGIIIGVCLARMSIPVPGHSEHINLITQTSKWRTTSSAAT

SEQ ID NO: 862973 - protein, 572 aa, Homo sapiens
ASSLPPSVQQKILATATTSTSGMVEASQMPTVIYVSPVNTVKNVVTKNFQNIYPKPVTEIAKPVILNTTQIPKNVATETQLKGGQHSQAAPVKWIFQDNLQPFTPSLVPVKSSNNVASKILKTFVDRKNLGDNTINMPPLSTIDPSGTRSKNMPIKDNALVMFNGKVYLLAKKGTDVLPSQIDQQNSVSPDTPVRKDTLQTVSSSPVTEISREVVNIVLAKSKSSQMETKSLSNTQLASMANLRAEKNKVEKPSPSTTNPHMNQSSNYLKQSKTLFTNPIFPVGFSTGHNAPRKVTAVIYARKGSVLQSIEKISSSVDATTVTSQQCVFRDQEPKIHNEMASTSDKGAQGRNDKKDSQGRSNKALHLKSDAEFKKIFGLTKDLRVCLTRIPDHLTSGEGFDSFSSLVKSGTYKETEFMVKEGERKQQNFDKKRKAKTNKKMDHIKKRKTENAYNAIINGEANVTGSQLLSSILPTSDVSQHNILTSHSKTRQEKRTEMEYYTHEKQEKGTLNSNAAYEQSHFFNKNYTEDIFPVTPPELEETIRDEKIRRLKQVLREKEAALEEMRKKMHQK

SEQ ID NO: 862974 - protein, 233 aa, Homo sapiens
MASTSDKGAQGRNDKKDSQGRSNKALHLKSDAEFKKIFGLTKDLRVCLTRIPDHLTSGEGFDSFSSLVKSGTYKETEFMVKEGERKQQNFDKKRKAKTNKKMDHIKKRKTENAYNAIINGEANVTGSQLLSSILPTSDVSQHNILTSHSKTRQEKRTEMEYYTHEKQEKGTLNSNAAYEQSHFFNKNYTEDIFPVTPPELEETIRDEKIRRLKQVLREKEAALEEMRKKMHQK

SEQ ID NO: 862975 - protein, 233 aa, Homo sapiens; identical to SEQ ID NO: 862974

SEQ ID NO: 862976 - protein, 142 aa, Homo sapiens
MSNNLRRVFLKPAEENSGNASRCVSGCMYQVVQTIGSDGKNLLQLLPIPKSSGNLIPLVQSSVMSDALKGNTGKPVQVTFQTQISSSSTSASVQLPIFQPASSSNYFLTRTVDTSEKGRVTSVGTGNFSSSVSKVQSHGVKI

SEQ ID NO: 862977 - protein, 233 aa, Homo sapiens; identical to SEQ ID NO: 862974

SEQ ID NO: 862978 - protein, 635 aa, Homo sapiens
MSVGVSTSAPLSPTSGTSVGMSTFSIMDYVVFVLLLVLSLAIGLYHACRGWGRHTVGELLMADRKMGCLPVALSLLATFQSAVAILGVPSEIYRFGTQYWFLGCCYFLGLLIPAHIFIPVFYRLHLTSAYEYLELRFNKTVRVCGTVTFIFQMVIYMGVVLYAPSLALNAVTGFDLWLSVLALGIVCTVYTALGGLKAVIWTDVFQTLVMFLGQLAVIIVGSAKVGGLGRVWAVASQHGRISGFELDPDPFVRHTFWTLAFGGVFMMLSLYGVNQAQVQRYLSSRTEKAAVLSCYAVFPFQQVSLCVGCLIGLVMFAYYQEYPMSIQQAQAAPDQFVLYFVMDLLKGLPGLPGLFIACLFSGSLSTISSAFNSLATVTMEDLIRPWFPEFSEARAIMLSRGLAFGYGLLCLGMAYISSQMGPVLQAAISIFGMVGGPLLGLFCLGMFFPCANPPGAVVGLLAGLVMAFWIGIGSIVTSMGFSMPPSPSNGSSFSLPTNLTVATVTTLMPLTTFSKPTGLQRFYSLSYLWYSAHNSTTVIVVGLIVSLLTGRMRGRSLNPATIYPVLPKLLSLLPLSCQKRLHCRSYGQDHLDTGLFPEKPRNGVLGDSRDKEAMALDGTAYQGSSSTCILQETSL

SEQ ID NO: 862979 - protein, 752 aa, Homo sapiens
MSVGVSTSAPLSPTSGTSVGMSTFSIMDYVVFVLLLVLSLAIGLYHACRGWGRHTVGELLMADRKMGCLPVALSLLATFQSAVAILGVPSEIYRFGTQYWFLGCCYFLGLLIPAHIFIPVFYRLHLTSAYEYLELRFNKTVRVCGTVTFIFQMVIYMGVVLYAPSLALNAVTGFDLWLSVLALGIVCTVYTALGGLKAVIWTDVFQTLVMFLGQLAVIIVGSAKVGGLGRVWAVASQHGRISGFELDPDPFVRHTFWTLAFGGVFMMLSLYGVNQAQVQRYLSSRTEKAAVLSCYAVFPFQQVSLCVGCLIGLVMFAYYQEYPMSIQQAQAAPDQFVLYFVMDLLKGLPGLPGLFIACLFSGSLSTISSAFNSLATVTMEDLIRPWFPEFSEARAIMLSRGLGGVMLPHLFSLGLSKLHPDHCHQFAVKHPLYPGLSTCLMKHTTFPACMVVSISGHVLGRSLSHIGVRTWWEEAGACCNMPFVSRETEVVVWLGREPCFTPLLVLTHTFLFPLLSFPPAFGYGLLCLGMAYISSQMGPVLQAAISIFGMVGGPLLGLFCLGMFFPCANPPGAVVGLLAGLVMAFWIGIGSIVTSMGFSMPPSPSNGSSFSLPTNLTVATVTTLMPLTTFSKPTGLQRFYSLSYLWYSAHNSTTVIVVGLIVSLLTGRMRGRSLNPATIYPVLPKLLSLLPLSCQKRLHCRSYGQDHLDTGLFPEKPRNGVLGDSRDKEAMALDGTAYQGSSSTCILQETSL

SEQ ID NO: 862980 - protein, 635 aa, Homo sapiens; identical to SEQ ID NO: 862978

SEQ ID NO: 862981 - protein, 635 aa, Homo sapiens; identical to SEQ ID NO: 862978

SEQ ID NO: 862982 - protein, 635 aa, Homo sapiens; identical to SEQ ID NO: 862978

SEQ ID NO: 862983 - protein, 426 aa, Homo sapiens
MFLGQLAVIIVGSAKVGGLGRVWAVASQHGRISGFELDPDPFVRHTFWTLAFGGVFMMLSLYGVNQAQVQRYLSSRTEKAAVLSCYAVFPFQQVSLCVGCLIGLVMFAYYQEYPMSIQQAQAAPDQFVLYFVMDLLKGLPGLPGLFIACLFSGSLSTISSAFNSLATVTMEDLIRPWFPEFSEARAIMLSRGLAFGYGLLCLGMAYISSQMGPVLQAAISIFGMVGGPLLGLFCLGMFFPCANPPGAVVGLLAGLVMAFWIGIGSIVTSMGFSMPPSPSNGSSFSLPTNLTVATVTTLMPLTTFSKPTGLQRFYSLSYLWYSAHNSTTVIVVGLIVSLLTGRMRGRSLNPATIYPVLPKLLSLLPLSCQKRLHCRSYGQDHLDTGLFPEKPRNGVLGDSRDKEAMALDGTAYQGSSSTCILQETSL

SEQ ID NO: 862984 - protein, 635 aa, Homo sapiens; identical to SEQ ID NO: 862978

SEQ ID NO: 862985 - protein, 635 aa, Homo sapiens; identical to SEQ ID NO: 862978

SEQ ID NO: 862986 - protein, 155 aa, Homo sapiens
MSVGVSTSAPLSPTSGTSVGMSTFSIMDYVVFVLLLVLSLAIGLYHACRGWGRHTVGELLMADRKMGCLPVALSLLATFQSAVAILGVPSEIYRFGTQYWFLGCCYFLGLLIPAHIFIPVFYRLHLTSAYEYLELRFNKTVRVCGTVTFIFQMST

SEQ ID NO: 862987 - protein, 109 aa, Homo sapiens
MTNALSLWHDVMPYQGFSPGEPFSRDKNVASMLTVTGFDLWLSVLALGIVCTVYTALGGLKAVIWTDVFQTLVMFLGQLAVIIVGSAKVGGLGRVWAVASQHGRISGFE

SEQ ID NO: 862988 - protein, 477 aa, Homo sapiens
MSVGVSTSAPLSPTSGTSVGMSTFSIMDYVVFVLLLVLSLAIGLYHACRGWGRHTVGELLMADRKMGCLPVALSLLATFQSAVAILGVPSEIYRFGTQYWFLGCCYFLGLLIPAHIFIPVFYRLHLTSAYEYLELRFNKTVRVCGTVTFIFQMVIYMGVVLYAPSLALNAVTGFDLWLSVLALGIVCTVYTALGGLKAVIWTDVFQTLVMFLGQLAVIIVGSAKVGGLGRVWAVASQHGRISGFELDPDPFVRHTFWTLAFGGVFMMLSLYGVNQAQVQRYLSSRTEKAAVLSCYAVFPFQQVSLCVGCLIGLVMFAYYQEYPMSIQQAQAAPDQFVLYFVMDLLKGLPGLPGLFIACLFSGSLSTISSAFNSLATVTMEDLIRPWFPEFSEARAIMLSRGLGGVMLPHLFSLGLSKLHPDHCHQFAVKHPLYPGLSTCLMKHTTFPACMVVSISGHVLGRSLSHIGVRTWWEEAGA

SEQ ID NO: 862989 - protein, 635 aa, Homo sapiens; identical to SEQ ID NO: 862978

SEQ ID NO: 862990 - protein, 161 aa, Homo sapiens
PATIYPVLPKLLSLLPLSCQKRLHCRSYGQVVPAVQVTPPCPSPQMPLTLQVPFYPFSLPLPRVPLSGSAKPRLSHTAVSGSTHRTALAWWAEGSQGSEELSPSLGQSAPLPSPPCAPCCAMPSLFSPCSPSRTQPCWAPFWRGPFLCESCQAPVIRLHQF

SEQ ID NO: 862991 - protein, 260 aa, Homo sapiens
MEKCEAAAKDIRGETLNHHVNARHLDLASLKSIREFAAKIIEEEERVDILINNAGVMRCPHWTTEDGFEMQFGVNHLGHFLLTNLLLDKLKASAPSRIINLSSLAHVAGHIDFDDLNWQTRKYNTKAAYCQSKLAIVLFTKELSRRLQGSGVTVNALHPGVARTELGRHTGIHGSTFSSTTLGPIFWLLVKSPELAAQPSTYLAVAEELADVSGKYFDGLKQKAPAPEAEDEEVARRLWAESARLVGLEAPSVREQPLPR

SEQ ID NO: 862992 - protein, 295 aa, Homo sapiens
MAFSPCVSVSVFPSYKDTSHWIRAHPNDRILTWPLRHRPCFRHRPHSQVVGAQECFCWCIRLGSVLTGMSPPPPLSSEEERVDILINNAGVMRCPHWTTEDGFEMQFGVNHLGHFLLTNLLLDKLKASAPSRIINLSSLAHVAGHIDFDDLNWQTRKYNTKAAYCQSKLAIVLFTKELSRRLQGSGVTVNALHPGVARTELGRHTGIHGSTFSSTTLGPIFWLLVKSPELAAQPSTYLAVAEELADVSGKYFDGLKQKAPAPEAEDEEVARRLWAESARLVGLEAPSVREQPLPR

SEQ ID NO: 862993 - protein, 321 aa, Homo sapiens
AAPAPPLACGCVARSSSELPRRLVCSKLRADPGRLTPDACPRPGMSRYLLPLSALGTVAGAAVLLKDYVTGGACPSKATIPGKTVIVTGANTGIGKQTALELARRGGNIILACRDMEKCEAAAKDIRGETLNHHVNARHLDLASLKSIREFAAKIIEEEERVDILINNAGVMRCPHWTTEDGFEMQFGVNHLGHFLLTNLLLDKLKASAPSRIINLSSLAHVAGHIDFDDLNWQTRKYNTKAAYCQSKLAIVLFTKEAGQTHGHPWLHLLQHHTRAHLLAAGQEPRAGRPAQHIPGRGGGTGGCFRKVLRWTQTEGPGPRG

SEQ ID NO: 862994 - protein, 114 aa, Homo sapiens
AEDCLFIPGGLVCLDQMSFPAAVGQAAQPFGSSQLWCDCQRPAPRRGQDRAGQTHGHPWLHLLQHHTRAHLLAAGQEPRAGRPAQHIPGRGGGTGGCFRKVLRWTQTEGPGPRG

SEQ ID NO: 862995 - protein, 375 aa, Homo sapiens
AAPAPPLACGCVARSSSELPRRLVCSKLRADPGRLTPDACPRPGMSRYLLPLSALGTVAGAAVLLKDYVTGGACPSKATIPGKTVIVTGANTGIGKQTALELARRGGNIILACRDMEKCEAAAKDIRGETLNHHVNARHLDLASLKSIREFAAKIIEEEERVDILINNAGVMRCPHWTTEDGFEMQFGVNHLGHFLLTNLLLDKLKASAPSRIINLSSLAHVAGHIDFDDLNWQTRKYNTKAAYCQSKLAIVLFTKELSRRLQGSGVTVNALHPGVARTELGRHTGIHGSTFSSTTLGPIFWLLVKSPELAAQPSTYLAVAEELADVSGKYFDGLKQKAPAPEAEDEEVARRLWAESARLVGLEAPSVREQPLPR

SEQ ID NO: 862996 - protein, 375 aa, Homo sapiens; identical to SEQ ID NO: 862995

SEQ ID NO: 862997 - protein, 375 aa, Homo sapiens; identical to SEQ ID NO: 862995

SEQ ID NO: 862998 - protein, 375 aa, Homo sapiens; identical to SEQ ID NO: 862995

SEQ ID NO: 862999 - protein, 206 aa, Homo sapiens
AAPAPPLACGCVARSSSELPRRLVCSKLRADPGRLTPDACPRPGMSRYLLPLSALGTVAGAAVLLKDYVTGGACPSKATIPGKTVIVTGANTGIGKQTALELARRGGNIILACRDMEKCEAAAKDIRGETLNHHVNARHLDLASLKSIREFAAKIIEEEERVDILINNAGVMRCPHFLSILMVVQTADSQTCSFKRKKKEENVPES

SEQ ID NO: 863000 - protein, 260 aa, Homo sapiens; identical to SEQ ID NO: 862991

SEQ ID NO: 863001 - protein, 375 aa, Homo sapiens; identical to SEQ ID NO: 862995

SEQ ID NO: 863002 - protein, 357 aa, Homo sapiens
AAPAPPLACGCVARSSSELPRRLVCSKLRADPGRLTPDACPRPGMSRYLLPLSALGTVAGAAVLLKDYVTGGACPSKATIPGKTVIVTGANTGIGKQTALELARRGGNIILACRDMEKCEAAAKDIRGETLNHHVNARHLDLASLKSIREFAAKIIEEEERVDILINNAGVMRCPHWTTEDGFEMQFGVNHLGHFLLTNLLLDKLKASAPSRIINLSSLAHVAGHIDFDDLNWQTRKYNTKAAYCQSKLAIVLFTKELSRRLQGSGVTVNALHPGVARTELGRHTGIHGSTFSSTTLGESPPSLGSPRGALHPCFLSPGPRTLPQRPSLRPHACSSPTSSEAQSTGPFPPLTWPASL

SEQ ID NO: 863003 - protein, 152 aa, Homo sapiens
MGFECRKQPGARKPHSWVWAATASQVRLDPSLSLLFLSSPGSGVTVNALHPGVARTELGRHTGIHGSTFSSTTLGPIFWLLVKSPELAAQPSTYLAVAEELADVSGKYFDGLKQKAPAPEAEDEEVARRLWAESARLVGLEAPSVREQPLPR

SEQ ID NO: 863004 - protein, 375 aa, Homo sapiens; identical to SEQ ID NO: 862995

SEQ ID NO: 863005 - protein, 68 aa, Homo sapiens
AEDCLFIPGGLVCLDQMSFPAAVGQAAQPFGSSQLWCDCQRPAPRRGQDRAGQTHGHPWLHLLQHHTR

SEQ ID NO: 863006 - protein, 149 aa, Homo sapiens
MRDVGKMMAGRFLDINTLIVLILTTPGLIFIFEMKSCSVAQAGVQWHDLHSLQLPPPRFKRFSCLQVAGITGPIFWLLVKSPELAAQPSTYLAVAEELADVSGKYFDGLKQKAPAPEAEDEEVARRLWAESARLVGLEAPSVREQPLPR

SEQ ID NO: 863007 - protein, 100 aa, Homo sapiens
LPKCWDFRCESKVTFFIILNPGHFLLTNLLLDKLKASAPSRIINLSSLAHVAGHIDFDDLNWQTRKYNTKAAYCQSKLAIVLFTKELSRRLQGTGALGSA

SEQ ID NO: 863008 - protein, 169 aa, Homo sapiens
MLLVDDRALPDFKGIQTSDPNAVVMGLAPEHFHYQILNQAFRLLLDGAPLIAIHKARYYKRKDGLALGPGPFVTALEYATDTKATVVGKPEKTFFLEALRGTGCEPEEAVMIGDDCRDDVGGAQDVGMLGILVKTGKYRASDEEKINPPPYLTCESFPHAVDHILQHLL

SEQ ID NO: 863009 - protein, 259 aa, Homo sapiens
MAACRALKAVLVDLSGTLHIEDAAVPGAQEALKRLRGASVIIRFVTNTTKESKQDLLERLRKLEFDISEDEIFTSLTAARSLLERKQVRPMLLVDDRALPDFKGIQTSDPNAVVMGLAPEHFHYQILNQAFRLLLDGAPLIAIHKARYYKRKDGLALGPGPFVTALEYATDTKATVVGKPEKTFFLEALRGTGCEPEEAVMIGDDCRDDVGGAQDVGMLGILVKTGKYRASDEEKINPPPYLTCESFPHAVDHILQHLL

SEQ ID NO: 863010 - protein, 259 aa, Homo sapiens; identical to SEQ ID NO: 863009

SEQ ID NO: 863011 - protein, 169 aa, Homo sapiens; identical to SEQ ID NO: 863008

SEQ ID NO: 863012 - protein, 250 aa, Homo sapiens
MAACRALKAVLVDLSGTLHIEDAAVPGAQEALKRFVTNTTKESKQDLLERLRKLEFDISEDEIFTSLTAARSLLERKQVRPMLLVDDRALPDFKGIQTSDPNAVVMGLAPEHFHYQILNQAFRLLLDGAPLIAIHKARYYKRKDGLALGPGPFVTALEYATDTKATVVGKPEKTFFLEALRGTGCEPEEAVMIGDDCRDDVGGAQDVGMLGILVKTGKYRASDEEKINPPPYLTCESFPHAVDHILQHLL

SEQ ID NO: 863013 - protein, 259 aa, Homo sapiens; identical to SEQ ID NO: 863009

SEQ ID NO: 863014 - protein, 231 aa, Homo sapiens
MSAKSRTIGIIGAPFSKGQPRGGVEEGPTVLRKAGLLEKLKEQECDVKDYGDLPFADIPNDSPFQIVKNPRSVGKASEQLAGKVAEVKKNGRISLVLGGDHSLAIGSISGHARVHPDLGVIWVDAHTDINTPLTTTSGNLHGQPVSFLLKELKGKIPDVPGFSWVTPCISAKDIVYIGLRDVDPGEHYILKTLGIKYFSMTEVDRLGIWQGDGRNTQLSTRKKEKANSSKF

SEQ ID NO: 863015 - protein, 205 aa, Homo sapiens
MSAKSRTIGIIGAPFSKGQPRGGVEEGPTVLRKAGLLEKLKEQECDVKDYGDLPFADIPNDSPFQIVKNPRSVGKASEQLAGKVAEVKKNGRISLVLGGDHSLAIGSISGHARVHPDLGVIWVDAHTDINTPLTTTSGNLHGQPVSFLLKELKGKIPDVPGFSWVTPCISAKDIVYIGLRDVDPGEHRLGIWQGDGRNTQLSTRK

SEQ ID NO: 863016 - protein, 213 aa, Homo sapiens
MSAKSRTIGIIGAPFSKGQPRGGVEEGPTVLRKAGLLEKLKEQECDVKDYGDLPFADIPNDSPFQIVKNPRSVGISLVLGGDHSLAIGSISGHARVHPDLGVIWVDAHTDINTPLTTTSGNLHGQPVSFLLKELKGKIPDVPGFSWVTPCISAKDIVYIGLRDVDPGEHYILKTLGIKYFSMTEVDRLGIWQGDGRNTQLSTRKKEKANSSKF

SEQ ID NO: 863017 - protein, 111 aa, Homo sapiens
MEETLSYLLGRKKRPIHLSFDVDGLDPSFTPATGTPVVGGLTYREGLYITEEIYKTGLLSGLDIMEVNPSLGKTPEEVTRTVNTAVAITLACFGLAREGNHKPIDYLNPPK

SEQ ID NO: 863018 - protein, 239 aa, Homo sapiens
MGLPSQDLQTFQVFPLLILVNICLFYTIEIILHRLIYNLLFNLVTQNFLILECDVKDYGDLPFADIPNDSPFQIVKNPRSVGKASEQLAGKVAEVKKNGRISLVLGGDHSLAIGSISGHARVHPDLGVIWVDAHTDINTPLTTTSGNLHGQPVSFLLKELKGKIPDVPGFSWVTPCISAKDIVYIGLRDVDPGEHYILKTLGIKYFSMTEVDRLGIWQGDGRNTQLSTRKKEKANSSKF

SEQ ID NO: 863019 - protein, 214 aa, Homo sapiens
MSAKSRTIGIIGAPFSKGQPRGGVEEGPTVLRKAGLLEKLKEQECDVKDYGDLPFADIPNDSPFQIVKNPRSVGKASEQLAGKVAEVKKNGRISLVLGGDHSLAIGSISGHARVHPDLGVIWVDAHTDINTPLTTTSGNLHGQPVSFLLKELKGKIPDVPGFSWVTPCISAKDIVYIGLRDVDPGEHRLGIWQGDGRNTQLSTRKKEKANSSKF

SEQ ID NO: 863020 - protein, 291 aa, Homo sapiens
MSAKSRTIGIIGAPFSKGQPRGGVEEGPTVLRKAGLLEKLKEQECDVKDYGDLPFADIPNDSPFQIVKNPRSVGKASEQLAGKVAEVKKNGRISLVLGGDHSLAIGSISGHARVHPDLGVIWVDAHTDINTPLTTTSGNLHGQPVSFLLKELKGKIPDVPGFSWVTPCISAKDIVYIGLRDVDPGEHYILKTLGIKYFSMTEVDRLGIWQGDGRNTQLSTRKTSYWHTSRGRSDIQRRSLHHRRNLQNRATLRIRYNGSEPIPGEDTRRSNSNSEHSSCNNLGLFRTCSGG

SEQ ID NO: 863021 - protein, 273 aa, Homo sapiens
MSAKSRTIGIIGAPFSKGQPRGGVEEGPTVLRKAGLLEKLKEQECDVKDYGDLPFADIPNDSPFQIVKNPRSVGISLVLGGDHSLAIGSISGHARVHPDLGVIWVDAHTDINTPLTTTSGNLHGQPVSFLLKELKGKIPDVPGFSWVTPCISAKDIVYIGLRDVDPGEHYILKTLGIKYFSMTEVDRLGIWQGDGRNTQLSTRKTSYWHTSRGRSDIQRRSLHHRRNLQNRATLRIRYNGSEPIPGEDTRRSNSNSEHSSCNNLGLFRTCSGG

SEQ ID NO: 863022 - protein, 164 aa, Homo sapiens
MSAKSRTIGIIGAPFSKGQPRGGVEEGPTVLRKAGLLEKLKEQECDVKDYGDLPFADIPNDSPFQIVKNPRSVGKASEQLAGKVAEVKKNGRISLVLGGDHSLAIGSISGHARVHPDLGVIWVDAHTDINTPLTTTSGNLHGQPVSFLLKELKGKLPRILCILA

SEQ ID NO: 863023 - protein, 104 aa, Homo sapiens
MSAKSRTIGIIGAPFSKGQPRGGVEEGPTVLRKAGLLEKLKEQECDVKDYGDLPFADIPNDSPFQIVKNPRSVGKASEQLAGKVAEVKKNGRISLVLGGDHRSC

SEQ ID NO: 863024 - protein, 104 aa, Homo sapiens; identical to SEQ ID NO: 863023

SEQ ID NO: 863025 - protein, 104 aa, Homo sapiens; identical to SEQ ID NO: 863023

SEQ ID NO: 863026 - protein, 94 aa, Homo sapiens
EVLYFLIVQPRGGVEEGPTVLRKAGLLEKLKEQECDVKDYGDLPFADIPNDSPFQIVKNPRSVGKASEQLAGKVAEVKKNGRISLVLGGDHRSC

SEQ ID NO: 863027 - protein, 318 aa, Homo sapiens
MSAKSRTIGIIGAPFSKGQPRGGVEEGPTVLRKAGLLEKLKEQECDVKDYGDLPFADIPNDSPFQIVKNPRSVGKASEQLAGKVAEVKKNGRISLVLGGDHSLAIGSISGHARVHPDLGVIWVDAHTDINTPLTTTSGNLHGQPVSFLLKELKGKIPDVPGFSWVTPCISAKDIVYIGLRDVDPGEQLTFLKTLGPLNYFSNDLTVDQTQDLGQGDWAENTPGNLTLRERTRKKGPISLLKGFRNGFDPAPVEAPLLFPNSPSVRCGHHPQVSWRKRRLDTIHTYAIGSSFAYHQRIAKFLSTPTPARYLPPSGRPNF

SEQ ID NO: 863028 - protein, 225 aa, Homo sapiens
MSAKSRTIGIIGAPFSKGQPRGGVEEGPTVLRKAGLLEKLKEQECDVKDYGDLPFADIPNDSPFQIVKNPRSVGKASEQLAGKVAEVKKNGRISLVLGGDHSLAIGSISGHARVHPDLGVIWVDAHTDINTPLTTTSGNLHGQPVSFLLKELKGKIPDVPGFSWVTPCISAKDIVYIGLRDVDPGEHYILKTLGIKYFSMTEVDNSNSEHSSCNNLGLFRTCSGG

SEQ ID NO: 863029 - protein, 103 aa, Homo sapiens
MSAKSRTIGIIGAPFSKGQPRGGVEEGPTVLRKAGLLEKLKEQECDVKDYGDLPFADIPNDSPFQIVKNPRSVGKASEQLAGKVASPFFGIARCHLDLEASGG

SEQ ID NO: 863030 - protein, 111 aa, Homo sapiens; identical to SEQ ID NO: 863017

SEQ ID NO: 863031 - protein, 226 aa, Homo sapiens
LTLLSRLEYSGTIMAHYSLNLPSSGDPLASASRVAGTTECDVKDYGDLPFADIPNDSPFQIVKNPRSVGKASEQLAGKVAEVKKNGRISLVLGGDHSLAIGSISGHARVHPDLGVIWVDAHTDINTPLTTTSGNLHGQPVSFLLKELKGKIPDVPGFSWVTPCISAKDIVYIGLRDVDPGEHYILKTLGIKYFSMTEVDRLGIWQGDGRNTQLSTRKKEKANSSKF

SEQ ID NO: 863032 - protein, 146 aa, Homo sapiens
MSAKSRTIGIIGAPFSKGQPRGGVEEGPTVLRKAGLLEKLKEQECDVKDYGDLPFADIPNDSPFQIVKNPRSVGISLVLGGDHSLAIGSISGHARVHPDLGVIWVDAHTDINTPLTTTSGNLHGQPVSFLLKELKGKLPRILCILA

SEQ ID NO: 863033 - protein, 186 aa, Homo sapiens
MSAKSRTIGIIGAPFSKGQPRGGVEEGPTVLRKAGLLEKLKEQECDVKDYGDLPFADIPNDSPFQIVKNPRSVGISLVLGGDHSLAIGSISGHARVHPDLGVIWVDAHTDINTPLTTTSGNLHGQPVSFLLKELKGKIPDVPGFSWVTPCISAKDIVYIGLRDVDPGEQVSLFLDVICLHFCPFVC

SEQ ID NO: 863034 - protein, 111 aa, Homo sapiens; identical to SEQ ID NO: 863017

SEQ ID NO: 863035 - protein, 133 aa, Homo sapiens
MSAKSRTIGIIGAPFSKGQPRGGVEEGPTVLRKAGLLEKLKEQECDVKDYGDLPFADIPNDSPFQIVKNPRSVGKASEQLAGKVAEVKKNGRISLVLGGDHSLAIGSISGHARVHPDLGVIWVDAHTDINTTF

SEQ ID NO: 863036 - protein, 291 aa, Homo sapiens; identical to SEQ ID NO: 863020

SEQ ID NO: 863037 - protein, 147 aa, Homo sapiens
MSAKSRTIGIIGAPFSKGQPRGGVEEGPTVLRKAGLLEKLKEQECDVKDYGDLPFADIPNDSPFQIVKNPRSVGISLVLGGDHSLAIGSISGHARVHPDLGVIWVDAHTDINTPLTTTSGNLHGQPVSFLLKELKGKGKRLVGTLVQ

SEQ ID NO: 863038 - protein, 104 aa, Homo sapiens; identical to SEQ ID NO: 863023

SEQ ID NO: 863039 - protein, 108 aa, Homo sapiens
SESVKSKQFSPSGYLSDTEESNMICQTMKCQRYQTPYLSEETTYLEPGKISVNCGHPSRHKADRLKSDFKKLSSTLPSSVCQQPSRKLIVPLSSQQDSGFDSPFVNLD

SEQ ID NO: 863040 - protein, 1873 aa, Homo sapiens
MEANDHFNFTGLPPAPAASGLKPSPSSGEGLYTNGSPMNFPQQGKSLNGDVNVNGLSTVSHTTTSGILNSAPHSSSTSHLHHPSVAYDCLWNYSQYPSANPGSNLKDPPLLSQFSGGQYPLNGILGGSRQPSSPSHNTNLRAGSQEFWANGTQSPMGLNFDSQELYDSFPDQNFEEVGSGIHPDEAAEKEMTSVVAENGTGLVGSLELEEEQPELKMCGYNGSVPSVESLHQEVSVLVPDPTVSCLDDPSHLPDQLEDTPILSEDSLEPFNSLAPEPVSGGLYGIDDTELMGAEDKLPLEDSPVISALDCPSLNNATAFSLLADDSQTSTSIFASPTSPPVLGESVLQDNSFDLNNGSDAEQEEMETQSSDFPPSLTQPAPDQSSTIQLHPATSPAVSPTTSPAVSLVVSPAASPEISPEVCPAASTVVSPAVFSVVSPASSAVLPAVSLEVPLTASVTSPKASPVTSPAAAFPTASPANKDVSSFLETTADVEEITGEGLTASGSGDVMRRRIATPEEVRLPLQHGWRREVRIKKGSHRWQGETWYYGPCGKRMKQFPEVIKYLSRNVVHSVRREHFSFSPRMPVGDFFEERDTPEGLQWVQLSAEEIPSRIQAITGKRGRPRNTEKAKTKEVPKVKRGRGRPPKVKITELLNKTDNRPLKKLEAQETLNEEDKAKIAKSKKKMRQKVQRGECQTTIQGQARNKRKQETKSLKQKEAKKKSKAEKEKGKTKQEKLKEKVKREKKEKVKMKEKEEVTKAKPACKADKTLATQRRLEERQRQQMILEEMKKPTEDMCLTDHQPLPDFSRVPGLTLPSGAFSDCLTIVEFLHSFGKVLGFDPAKDVPSLGVLQEGLLCQGDSLGEVQDLLVRLLKAALHDPGFPSYCQSLKILGEKVSEIPLTRDNVSEILRCFLMAYGVEPALCDRLRTQPFQAQPPQQKAAVLAFLVHELNGSTLIINEIDKTLESMSSYRKNKWIVEGRLRRLKTVLAKRTGRSEVEMEGPEECLGRRRSSRIMEETSGMEEEEEEESIAAVPGRRGRRDGEVDATASSIPELERQIEKLSKRQLFFRKKLLHSSQMLRAVSLGQDRYRRRYWVLPYLAGIFVEGTEGNLVPEEVIKKETDSLKVAAHASLNPALFSMKMELAGSNTTASSPARARGRPRKTKPGSMQPRHLKSPVRGQDSEQPQAQLQPEAQLHAPAQPQPQLQLQLQSHKGFLEQEGSPLSLGQSQHDLSQSAFLSWLSQTQSHSSLLSSSVLTPDSSPGKLDPAPSQPPEEPEPDEAESSPDPQALWFNISAQMPCNAAPTPPPAVSEDQPTPSPQQLASSKPMNRPSAANPCSPVQFSSTPLAGLAPKRRAGDPGEMPQSPTGLGQPKRRGRPPSKFFKQMEQRYLTQLTAQPVPPEMCSGWWWIRDPEMLDAMLKALHPRGIREKALHKHLNKHRDFLQEVCLRPSADPIFEPRQLPAFQEGIMSWSPKEKTYETDLAVLQWVEELEQRVIMSDLQIRGWTCPSPDSTREDLAYCEHLSDSQEDITWRGRGREGLAPQRKTTNPLDLAVMRLAALEQNVERRYLREPLWPTHEVVLEKALLSTPNGAPEGTTTEISYEITPRIRVWRQTLERCRSAAQVCLCLGQLERSIAWEKSVNKVTCLVCRKGDNDEFLLLCDGCDRGCHIYCHRPKMEAVPEGDWFCTVCLAQQVEGEFTQKPGFPKRGQKRKSGYSLNFSEGDGRRRRVLLRGRESPAAGPRYSEEGLSPSKRRRLSMRNHHSDLTFCEIILMEMESHDAAWPFLEPVNPRLVSGYRRIIKNPMDFSTMRERLLRGGYTSSEEFAADALLVFDNCQTFNEDDSEVGKAGHIMRRFFESRWEEFYQGKQANL

SEQ ID NO: 863041 - protein, 243 aa, Homo sapiens
AAPVLCCGCSDPDKWVLPYLAGIFVEGTEGNLVPEEVIKKETDSLKVAAHASLNPALFSMKMELAGSNTTASSPARARGRPRKTKPGSMQPRHLKSPVRGQDSEQPQAQLQPEAQLHAPAQPQPQLQLQLQSHKGFLEQEGSPLSLGQSQHDLSQSAFLSWLSQTQSHSSLLSSSVLTPDSSPGKLDPAPSQPPEEPEPDEAESSPDPQALWFNISAQMPCNAAPTPPCVLGTTILPQSASQP

SEQ ID NO: 863042 - protein, 115 aa, Homo sapiens
SQCYYFEFVLVKLLAYISVTDLFFLSLPGLNGDVNVNGLSTVSHTTTSGILNSAPHSSSTSHLHHPSVAYDCLWNYSQYPSANPGSNLKDPPLLSQFSGGQYPLNGHYNAWDPLD

SEQ ID NO: 863043 - protein, 1933 aa, Homo sapiens
VLAPGARPCEPLVPRGETSPEPGWTPLPQEMEANDHFNFTGLPPAPAASGLKPSPSSGEGLYTNGSPMNFPQQGKSLNGDVNVNGLSTVSHTTTSGILNSAPHSSSTSHLHHPSVAYDCLWNYSQYPSANPGSNLKDPPLLSQFSGGQYPLNGILGGSRQPSSPSHNTNLRAGSQEFWANGTQSPMGLNFDSQELYDSFPDQNFEVMPNGPPSFFTSPQTSPMLGSSIQTFAPSQEVGSGIHPDEAAEKEMTSVVAENGTGLVGSLELEEEQPELKMCGYNGSVPSVESLHQEVSVLVPDPTVSCLDDPSHLPDQLEDTPILSEDSLEPFNSLAPEPVSGGLYGIDDTELMGAEDKLPLEDSPVISALDCPSLNNATAFSLLADDSQTSTSIFASPTSPPVLGESVLQDNSFDLNNGSDAEQEEMETQSSDFPPSLTQPAPDQSSTIQLHPATSPAVSPTTSPAVSLVVSPAASPEISPEVCPAASTVVSPAVFSVVSPASSAVLPAVSLEVPLTASVTSPKASPVTSPAAAFPTASPANKDVSSFLETTADVEEITGEGLTASGSGDVMRRRIATPEEVRLPLQHGWRREVRIKKGSHRWQGETWYYGPCGKRMKQFPEVIKYLSRNVVHSVRREHFSFSPRMPVGDFFEERDTPEGLQWVQLSAEEIPSRIQAITGKRGRPRNTEKAKTKEVPKVKRGRGRPPKVKITELLNKTDNRPLKKLEAQETLNEEDKAKIAKSKKKMRQKVQRGECQTTIQGQARNKRKQETKSLKQKEAKKKSKAEKEKGKTKQEKLKEKVKREKKEKVKMKEKEEVTKAKPACKADKTLATQRRLEERQRQQMILEEMKKPTEDMCLTDHQPLPDFSRVPGLTLPSGAFSDCLTIVEFLHSFGKVLGFDPAKDVPSLGVLQEGLLCQGDSLGEVQDLLVRLLKAALHDPGFPSYCQSLKILGEKVSEIPLTRDNVSEILRCFLMAYGVEPALCDRLRTQPFQAQPPQQKAAVLAFLVHELNGSTLIINEIDKTLESMSSYRKNKWIVEGRLRRLKTVLAKRTGRSEVEMEGPEECLGRRRSSRIMEETSGMEEEEEEESIAAVPGRRGRRDGEVDATASSIPELERQIEKLSKRQLFFRKKLLHSSQMLRAVSLGQDRYRRRYWVLPYLAGIFVEGTEGNLVPEEVIKKETDSLKVAAHASLNPALFSMKMELAGSNTTASSPARARGRPRKTKPGSMQPRHLKSPVRGQDSEQPQAQLQPEAQLHAPAQPQPQLQLQLQSHKGFLEQEGSPLSLGQSQHDLSQSAFLSWLSQTQSHSSLLSSSVLTPDSSPGKLDPAPSQPPEEPEPDEAESSPDPQALWFNISAQMPCNAAPTPPPAVSEDQPTPSPQQLASSKPMNRPSAANPCSPVQFSSTPLAGLAPKRRAGDPGEMPQSPTGLGQPKRRGRPPSKFFKQMEQRYLTQLTAQPVPPEMCSGWWWIRDPEMLDAMLKALHPRGIREKALHKHLNKHRDFLQEVCLRPSADPIFEPRQLPAFQEGIMSWSPKEKTYETDLAVLQWVEELEQRVIMSDLQIRGWTCPSPDSTREDLAYCEHLSDSQEDITWRGRGREGLAPQRKTTNPLDLAVMRLAALEQNVERRYLREPLWPTHEVVLEKALLSTPNGAPEGTTTEISYEITPRIRVWRQTLERCRSAAQVCLCLGQLERSIAWEKSVNKVTCLVCRKGDNDEFLLLCDGCDRGCHIYCHRPKMEAVPEGDWFCTVCLAQQVEGEFTQKPGFPKRGQKRKSGYSLNFSEGDGRRRRVLLRGRESPAAGPRYSEEGLSPSKRRRLSMRNHHSDLTFCEIILMEMESHDAAWPFLEPVNPRLVSGYRRIIKNPMDFSTMRERLLRGGYTSSEEFAADALLVFDNCQTFNEDDSEVGKAGHIMRRFFESRWEEFYQGKQANL

SEQ ID NO: 863044 - protein, 1937 aa, Homo sapiens
MDGESFLSGDQGPADVARKVVIQAGPGCTEGTEEMEANDHFNFTGLPPAPAASGLKPSPSSGEGLYTNGSPMNFPQQGKSLNGDVNVNGLSTVSHTTTSGILNSAPHSSSTSHLHHPSVAYDCLWNYSQYPSANPGSNLKDPPLLSQFSGGQYPLNGILGGSRQPSSPSHNTNLRAGSQEFWANGTQSPMGLNFDSQELYDSFPDQNFEVMPNGPPSFFTSPQTSPMLGSSIQTFAPSQEVGSGIHPDEAAEKEMTSVVAENGTGLVGSLELEEEQPELKMCGYNGSVPSVESLHQEVSVLVPDPTVSCLDDPSHLPDQLEDTPILSEDSLEPFNSLAPEPVSGGLYGIDDTELMGAEDKLPLEDSPVISALDCPSLNNATAFSLLADDSQTSTSIFASPTSPPVLGESVLQDNSFDLNNGSDAEQEEMETQSSDFPPSLTQPAPDQSSTIQLHPATSPAVSPTTSPAVSLVVSPAASPEISPEVCPAASTVVSPAVFSVVSPASSAVLPAVSLEVPLTASVTSPKASPVTSPAAAFPTASPANKDVSSFLETTADVEEITGEGLTASGSGDVMRRRIATPEEVRLPLQHGWRREVRIKKGSHRWQGETWYYGPCGKRMKQFPEVIKYLSRNVVHSVRREHFSFSPRMPVGDFFEERDTPEGLQWVQLSAEEIPSRIQAITGKRGRPRNTEKAKTKEVPKVKRGRGRPPKVKITELLNKTDNRPLKKLEAQETLNEEDKAKIAKSKKKMRQKVQRGECQTTIQGQARNKRKQETKSLKQKEAKKKSKAEKEKGKTKQEKLKEKVKREKKEKVKMKEKEEVTKAKPACKADKTLATQRRLEERQRQQMILEEMKKPTEDMCLTDHQPLPDFSRVPGLTLPSGAFSDCLTIVEFLHSFGKVLGFDPAKDVPSLGVLQEGLLCQGDSLGEVQDLLVRLLKAALHDPGFPSYCQSLKILGEKVSEIPLTRDNVSEILRCFLMAYGVEPALCDRLRTQPFQAQPPQQKAAVLAFLVHELNGSTLIINEIDKTLESMSSYRKNKWIVEGRLRRLKTVLAKRTGRSEVEMEGPEECLGRRRSSRIMEETSGMEEEEEEESIAAVPGRRGRRDGEVDATASSIPELERQIEKLSKRQLFFRKKLLHSSQMLRAVSLGQDRYRRRYWVLPYLAGIFVEGTEGNLVPEEVIKKETDSLKVAAHASLNPALFSMKMELAGSNTTASSPARARGRPRKTKPGSMQPRHLKSPVRGQDSEQPQAQLQPEAQLHAPAQPQPQLQLQLQSHKGFLEQEGSPLSLGQSQHDLSQSAFLSWLSQTQSHSSLLSSSVLTPDSSPGKLDPAPSQPPEEPEPDEAESSPDPQALWFNISAQMPCNAAPTPPPAVSEDQPTPSPQQLASSKPMNRPSAANPCSPVQFSSTPLAGLAPKRRAGDPGEMPQSPTGLGQPKRRGRPPSKFFKQMEQRYLTQLTAQPVPPEMCSGWWWIRDPEMLDAMLKALHPRGIREKALHKHLNKHRDFLQEVCLRPSADPIFEPRQLPAFQEGIMSWSPKEKTYETDLAVLQWVEELEQRVIMSDLQIRGWTCPSPDSTREDLAYCEHLSDSQEDITWRGRGREGLAPQRKTTNPLDLAVMRLAALEQNVERRYLREPLWPTHEVVLEKALLSTPNGAPEGTTTEISYEITPRIRVWRQTLERCRSAAQVCLCLGQLERSIAWEKSVNKVTCLVCRKGDNDEFLLLCDGCDRGCHIYCHRPKMEAVPEGDWFCTVCLAQQVEGEFTQKPGFPKRGQKRKSGYSLNFSEGDGRRRRVLLRGRESPAAGPRYSEEGLSPSKRRRLSMRNHHSDLTFCEIILMEMESHDAAWPFLEPVNPRLVSGYRRIIKNPMDFSTMRERLLRGGYTSSEEFAADALLVFDNCQTFNEDDSEVGKAGHIMRRFFESRWEEFYQGKQANL

SEQ ID NO: 863045 - protein, 1903 aa, Homo sapiens
VLAPGARPCEPLVPRGETSPEPGWTPLPQEMEANDHFNFTGLPPAPAASGLKPSPSSGEGLYTNGSPMNFPQQGKSLNGDVNVNGLSTVSHTTTSGILNSAPHSSSTSHLHHPSVAYDCLWNYSQYPSANPGSNLKDPPLLSQFSGGQYPLNGILGGSRQPSSPSHNTNLRAGSQEFWANGTQSPMGLNFDSQELYDSFPDQNFEVMPNGPPSFFTSPQTSPMLGSSIQTFAPSQEVGSGIHPDEAAEKEMTSVVAENGTGLVGSLELEEEQPELKMCGYNGSVPSVESLHQEVSVLVPDPTVSCLDDPSHLPDQLEDTPILSEDSLEPFNSLAPEPVSGGLYGIDDTELMGAEDKLPLEDSPVISALDCPSLNNATAFSLLADDSQTSTSIFASPTSPPVLGESVLQDNSFDLNNGSDAEQEEMETQSSDFPPSLTQPAPDQSSTIQLHPATSPAVSPTTSPAVSLVVSPAASPEIFSLEVPLTASVTSPKASPVTSPAAAFPTASPANKDVSSFLETTADVEEITGEGLTASGSGDVMRRRIATPEEVRLPLQHGWRREVRIKKGSHRWQGETWYYGPCGKRMKQFPEVIKYLSRNVVHSVRREHFSFSPRMPVGDFFEERDTPEGLQWVQLSAEEIPSRIQAITGKRGRPRNTEKAKTKEVPKVKRGRGRPPKVKITELLNKTDNRPLKKLEAQETLNEEDKAKIAKSKKKMRQKVQRGECQTTIQGQARNKRKQETKSLKQKEAKKKSKAEKEKGKTKQEKLKEKVKREKKEKVKMKEKEEVTKAKPACKADKTLATQRRLEERQRQQMILEEMKKPTEDMCLTDHQPLPDFSRVPGLTLPSGAFSDCLTIVEFLHSFGKVLGFDPAKDVPSLGVLQEGLLCQGDSLGEVQDLLVRLLKAALHDPGFPSYCQSLKILGEKVSEIPLTRDNVSEILRCFLMAYGVEPALCDRLRTQPFQAQPPQQKAAVLAFLVHELNGSTLIINEIDKTLESMSSYRKNKWIVEGRLRRLKTVLAKRTGRSEVEMEGPEECLGRRRSSRIMEETSGMEEEEEEESIAAVPGRRGRRDGEVDATASSIPELERQIEKLSKRQLFFRKKLLHSSQMLRAVSLGQDRYRRRYWVLPYLAGIFVEGTEGNLVPEEVIKKETDSLKVAAHASLNPALFSMKMELAGSNTTASSPARARGRPRKTKPGSMQPRHLKSPVRGQDSEQPQAQLQPEAQLHAPAQPQPQLQLQLQSHKGFLEQEGSPLSLGQSQHDLSQSAFLSWLSQTQSHSSLLSSSVLTPDSSPGKLDPAPSQPPEEPEPDEAESSPDPQALWFNISAQMPCNAAPTPPPAVSEDQPTPSPQQLASSKPMNRPSAANPCSPVQFSSTPLAGLAPKRRAGDPGEMPQSPTGLGQPKRRGRPPSKFFKQMEQRYLTQLTAQPVPPEMCSGWWWIRDPEMLDAMLKALHPRGIREKALHKHLNKHRDFLQEVCLRPSADPIFEPRQLPAFQEGIMSWSPKEKTYETDLAVLQWVEELEQRVIMSDLQIRGWTCPSPDSTREDLAYCEHLSDSQEDITWRGRGREGLAPQRKTTNPLDLAVMRLAALEQNVERRYLREPLWPTHEVVLEKALLSTPNGAPEGTTTEISYEITPRIRVWRQTLERCRSAAQVCLCLGQLERSIAWEKSVNKVTCLVCRKGDNDEFLLLCDGCDRGCHIYCHRPKMEAVPEGDWFCTVCLAQQVEGEFTQKPGFPKRGQKRKSGYSLNFSEGDGRRRRVLLRGRESPAAGPRYSEEGLSPSKRRRLSMRNHHSDLTFCEIILMEMESHDAAWPFLEPVNPRLVSGYRRIIKNPMDFSTMRERLLRGGYTSSEEFAADALLVFDNCQTFNEDDSEVGKAGHIMRRFFESRWEEFYQGKQANL

SEQ ID NO: 863046 - protein, 1933 aa, Homo sapiens; identical to SEQ ID NO: 863043

SEQ ID NO: 863047 - protein, 1565 aa, Homo sapiens
SRACTHDIGHEVTLAIFYYQHYYISGSFNLSTCPGESVLQDNSFDLNNGSDAEQEEMETQSSDFPPSLTQPAPDQSSTIQLHPATSPAVSPTTSPAVSLVVSPAASPEISPEVCPAASTVVSPAVFSVVSPASSAVLPAVSLEVPLTASVTSPKASPVTSPAAAFPTASPANKDVSSFLETTADVEEITGEGLTASGSGDVMRRRIATPEEVRLPLQHGWRREVRIKKGSHRWQGETWYYGPCGKRMKQFPEVIKYLSRNVVHSVRREHFSFSPRMPVGDFFEERDTPEGLQWVQLSAEEIPSRIQAITGKRGRPRNTEKAKTKEVPKVKRGRGRPPKVKITELLNKTDNRPLKKLEAQETLNEEDKAKIAKSKKKMRQKVQRGECQTTIQGQARNKRKQETKSLKQKEAKKKSKAEKEKGKTKQEKLKEKVKREKKEKVKMKEKEEVTKAKPACKADKTLATQRRLEERQRQQMILEEMKKPTEDMCLTDHQPLPDFSRVPGLTLPSGAFSDCLTIVEFLHSFGKVLGFDPAKDVPSLGVLQEGLLCQGDSLGEVQDLLVRLLKAALHDPGFPSYCQSLKILGEKVSEIPLTRDNVSEILRCFLMAYGVEPALCDRLRTQPFQAQPPQQKAAVLAFLVHELNGSTLIINEIDKTLESMSSYRKNKWIVEGRLRRLKTVLAKRTGRSEVEMEGPEECLGRRRSSRIMEETSGMEEEEEEESIAAVPGRRGRRDGEVDATASSIPELERQIEKLSKRQLFFRKKLLHSSQMLRAVSLGQDRYRRRYWVLPYLAGIFVEGTEGNLVPEEVIKKETDSLKVAAHASLNPALFSMKMELAGSNTTASSPARARGRPRKTKPGSMQPRHLKSPVRGQDSEQPQAQLQPEAQLHAPAQPQPQLQLQLQSHKGFLEQEGSPLSLGQSQHDLSQSAFLSWLSQTQSHSSLLSSSVLTPDSSPGKLDPAPSQPPEEPEPDEAESSPDPQALWFNISAQMPCNAAPTPPPAVSEDQPTPSPQQLASSKPMNRPSAANPCSPVQFSSTPLAGLAPKRRAGDPGEMPQSPTGLGQPKRRGRPPSKFFKQMEQRYLTQLTAQPVPPEMCSGWWWIRDPEMLDAMLKALHPRGIREKALHKHLNKHRDFLQEVCLRPSADPIFEPRQLPAFQEGIMSWSPKEKTYETDLAVLQWVEELEQRVIMSDLQIRGWTCPSPDSTREDLAYCEHLSDSQEDITWRGRGREGLAPQRKTTNPLDLAVMRLAALEQNVERRYLREPLWPTHEVVLEKALLSTPNGAPEGTTTEISYEITPRIRVWRQTLERCRSAAQVCLCLGQLERSIAWEKSVNKVTCLVCRKGDNDEFLLLCDGCDRGCHIYCHRPKMEAVPEGDWFCTVCLAQQVEGEFTQKPGFPKRGQKRKSGYSLNFSEGDGRRRRVLLRGRESPAAGPRYSEEGLSPSKRRRLSMRNHHSDLTFCEIILMEMESHDAAWPFLEPVNPRLVSGYRRIIKNPMDFSTMRERLLRGGYTSSEEFAADALLVFDNCQTFNEDDSEVGKAGHIMRRFFESRWEEFYQGKQANL

SEQ ID NO: 863048 - protein, 1296 aa, Homo sapiens
FYLLLLFPLTFSFSFLLVFPFSFSALDFFLASFCFKLVVSCFRLFLACPWIVVWHSLPKVKRGRGRPPKVKITELLNKTDNRPLKKLEAQETLNEEDKAKIAKSKKKMRQKVQRGECQTTIQGQARNKRKQETKSLKQKEAKKKSKAEKEKGKTKQEKLKEKVKREKKEKVKMKEKEEVTKAKPACKADKTLATQRRLEERQRQQMILEEMKKPTEDMCLTDHQPLPDFSRVPGLTLPSGAFSDCLTIVEFLHSFGKVLGFDPAKDVPSLGVLQEGLLCQGDSLGEVQDLLVRLLKAALHDPGFPSYCQSLKILGEKVSEIPLTRDNVSEILRCFLMAYGVEPALCDRLRTQPFQAQPPQQKAAVLAFLVHELNGSTLIINEIDKTLESMSSYRKNKWIVEGRLRRLKTVLAKRTGRSEVEMEGPEECLGRRRSSRIMEETSGMEEEEEEESIAAVPGRRGRRDGEVDATASSIPELERQIEKLSKRQLFFRKKLLHSSQMLRAVSLGQDRYRRRYWVLPYLAGIFVEGTEGNLVPEEVIKKETDSLKVAAHASLNPALFSMKMELAGSNTTASSPARARGRPRKTKPGSMQPRHLKSPVRGQDSEQPQAQLQPEAQLHAPAQPQPQLQLQLQSHKGFLEQEGSPLSLGQSQHDLSQSAFLSWLSQTQSHSSLLSSSVLTPDSSPGKLDPAPSQPPEEPEPDEAESSPDPQALWFNISAQMPCNAAPTPPPAVSEDQPTPSPQQLASSKPMNRPSAANPCSPVQFSSTPLAGLAPKRRAGDPGEMPQSPTGLGQPKRRGRPPSKFFKQMEQRYLTQLTAQPVPPEMCSGWWWIRDPEMLDAMLKALHPRGIREKALHKHLNKHRDFLQEVCLRPSADPIFEPRQLPAFQEGIMSWSPKEKTYETDLAVLQWVEELEQRVIMSDLQIRGWTCPSPDSTREDLAYCEHLSDSQEDITWRGRGREGLAPQRKTTNPLDLAVMRLAALEQNVERRYLREPLWPTHEVVLEKALLSTPNGAPEGTTTEISYEITPRIRVWRQTLERCRSAAQVCLCLGQLERSIAWEKSVNKVTCLVCRKGDNDEFLLLCDGCDRGCHIYCHRPKMEAVPEGDWFCTVCLAQQVEGEFTQKPGFPKRGQKRKSGYSLNFSEGDGRRRRVLLRGRESPAAGPRYSEEGLSPSKRRRLSMRNHHSDLTFCEIILMEMESHDAAWPFLEPVNPRLVSGYRRIIKNPMDFSTMRERLLRGGYTSSEEFAADALLVFDNCQTFNEDDSEVGKAGHIMRRFFESRWEEFYQGKQANL

SEQ ID NO: 863049 - protein, 1884 aa, Homo sapiens
VLAPGARPCEPLVPRGETSPEPGWTPLPQEMEANDHFNFTGLPPAPAASGLKPSPSSGEGLYTNGSPMNFPQQGKSLNGDVNVNGLSTVSHTTTSGILNSAPHSSSTSHLHHPSVAYDCLWNYSQYPSANPGSNLKDPPLLSQFSGGQYPLNGILGGSRQPSSPSHNTNLRAGSQEFWANGTQSPMGLNFDSQELYDSFPDQNFEVMPNGPPSFFTSPQTSPMLGSSIQTFAPSQEVGSGIHPDEAAEKEMTSVVAENGTGLVGSLELEEEQPELKMCGYNGSVPSVESLHQEVSVLVPDPTVSCLDDPSHLPDQLEDTPILSEDSLEPFNSLAPEPVSGGLYGIDDTELMGAEDKLPLEDSPVISALDCPSLNNATAFSLLADDSQTSTSIFASPTSPPVLGESVLQDNSFDLNNGSDAEQEEMETQSSDFPPSLTQPAPDQSSTIQLHPATSPAVSPTTSPAVSLVVSPAASPEISPEVCPAASTVVSPAVFSVVSPASSAVLPAVSLEVPLTASVTSPKASPVTSPAAAFPTASPANKDVSSFLETTADVEEITGEGLTASGSGDVMRRRIATPEEVRLPLQHGWRREVRIKKGSHRWQGETWYYGPCGKRMKQFPEVIKYLSRNVVHSVRREHFSFSPRMPVGDFFEERDTPEGLQWVQLSAEEIPSRIQAITGKRGRPRNTEKAKTKEVPKVKRGRGRPPKVKITELLNKTDNRPLKKLEAQETLNEEDKAKIAKSKKKMRQKVQRGECQTTIQGQARNKRKQETKSLKQKEAKKKSKAEKEKGKTKQEKLKEKVKREKKEKVKMKEKEEVTKAKPACKADKTLATQRRLEERQRQQMILEEMKKPTEDMCLTDHQPLPDFSRVPGLTLPSGAFSDCLTIVEFLHSFGKVLGFDPAKDVPSLGVLQEGLLCQGDSLGEVQDLLVRLLKAALHDPGFPSYCQSLKILGEKVSEIPLTRDNVSEILRCFLMAYGVEPALCDRLRTQPFQAQPPQQKAAVLAFLVHELNGSTLIINEIDKTLESMSSYRKNKWIVEGRLRRLKTVLAKRTGRSEVEMEGPEECLGRRRSSRIMEETSGMEEEEEEESIAAVPGRRGRRDGEVDATASSIPELERQIEKLSKRQLFFRKKLLHSSQMLRAVSLGQDRYRRRYWVLPYLAGIFVEGTEGNLVPEEVIKKETDSLKVAAHASLNPALFSMKMELAGSNTTASSPARARGRPRKTKPGSMQPRHLKSPVRGQDSEQPQAQLQPEAQLHAPAQPQPQLQLQLQSHKGFLEQEGSPLSLGQSQHDLSQSAFLSWLSQTQSHSSLLSSSVLTPDSSPGKLDPAPSQPPEEPEPDEAESSPDPQALWFNISAQMPCNAAPTPPPAVSEDQPTPSPQQLASSKPMNRPSAANPCSPVQFSSTPLAGLAPKRRAGDPGEMPQSPTGLGQPKRRGRPPSKFFKQMEQRYLTQLTAQPVPPEMCSGWWWIRDPEMLDAMLKALHPRGIREKALHKHLNKHRDFLQEVCLRPSADPIFEPRQLPAFQEGIMSWSPKEKTYETDLAVLQWVEELEQRVIMSDLQIRGWTCPSPDSTREDLAYCEHLSDSQEDITWRGRGREGLAPQRKTTNPLDLAVMRLAALEQNVERRYLREPLWPTHEVVLEKALLSTPNGAPEGTTTEISYEITPRIRVWRQTLERCRSAAQVCLCLGQLERSIAWEKSVNKVQVEGEFTQKPGFPKRGQKRKSGYSLNFSEGDGRRRRVLLRGRESPAAGPRYSEEGLSPSKRRRLSMRNHHSDLTFCEIILMEMESHDAAWPFLEPVNPRLVSGYRRIIKNPMDFSTMRERLLRGGYTSSEEFAADALLVFDNCQTFNEDDSEVGKAGHIMRRFFESRWEEFYQGKQANL

SEQ ID NO: 863050 - protein, 668 aa, Homo sapiens
CINALGAYHMVTAGGANSLVIEPAHDLSQSAFLSWLSQTQSHSSLLSSSVLTPDSSPGKLDPAPSQPPEEPEPDEAESSPDPQALWFNISAQMPCNAAPTPPPAVSEDQPTPSPQQLASSKPMNRPSAANPCSPVQFSSTPLAGLAPKRRAGDPGEMPQSPTGLGQPKRRGRPPSKFFKQMEQRYLTQLTAQPVPPEMCSGWWWIRDPEMLDAMLKALHPRGIREKALHKHLNKHRDFLQEVCLRPSADPIFEPRQLPAFQEGIMSWSPKEKTYETDLAVLQWVEELEQRVIMSDLQIRGWTCPSPDSTREDLAYCEHLSDSQEDITWRGRGREGLAPQRKTTNPLDLAVMRLAALEQNVERRYLREPLWPTHEVVLEKALLSTPNGAPEGTTTEISYEITPRIRVWRQTLERCRSAAQVCLCLGQLERSIAWEKSVNKVTCLVCRKGDNDEFLLLCDGCDRGCHIYCHRPKMEAVPEGDWFCTVCLAQQVEGEFTQKPGFPKRGQKRKSGYSLNFSEGDGRRRRVLLRGRESPAAGPRYSEEGLSPSKRRRLSMRNHHSDLTFCEIILMEMESHDAAWPFLEPVNPRLVSGYRRIIKNPMDFSTMRERLLRGGYTSSEEFAADALLVFDNCQTFNEDDSEVGKAGHIMRRFFESRWEEFYQGKQANL

SEQ ID NO: 863051 - protein, 79 aa, Homo sapiens [sequence omitted]

SEQ ID NO: 863052 - protein, 1191 aa, Homo sapiens
VLAPGARPCEPLVPRGETSPEPGWTPLPQEMEANDHFNFTGLPPAPAASGLKPSPSSGEGLYTNGSPMNFPQQGKSLNGDVNVNGLSTVSHTTTSGILNSAPHSSSTSHLHHPSVAYDCLWNYSQYPSANPGSNLKDPPLLSQFSGGQYPLNGILGGSRQPSSPSHNTNLRAGSQEFWANGTQSPMGLNFDSQELYDSFPDQNFEVMPNGPPSFFTSPQTSPMLGSSIQTFAPSQEVGSGIHPDEAAEKEMTSVVAENGTGLVGSLELEEEQPELKMCGYNGSVPSVESLHQEVSVLVPDPTVSCLDDPSHLPDQLEDTPILSEDSLEPFNSLAPEPVSGGLYGIDDTELMGAEDKLPLEDSPVISALDCPSLNNATAFSLLADDSQTSTSIFASPTSPPVLGESVLQDNSFDLNNGSDAEQEEMETQSSDFPPSLTQPAPDQSSTIQLHPATSPAVSPTTSPAVSLVVSPAASPEISPEVCPAASTVVSPAVFSVVSPASSAVLPAVSLEVPLTASVTSPKASPVTSPAAAFPTASPANKDVSSFLETTADVEEITGEGLTASGSGDVMRRRIATPEEVRLPLQHGWRREVRIKKGSHRWQGETWYYGPCGKRMKQFPEVIKYLSRNVVHSVRREHFSFSPRMPVGDFFEERDTPEGLQWVQLSAEEIPSRIQAITGKRGRPRNTEKAKTKEVPKVKRGRGRPPKVKITELLNKTDNRPLKKLEAQETLNEEDKAKIAKSKKKMRQKVQRGECQTTIQGQARNKRKQETKSLKQKEAKKKSKAEKEKGKTKQEKLKEKVKREKKEKVKMKEKEEVTKAKPACKADKTLATQRRLEERQRQQMILEEMKKPTEDMCLTDHQPLPDFSRVPGLTLPSGAFSDCLTIVEFLHSFGKVLGFDPAKDVPSLGVLQEGLLCQGDSLGEVQDLLVRLLKAALHDPGFPSYCQSLKILGEKVSEIPLTRDNVSEILRCFLMAYGVEPALCDRLRTQPFQAQPPQQKAAVLAFLVHELNGSTLIINEIDKTLESMSSYRKNKWIVEGRLRRLKTVLAKRTGRSEVEMEGPEECLGRRRSSRIMEETSGMEEEEEEESIAAVPGRRGRRDGEVDATASSIPELERQIEKLSKRQLFFRKKLLHSSQMLRAVSLGQDRYRRRYWVLPYLAGIFVEGTEGNLGLRKKKEKTKQEKLKEKVKR

SEQ ID NO: 863053 - protein, 958 aa, Homo sapiens
VLAPGARPCEPLVPRGETSPEPGWTPLPQEMEANDHFNFTGLPPAPAASGLKPSPSSGEGLYTNGSPMNFPQQGKSLNGDVNVNGLSTVSHTTTSGILNSAPHSSSTSHLHHPSVAYDCLWNYSQYPSANPGSNLKDPPLLSQFSGGQYPLNGILGGSRQPSSPSHNTNLRAGSQEFWANGTQSPMGLNFDSQELYDSFPDQNFEVMPNGPPSFFTSPQTSPMLGSSIQTFAPSQEVGSGIHPDEAAEKEMTSVVAENGTGLVGSLELEEEQPELKMCGYNGSVPSVESLHQEVSVLVPDPTVSCLDDPSHLPDQLEDTPILSEDSLEPFNSLAPEPVSGGLYGIDDTELMGAEDKLPLEDSPVISALDCPSLNNATAFSLLADDSQTSTSIFASPTSPPVLGESVLQDNSFDLNNGSDAEQEEMETQSSDFPPSLTQPAPDQSSTIQLHPATSPAVSPTTSPAVSLVVSPAASPEISPEVCPAASTVVSPAVFSVVSPASSAVLPAVSLEVPLTASVTSPKASPVTSPAAAFPTASPANKDVSSFLETTADVEEITGEGLTASGSGDVMRRRIATPEEVRLPLQHGWRREVRIKKGSHRWQGETWYYGPCGKRMKQFPEVIKYLSRNVVHSVRREHFSFSPRMPVGDFFEERDTPEGLQWVQLSAEEIPSRIQAITGKRGRPRNTEKAKTKEVPKVKRGRGRPPKVKITELLNKTDNRPLKKLEAQETLNEEDKAKIAKSKKKMRQKVQRGECQTTIQGQARNKRKQETKSLKQKEAKKKSKAEKEKGKTKQEKLKEKVKREKKEKVKMKEKEEVTKAKPACKADKTLATQRRLEERQRQQMILEEMKKPTEDMCLTDHQPLPDFSRVPGLTLPSGAFSDCLTIVEFLHSFGKVLGFDPAKDVPSLGVLQEGLLCQGDSLGEVQDLLVRLLKAALHDPGFPSYCQVSASPSQSNQDK

SEQ ID NO: 863054 - protein, 469 aa, Homo sapiens
VLAPGARPCEPLVPRGETSPEPGWTPLPQEMEANDHFNFTGLPPAPAASGLKPSPSSGEGLYTNGSPMNFPQQGKSLNGDVNVNGLSTVSHTTTSGILNSAPHSSSTSHLHHPSVAYDCLWNYSQYPSANPGSNLKDPPLLSQFSGGQYPLNGILGGSRQPSSPSHNTNLRAGSQEFWANGTQSPMGLNFDSQELYDSFPDQNFEVMPNGPPSFFTSPQTSPMLGSSIQTFAPSQEVGSGIHPDEAAEKEMTSVVAENGTGLVGSLELEEEQPELKMCGYNGSVPSVESLHQEVSVLVPDPTVSCLDDPSHLPDQLEDTPILSEDSLEPFNSLAPEPVSGGLYGIDDTELMGAEDKLPLEDSPVISALDCPSLNNATAFSLLADDSQTSTSIFASPTSPPVLGESVLQEDTTYRALIVMRSERCTGTMISRSTQASDCPTILNPAMLSDSVMLVIQGTVRQILQICFPF

SEQ ID NO: 863055 - protein, 110 aa, Homo sapiens
IWVLGWNSFFSCSPFTLEPPFPFFVLPLHPIPYSPAVRLTRLWRVCPATGKTSGLLKAGSGGRDQTESRASERREVGRVKHSQGFGLKCDALAPSLGLGPYQGPGWFRVK

SEQ ID NO: 863056 - protein, 210 aa, Homo sapiens
MEIEEEWDEATKSLVRAHIKFDTPLELPVRADRHLEIRFRAQKNHCSIDIVVNVQEEVLVVDNITQGNRLAAWEAWQGEMDKGGGAGKTVMKDSLKTVLSQTGGSVLSVGQVEGEFTQKPGFPKRGQKRKSGYSLNFSEGDGRRRRVLLRGRESPAAGPRYSEEGLSPSKRRRLSMRNHHSDLTFCEIILMDLSALWQPACGYELDSYLS

SEQ ID NO: 863057 - protein, 1919 aa, Homo sapiens
HANQPVNQKDPGRTEALGGTAEEQMILEEMKNADRGYVSDDHQLLPDFSRVPGADIAQQGKSLNGDVNVNGLSTVSHTTTSGILNSAPHSSSTSHLHHPSVAYDCLWNYSQYPSANPGSNLKDPPLLSQFSGGQYPLNGILGGSRQPSSPSHNTNLRAGSQEFWANGTQSPMGLNFDSQELYDSFPDQNFEVMPNGPPSFFTSPQTSPMLGSSIQTFAPSQEVGSGIHPDEAAEKEMTSVVAENGTGLVGSLELEEEQPELKMCGYNGSVPSVESLHQEVSVLVPDPTVSCLDDPSHLPDQLEDTPILSEDSLEPFNSLAPEPVSGGLYGIDDTELMGAEDKLPLEDSPVISALDCPSLNNATAFSLLADDSQTSTSIFASPTSPPVLGESVLQDNSFDLNNGSDAEQEEMETQSSDFPPSLTQPAPDQSSTIQLHPATSPAVSPTTSPAVSLVVSPAASPEISPEVCPAASTVVSPAVFSVVSPASSAVLPAVSLEVPLTASVTSPKASPVTSPAAAFPTASPANKDVSSFLETTADVEEITGEGLTASGSGDVMRRRIATPEEVRLPLQHGWRREVRIKKGSHRWQGETWYYGPCGKRMKQFPEVIKYLSRNVVHSVRREHFSFSPRMPVGDFFEERDTPEGLQWVQLSAEEIPSRIQAITGKRGRPRNTEKAKTKEVPKVKRGRGRPPKVKITELLNKTDNRPLKKLEAQETLNEEDKAKIAKSKKKMRQKVQRGECQTTIQGQARNKRKQETKSLKQKEAKKKSKAEKEKGKTKQEKLKEKVKREKKEKVKMKEKEEVTKAKPACKADKTLATQRRLEERQRQQMILEEMKKPTEDMCLTDHQPLPDFSRVPGLTLPSGAFSDCLTIVEFLHSFGKVLGFDPAKDVPSLGVLQEGLLCQGDSLGEVQDLLVRLLKAALHDPGFPSYCQSLKILGEKVSEIPLTRDNVSEILRCFLMAYGVEPALCDRLRTQPFQAQPPQQKAAVLAFLVHELNGSTLIINEIDKTLESMSSYRKNKWIVEGRLRRLKTVLAKRTGRSEVEMEGPEECLGRRRSSRIMEETSGMEEEEEEESIAAVPGRRGRRDGEVDATASSIPELERQIEKLSKRQLFFRKKLLHSSQMLRAVSLGQDRYRRRYWVLPYLAGIFVEGTEGNLVPEEVIKKETDSLKVAAHASLNPALFSMKMELAGSNTTASSPARARGRPRKTKPGSMQPRHLKSPVRGQDSEQPQAQLQPEAQLHAPAQPQPQLQLQLQSHKGFLEQEGSPLSLGQSQHDLSQSAFLSWLSQTQSHSSLLSSSVLTPDSSPGKLDPAPSQPPEEPEPDEAESSPDPQALWFNISAQMPCNAAPTPPPAVSEDQPTPSPQQLASSKPMNRPSAANPCSPVQFSSTPLAGLAPKRRAGDPGEMPQSPTGLGQPKRRGRPPSKFFKQMEQRYLTQLTAQPVPPEMCSGWWWIRDPEMLDAMLKALHPRGIREKALHKHLNKHRDFLQEVCLRPSADPIFEPRQLPAFQEGIMSWSPKEKTYETDLAVLQWVEELEQRVIMSDLQIRGWTCPSPDSTREDLAYCEHLSDSQEDITWRGRGREGLAPQRKTTNPLDLAVMRLAALEQNVERRYLREPLWPTHEVVLEKALLSTPNGAPEGTTTEISYEITPRIRVWRQTLERCRSAAQVCLCLGQLERSIAWEKSVNKVTCLVCRKGDNDEFLLLCDGCDRGCHIYCHRPKMEAVPEGDWFCTVCLAQQVEGEFTQKPGFPKRGQKRKSGYSLNFSEGDGRRRRVLLRGRESPAAGPRYSEEGLSPSKRRRLSMRNHHSDLTFCEIILMEMESHDAAWPFLEPVNPRLVSGYRRIIKNPMDFSTMRERLLRGGYTSSEEFAADALLVFDNCQTFNEDDSEVGKAGHIMRRFFESRWEEFYQGKQANL

SEQ ID NO: 863058 - protein, 1657 aa, Homo sapiens
MCGYNGSVPSVESLHQEVSVLVPDPTVSCLDDPSHLPDQLEDTPILSEDSLEPFNSLAPEPVSGGLYGIDDTELMGAEDKLPLEDSPVISALDCPSLNNATAFSLLADDSQTSTSIFASPTSPPVLGESVLQDNSFDLNNGSDAEQEEMETQSSDFPPSLTQPAPDQSSTIQLHPATSPAVSPTTSPAVSLVVSPAASPEISPEVCPAASTVVSPAVFSVVSPASSAVLPAVSLEVPLTASVTSPKASPVTSPAAAFPTASPANKDVSSFLETTADVEEITGEGLTASGSGDVMRRRIATPEEVRLPLQHGWRREVRIKKGSHRWQGETWYYGPCGKRMKQFPEVIKYLSRNVVHSVRREHFSFSPRMPVGDFFEERDTPEGLQWVQLSAEEIPSRIQAITGKRGRPRNTEKAKTKEVPKVKRGRGRPPKVKITELLNKTDNRPLKKLEAQETLNEEDKAKIAKSKKKMRQKVQRGECQTTIQGQARNKRKQETKSLKQKEAKKKSKAEKEKGKTKQEKLKEKVKREKKEKVKMKEKEEVTKAKPACKADKTLATQRRLEERQRQQMILEEMKKPTEDMCLTDHQPLPDFSRVPGLTLPSGAFSDCLTIVEFLHSFGKVLGFDPAKDVPSLGVLQEGLLCQGDSLGEVQDLLVRLLKAALHDPGFPSYCQSLKILGEKVSEIPLTRDNVSEILRCFLMAYGVEPALCDRLRTQPFQAQPPQQKAAVLAFLVHELNGSTLIINEIDKTLESMSSYRKNKWIVEGRLRRLKTVLAKRTGRSEVEMEGPEECLGRRRSSRIMEETSGMEEEEEEESIAAVPGRRGRRDGEVDATASSIPELERQIEKLSKRQLFFRKKLLHSSQMLRAVSLGQDRYRRRYWVLPYLAGIFVEGTEGNLVPEEVIKKETDSLKVAAHASLNPALFSMKMELAGSNTTASSPARARGRPRKTKPGSMQPRHLKSPVRGQDSEQPQAQLQPEAQLHAPAQPQPQLQLQLQSHKGFLEQEGSPLSLGQSQHDLSQSAFLSWLSQTQSHSSLLSSSVLTPDSSPGKLDPAPSQPPEEPEPDEAESSPDPQALWFNISAQMPCNAAPTPPPAVSEDQPTPSPQQLASSKPMNRPSAANPCSPVQFSSTPLAGLAPKRRAGDPGEMPQSPTGLGQPKRRGRPPSKFFKQMEQRYLTQLTAQPVPPEMCSGWWWIRDPEMLDAMLKALHPRGIREKALHKHLNKHRDFLQEVCLRPSADPIFEPRQLPAFQEGIMSWSPKEKTYETDLAVLQWVEELEQRVIMSDLQIRGWTCPSPDSTREDLAYCEHLSDSQEDITWRGRGREGLAPQRKTTNPLDLAVMRLAALEQNVERRYLREPLWPTHEVVLEKALLSTPNGAPEGTTTEISYEITPRIRVWRQTLERCRSAAQVCLCLGQLERSIAWEKSVNKVTCLVCRKGDNDEFLLLCDGCDRGCHIYCHRPKMEAVPEGDWFCTVCLAQQVEGEFTQKPGFPKRGQKRKSGYSLNFSEGDGRRRRVLLRGRESPAAGPRYSEEGLSPSKRRRLSMRNHHSDLTFCEIILMEMESHDAAWPFLEPVNPRLVSGYRRIIKNPMDFSTMRERLLRGGYTSSEEFAADALLVFDNCQTFNEDDSEVGKAGHIMRRFFESRWEEFYQGKQANL

SEQ ID NO: 863059 - protein, 1933 aa, Homo sapiens; identical to SEQ ID NO: 863043

SEQ ID NO: 863060 - protein, 1933 aa, Homo sapiens; identical to SEQ ID NO: 863043

SEQ ID NO: 863061 - protein, 959 aa, Homo sapiens
QVAGITGPCHHTWLIFVFLVETGFHHVGQAGLELLTSGDPPVLASQSAGITGVSHHTWPSLNLSPSISRLKTVLAKRTGRSEVEMEGPEECLGRRRSSRIMEETSGMEEEEEEESIAAVPGRRGRRDGEVDATASSIPELERQIEKLSKRQLFFRKKLLHSSQMLRAVSLGQDRYRRRYWVLPYLAGIFVEGTEGNLVPEEVIKKETDSLKVAAHASLNPALFSMKMELAGSNTTASSPARARGRPRKTKPGSMQPRHLKSPVRGQDSEQPQAQLQPEAQLHAPAQPQPQLQLQLQSHKGFLEQEGSPLSLGQSQHDLSQSAFLSWLSQTQSHSSLLSSSVLTPDSSPGKLDPAPSQPPEEPEPDEAESSPDPQALWFNISAQMPCNAAPTPPPAVSEDQPTPSPQQLASSKPMNRPSAANPCSPVQFSSTPLAGLAPKRRAGDPGEMPQSPTGLGQPKRRGRPPSKFFKQMEQRYLTQLTAQPVPPEMCSGWWWIRDPEMLDAMLKALHPRGIREKALHKHLNKHRDFLQEVCLRPSADPIFEPRQLPAFQEGIMSWSPKEKTYETDLAVLQWVEELEQRVIMSDLQIRGWTCPSPDSTREDLAYCEHLSDSQEDITWRGRGREGLAPQRKTTNPLDLAVMRLAALEQNVERRYLREPLWPTHEVVLEKALLSTPNGAPEGTTTEISYEITPRIRVWRQTLERCRSAAQVCLCLGQLERSIAWEKSVNKVTCLVCRKGDNDEFLLLCDGCDRGCHIYCHRPKMEAVPEGDWFCTVCLAQQVEGEFTQKPGFPKRGQKRKSGYSLNFSEGDGRRRRVLLRGRESPAAGPRYSEEGLSPSKRRRLSMRNHHSDLTFCEIILMEMESHDAAWPFLEPVNPRLVSGYRRIIKNPMDFSTMRERLLRGGYTSSEEFAADALLVFDNCQTFNEDDSEVGKAGHIMRRFFESRWEEFYQGKQANL

SEQ ID NO: 863062 - protein, 793 aa, Homo sapiens
ETTMDAALQIAAEWVLPYLAGIFVEGTEGNLVPEEVIKKETDSLKVAAHASLNPALFSMKMELAGSNTTASSPARARGRPRKTKPGSMQPRHLKSPVRGQDSEQPQAQLQPEAQLHAPAQPQPQLQLQLQSHKGFLEQEGSPLSLGQSQHDLSQSAFLSWLSQTQSHSSLLSSSVLTPDSSPGKLDPAPSQPPEEPEPDEAESSPDPQALWFNISAQMPCNAAPTPPPAVSEDQPTPSPQQLASSKPMNRPSAANPCSPVQFSSTPLAGLAPKRRAGDPGEMPQSPTGLGQPKRRGRPPSKFFKQMEQRYLTQLTAQPVPPEMCSGWWWIRDPEMLDAMLKALHPRGIREKALHKHLNKHRDFLQEVCLRPSADPIFEPRQLPAFQEGIMSWSPKEKTYETDLAVLQWVEELEQRVIMSDLQIRGWTCPSPDSTREDLAYCEHLSDSQEDITWRGRGREGLAPQRKTTNPLDLAVMRLAALEQNVERRYLREPLWPTHEVVLEKALLSTPNGAPEGTTTEISYEITPRIRVWRQTLERCRSAAQVCLCLGQLERSIAWEKSVNKVTCLVCRKGDNDEFLLLCDGCDRGCHIYCHRPKMEAVPEGDWFCTVCLAQQVEGEFTQKPGFPKRGQKRKSGYSLNFSEGDGRRRRVLLRGRESPAAGPRYSEEGLSPSKRRRLSMRNHHSDLTFCEIILMEMESHDAAWPFLEPVNPRLVSGYRRIIKNPMDFSTMRERLLRGGYTSSEEFAADALLVFDNCQTFNEDDSEVGKAGHIMRRFFESRWEEFYQGKQANL

SEQ ID NO: 863063 - protein, 1661 aa, Homo sapiens
VLAPGARPCEPLVPRGETSPEPGWTPLPQEMEANDHFNFTGLPPAPAASGLKPSPSSGEGLYTNGSPMNFPQQGKSLNGDVNVNGLSTVSHTTTSGILNSAPHSSSTSHLHHPSVAYDCLWNYSQYPSANPGSNLKDPPLLSQFSGGQYPLNGILGGSRQPSSPSHNTNLRAGSQEFWANGTQSPMGLNFDSQELYDSFPDQNFEVMPNGPPSFFTSPQTSPMLGSSIQTFAPSQEVGSGIHPDEAAEKEMTSVVAENGTGLVGSLELEEEQPELKMCGYNGSVPSVESLHQEVSVLVPDPTVSCLDDPSHLPDQLEDTPILSEDSLEPFNSLAPEPVSGGLYGIDDTELMGAEDKLPLEDSPVISALDCPSLNNATAFSLLADDSQTSTSIFASPTSPPVLGESVLQDNSFDLNNGSDAEQEEMETQSSDFPPSLTQPAPDQSSTIQLHPATSPAVSPTTSPAVSLVVSPAASPEISPEVCPAASTVVSPAVFSVVSPASSAVLPAVSLEVPLTASVTSPKASPVTSPAAAFPTASPANKDVSSFLETTADVEEITGEGLTASGSGDVMRRRIATPEEVRLPLQHGWRREVRIKKGSHRWQGETWYYGPCGKRMKQFPEVIKYLSRNVVHSVRREHFSFSPRMPVGDFFEERDTPEGLQWVQLSAEEIPSRIQAITGKRGRPRNTEKAKTKEVPKVKRGRGRPPKVKITELLNKTDNRPLKKLEAQETLNEEDKAKIAKSKKKMRQKVQRGECQTTIQGQARNKRKQETKSLKQKEAKKKSKAEKEKGKTKQEKLKEKVKREKKEKVKMKEKEEVTKAKPACKADKTLATQRRLEERQRQQMILEEMKKPTEDMCLTDHQPLPDFSRVPGLTLPSGAFSDCLTIVEFLHSFGKVLGFDPAKDVPSLGVLQEGLLCQGDSLGEVQDLLVRLLKAALHDPGFPSYCQSLKILGEKVSEIPLTRDNVSEILRCFLMAYGVEPALCDRLRTQPFQAQPPQQKAAVLAFLVHELNGSTLIINEIDKTLESMSSYRKNKWIVEGRLRRLKTVLAKRTGRSEVEMEGPEECLGRRRSSRIMEETSGMEEEEEEESIAAVPGRRGRRDGEVDATASSIPELERQIEKLSKRQLFFRKKLLHSSQMLRAVSLGQDRYRRRYWVLPYLAGIFVEGTEGNLVPEEVIKKETDSLKVAAHASLNPALFSMKMELAGSNTTASSPARARGRPRKTKPGSMQPRHLKSPVRGQDSEQPQAQLQPEAQLHAPAQPQPQLQLQLQSHKGFLEQEGSPLSLGQSQHDLSQSAFLSWLSQTQSHSSLLSSSVLTPDSSPGKLDPAPSQPPEEPEPDEAESSPDPQALWFNISAQMPCNAAPTPPPAVSEDQPTPSPQQLASSKPMNRPSAANPCSPVQFSSTPLAGLAPKRRAGDPGEMPQSPTGLGQPKRRGRPPSKFFKQMEQRYLTQLTAQPVPPEMCSGWWWIRDPEMLDAMLKALHPRGIREKALHKHLNKHRDFLQEVCLRPSADPIFEPRQLPAFQEGIMSWSPKEKTYETDLAVLQWVEELEQRVIMSDLQIRGWTCPSPDSTREDLAYCEHLSDSQEDITWRGRGREGLAPQRKTTNPLDLAVMRLAALEQNVERRYLREPLWPTHEVVLEKALLSTPNGAPEGTTTEM

SEQ ID NO: 863064 - protein, 1127 aa, Homo sapiens
VLAPGARPCEPLVPRGETSPEPGWTPLPQEMEANDHFNFTGLPPAPAASGLKPSPSSGEGLYTNGSPMNFPQQGKSLNGDVNVNGLSTVSHTTTSGILNSAPHSSSTSHLHHPSVAYDCLWNYSQYPSANPGSNLKDPPLLSQFSGGQYPLNGILGGSRQPSSPSHNTNLRAGSQEFWANGTQSPMGLNFDSQELYDSFPDQNFEVMPNGPPSFFTSPQTSPMLGSSIQTFAPSQEVGSGIHPDEAAEKEMTSVVAENGTGLVGSLELEEEQPELKMCGYNGSVPSVESLHQEVSVLVPDPTVSCLDDPSHLPDQLEDTPILSEDSLEPFNSLAPEPVSGGLYGIDDTELMGAEDKLPLEDSPVISALDCPSLNNATAFSLLADDSQTSTSIFASPTSPPVLGESVLQDNSFDLNNGSDAEQEEMETQSSDFPPSLTQPAPDQSSTIQLHPATSPAVSPTTSPAVSLVVSPAASPEISPEVCPAASTVVSPAVFSVVSPASSAVLPAVSLEVPLTASVTSPKASPVTSPAAAFPTASPANKDVSSFLETTADVEEITGEGLTASGSGDVMRRRIATPEEVRLPLQHGWRREVRIKKGSHRWQGETWYYGPCGKRMKQFPEVIKYLSRNVVHSVRREHFSFSPRMPVGDFFEERDTPEGLQWVQLSAEEIPSRIQAITGKRGRPRNTEKAKTKEVPKVKRGRGRPPKVKITELLNKTDNRPLKKLEAQETLNEEDKAKIAKSKKKMRQKVQRGECQTTIQGQARNKRKQETKSLKQKEAKKKSKAEKEKGKTKQEKLKEKVKREKKEKVKMKEKEEVTKAKPACKADKTLATQRRLEERQRQQMILEEMKKPTEDMCLTDHQPLPDFSRVPGLTLPSGAFSDCLTIVEFLHSFGKVLGFDPAKDVPSLGVLQEGLLCQGDSLGEVQDLLVRLLKAALHDPGFPSYCQSLKILGEKVSEIPLTRDNVSEILRCFLMAYGVEPALCDRLRTQPFQAQPPQQKAAVLAFLVHELNGSTLIINEIDKTLESMSSYRKNKWIVEGRLRRLKTVLAKRTGRSEVEMEGPEECLGRRRSSRIMEETSGMEEEEEEESIAAVPGRRGRRDGEVDATASSIPELERQIEKLSKVLCF

SEQ ID NO: 863065 - protein, 587 aa, Homo sapiens
VLAPGARPCEPLVPRGETSPEPGWTPLPQEMEANDHFNFTGLPPAPAASGLKPSPSSGEGLYTNGSPMNFPQQGKSLNGDVNVNGLSTVSHTTTSGILNSAPHSSSTSHLHHPSVAYDCLWNYSQYPSANPGSNLKDPPLLSQFSGGQYPLNGILGGSRQPSSPSHNTNLRAGSQEFWANGTQSPMGLNFDSQELYDSFPDQNFEVMPNGPPSFFTSPQTSPMLGSSIQTFAPSQEVGSGIHPDEAAEKEMTSVVAENGTGLVGSLELEEEQPELKMCGYNGSVPSVESLHQEVSVLVPDPTVSCLDDPSHLPDQLEDTPILSEDSLEPFNSLAPEPVSGGLYGIDDTELMGAEDKLPLEDSPVISALDCPSLNNATAFSLLADDSQTSTSIFASPTSPPVLGESVLQDNSFDLNNGSDAEQEEMETQSSDFPPSLTQPAPDQSSTIQLHPATSPAVSPTTSPAVSLVVSPAASPEISPEVCPAASTVVSPAVFSVVSPASSAVLPAVSLEVPLTASVTSPKASPVTSPAAAFPTASPANKDVSSFLETTADVEEITGEGLTASGSGDVMRRRIATPEEVRLPLQHG

SEQ ID NO: 863066 - protein, 77 aa, Homo sapiens
MNSPLSLWKCVYSSSFSLSTQRQLFFRKKLLHSSQMLRAVSLGQDRYRRRYWVLPYLAGIFVEGTEGNLGRCACGSV

SEQ ID NO: 863067 - protein, 627 aa, Homo sapiens
QQLGGRVGPAAGGSGARVGGRPAARQGEHAPGLRKGDRILEVEYRGYPPPHPPRASMPLHVLRYPFIPHSRSVPSMLLTSGSPARKMADEDGEGIHPSAPHRNGGGGGGGGSGLHCAGNGGGGGGGPRVVRIVKSESGYGFNVRGQVSEGGQLRSINGELYAPLQHVSAVLPGGAADRAGVRKGDRILEVNHVNVEGATHKQVVDLIRAGEKELILTVLSVPPHEADNLDPSDDSLGQSFYDYTEKQAVPISVPRYKHVEQNGEKFVVYNVYMAGRQLCSKRYREFAILHQNLKREFANFTFPRLPGKWPFSLSEQQLDARRRGLEEYLEKVCSIRVIGESDIMQEFLSESDENYNGVSDVELRVALPDGTTVTVRVKKNSTTDQVYQAIAAKVGMDSTTVNYFALFEVISHSFVRKLAPNEFPHKLYIQNYTSAVPGTCLTIRKWLFTTEEEILLNDNDLAVTYFFHQAVDDVKKGYIKAEEKSYQLQKLYEQRKMVMYLNMLRTCEGYNEIIFPHCACDSRRKGHVITAISITHFKLHACTEEGQLENQVIAFEWDEMQRWDTDEEGMAFCFEYARGEKKPRWVKIFTPYFNYMHECFERVFCELKWRKENIFQMARSQQRDVAT

SEQ ID NO: 863068 - protein, 532 aa, Homo sapiens
QQLGGRVGPAAGGSGARVGGRPAARQGEHAPGGLGGVGGGGTARLLARWRTRTGKGFIPQPLTGTEVAAAAGGLGSTAPGTAAGEAAARGSCASSSPSPATASTCGAKNHVNVEGATHKQVVDLIRAGEKELILTVLSVPPHEADNLDPSDDSLGQSFYDYTEKQAVPISVPRYKHVEQNGEKFVVYNVYMAGRQLCSKRYREFAILHQNLKREFANFTFPRLPGKWPFSLSEQQLDARRRGLEEYLEKVCSIRVIGESDIMQEFLSESDENYNGVSDVELRVALPDGTTVTVRVKKNSTTDQVYQAIAAKVGMDSTTVNYFALFEVISHSFVRKLAPNEFPHKLYIQNYTSAVPGTCLTIRKWLFTTEEEILLNDNDLAVTYFFHQAVDDVKKGYIKAEEKSYQLQKLYEQRKMVMYLNMLRTCEGYNEIIFPHCACDSRRKGHVITAISITHFKLHACTEEGQLENQVIAFEWDEMQRWDTDEEGMAFCFEYARGEKKPRWVKIFTPYFNYMHECFERVFCELKWRKEEY

SEQ ID NO: 863069 - protein, 532 aa, Homo sapiens; identical to SEQ ID NO: 863068

SEQ ID NO: 863070 - protein, 206 aa, Homo sapiens
MFLQIIVRPLFLSFFLSFFLSFVLSFFRSFFLSFFLFLSFAFLLSSLFCNLLLQIIVRPLFFPLPSFLFFCFFFFFFPESCSVAQVGVQWHDLGSCTLCLLGSSDSPASASQVAGITGIHHHAPLIFCIFGRAGFHHDGQVGFELLTSSNLPTSASQSARITGVSHCAWPTFLSFLLILLCWQPFAPAWYGIKEDSLSSLTFSKSR

SEQ ID NO: 863071 - protein, 532 aa, Homo sapiens; identical to SEQ ID NO: 863068

SEQ ID NO: 863072 - protein, 699 aa, Homo sapiens
AAALDADTWTAAPRLPALAAPAARAMPSYTVTVATGSQWFAGTDDYIYLSLVGSAGCSEKHLLDKPFYNDFERGAVDSYDVTVDEELGEIQLVRIEKRKYWLNDDWYLKYITLKTPHGDYIEFPCYRWITGDVEVVLRDGRAKLARDDQIHILKQHRRKELETRQKQYRWMEWNPGFPLSIDAKCHKDLPRDIQFDSEKGVDFVLNYSKAMENLFINRFMHMFQSSWNDFADFEKIFVKISNTISERVMNHWQEDLMFGYQFLNGCNPVLIRRCTELPEKLPVTTEMVECSLERQLSLEQEVQQGNIFIVDFELLDGIDANKTDPCTLQFLAAPICLLYKNLANKIVPIAIQLNQIPGDENPIFLPSDAKYDWLLAKIWVRSSDFHVHQTITHLLRTHLVSEVFGIAMYRQLPAVHPIFKLLVAHVRFTIAINTKAREQLICECGLFDKANATGGGGHVQMVQRAMKDLTYASLCFPEAIKARGMESKEDIPYYFYRDDGLLVWEAIRTFTAEVVDIYYEGDQVVEEDPELQDFVNDVYVYGMRGRKSSGFPKSVKSREQLSEYLTVVIFTASAQHAAVNFGQYDWCSWIPNAPPTMRAPPPTAKGVVTIEQIVDTLPDRGRSCWHLGAVWALSQFQENELFLGMYPEEHFIEKPVKEAMARFRKNLEAIVSVIAERNKKKQLPYYYLSPDRIPNSVAI

SEQ ID NO: 863073 - protein, 676 aa, Homo sapiens
AAALDADTWTAAPRLPALAAPAARAMPSYTVTVATGSQWFAGTDDYIYLSLVGSAGCSEKHLLDKPFYNDFERGAVDSYDVTVDEELGEIQLVRIEKRKYWLNDDWYLKYITLKTPHGDYIEFPCYRWITGDVEVVLRDGRAKLARDDQIHILKQHRRKELETRQKQYRWMEWNPGFPLSIDAKCHKDLPRDIQFDSEKGVDFVLNYSKAMENLFINRFMHMFQSSWNDFADFEKIFVKISNTISERVMNHWQEDLMFGYQFLNGCNPVLIRRCTELPEKLPVTTEMVECSLERQLSLEQEVQQGNIFIVDFELLDGIDANKTDPCTLQFLAAPICLLYKNLANKIVPIAIQLNQIPGDENPIFLPSDAKYDWLLAKIWVRSSDFHVHQTITHLLRTHLVSEVFGIAMYRQLPAVHPIFKLLVAHVRFTIAINTKAREQLICECGLFDKANATGGGGHVQMVQRAMKDLTYASLCFPEAIKARGMESKEDIPYYFYRDDGLLVWEAIRTCAPAGRWSWGRSRDPCLTTWGGPGPSTASAEWGRGGGVPASVRGLPPGTAPQTWLGRPPRLRPLSQVHGRGGRHLLRGRPGGGGGPGAAGLRERCLRVRHAGPQVLRLPQVGQEPGAAVGVPDRGDLHRLRPARRGQLRPVRLVLLDPQCAPNHASPATDCQGRGDH

SEQ ID NO: 863074 - protein, 640 aa, Homo sapiens
MAQETTHGLIACSPSQVDSYDVTVDEELGEIQLVRIEKRKYWLNDDWYLKYITLKTPHGDYIEFPCYRWITGDVEVVLRDGRAKLARDDQIHILKQHRRKELETRQKQYRWMEWNPGFPLSIDAKCHKDLPRDIQFDSEKGVDFVLNYSKAMENLFINRFMHMFQSSWNDFADFEKIFVKISNTISERVMNHWQEDLMFGYQFLNGCNPVLIRRCTELPEKLPVTTEMVECSLERQLSLEQEVQQGNIFIVDFELLDGIDANKTDPCTLQFLAAPICLLYKNLANKIVPIAIQLNQIPGDENPIFLPSDAKYDWLLAKIWVRSSDFHVHQTITHLLRTHLVSEVFGIAMYRQLPAVHPIFKLLVAHVRFTIAINTKAREQLICECGLFDKANATGGGGHVQMVQRAMKDLTYASLCFPEAIKARGMESKEDIPYYFYRDDGLLVWEAIRTFTAEVVDIYYEGDQVVEEDPELQDFVNDVYVYGMRGRKSSGFPKSVKSREQLSEYLTVVIFTASAQHAAVNFGQYDWCSWIPNAPPTMRAPPPTAKGVVTIEQIVDTLPDRGRSCWHLGAVWALSQFQENELFLGMYPEEHFIEKPVKEAMARFRKNLEAIVSVIAERNKKKQLPYYYLSPDRIPNSVAI

SEQ ID NO: 863075 - protein, 652 aa, Homo sapiens
MPTMVTTGDGEQKHLLDKPFYNDFERGAVDSYDVTVDEELGEIQLVRIEKRKYWLNDDWYLKYITLKTPHGDYIEFPCYRWITGDVEVVLRDGRAKLARDDQIHILKQHRRKELETRQKQYRWMEWNPGFPLSIDAKCHKDLPRDIQFDSEKGVDFVLNYSKAMENLFINRFMHMFQSSWNDFADFEKIFVKISNTISERVMNHWQEDLMFGYQFLNGCNPVLIRRCTELPEKLPVTTEMVECSLERQLSLEQEVQQGNIFIVDFELLDGIDANKTDPCTLQFLAAPICLLYKNLANKIVPIAIQLNQIPGDENPIFLPSDAKYDWLLAKIWVRSSDFHVHQTITHLLRTHLVSEVFGIAMYRQLPAVHPIFKLLVAHVRFTIAINTKAREQLICECGLFDKANATGGGGHVQMVQRAMKDLTYASLCFPEAIKARGMESKEDIPYYFYRDDGLLVWEAIRTFTAEVVDIYYEGDQVVEEDPELQDFVNDVYVYGMRGRKSSGFPKSVKSREQLSEYLTVVIFTASAQHAAVNFGQYDWCSWIPNAPPTMRAPPPTAKGVVTIEQIVDTLPDRGRSCWHLGAVWALSQFQENELFLGMYPEEHFIEKPVKEAMARFRKNLEAIVSVIAERNKKKQLPYYYLSPDRIPNSVAI

SEQ ID NO: 863076 - protein, 795 aa, Homo sapiens
AAALDADTWTAAPRLPALAAPAARAMPSYTVTVATGSQWFAGTDDYIYLSLVGSAGCSEKHLLDKPFYNDFERGAVDSYDVTVDEELGEIQLVRIEKRKYWLNDDWYLKYITLKTPHGDYIEFPCYRWITGDVEVVLRDGRAKLARDDQIHILKQHRRKELETRQKQYRWMEWNPGFPLSIDAKCHKDLPRDIQFDSEKGVDFVLNYSKAMENLFINRFMHMFQSSWNDFADFEKIFVKISNTISERVMNHWQEDLMFGYQFLNGCNPVLIRRCTELPEKLPVTTEMVECSLERQLSLEQEVQQGNIFIVDFELLDGIDANKTDPCTLQFLAAPICLLYKNLANKIVPIAIQLNQIPGDENPIFLPSDAKYDWLLAKIWVRSSDFHVHQTITHLLRTHLVSEVFGIAMYRQLPAVHPIFKLLVAHVRFTIAINTKAREQLICECGLFDKANATGGGGHVQMVQRAMKDLTYASLCFPEAIKARGMESKEDIPYYFYRDDGLLVWEAIRTFTAEVVDIYYEGDQVVEEDPELQDFVNDVYVYGMRGRKSSGFPKSVKSREQLSEYLTVVIFTASAQHAAVNFGQVGRAGPAGQGSLLKAAASSPAPVLHAYCTLGQPRGLARDLQDGFCPLSQGLLAAGKEDGRTAGPAGVGGHGEDGAQGAAGQQGFGGAHACWRSSPQYDWCSWIPNAPPTMRAPPPTAKGVVTIEQIVDTLPDRGRSCWHLGAVWALSQFQENELFLGMYPEEHFIEKPVKEAMARFRKNLEAIVSVIAERNKKKQLPYYYLSPDRIPNSVAI

SEQ ID NO: 863077 - protein, 170 aa, Homo sapiens
RLVPAAGPMIVYGMRGRKSSGFPKSVKSREQLSEYLTVVIFTASAQHAAVNFGQYDWCSWIPNAPPTMRAPPPTAKGVVTIEQIVDTLPDRGRSCWHLGAVWALSQFQENELFLGMYPEEHFIEKPVKEAMARFRKNLEAIVSVIAERNKKKQLPYYYLSPDRIPNSVAI

SEQ ID NO: 863078 - protein, 473 aa, Homo sapiens
AAALDADTWTAAPRLPALAAPAARAMPSYTVTVATGSQWFAGTDDYIYLSLVGSAGCSEKHLLDKPFYNDFERGAVDSYDVTVDEELGEIQLVRIEKRKYWLNDDWYLKYITLKTPHGDYIEFPCYRWITGDVEVVLRDGRAKLARDDQIHILKQHRRKELETRQKQYRWMEWNPGFPLSIDAKCHKDLPRDIQFDSEKGVDFVLNYSKAMENLFINRFMHMFQSSWNDFADFEKIFVKISNTISERVMNHWQEDLMFGYQFLNGCNPVLIRRCTELPEKLPVTTEMVECSLERQLSLEQEVQQGNIFIVDFELLDGIDANKTDPCTLQFLAAPICLLYKNLANKIVPIAIQLNQIPGDENPIFLPSDAKYDWLLAKIWVRSSDFHVHQTITHLLRTHLVSEVFGIAMYRQLPAVHPIFKLLVAHVRFTIAINTKAREQLICECGLFDKVGALLPYLLPGRAQPGRLHSLSEI

SEQ ID NO: 863079 - protein, 315 aa, Homo sapiens
AAALDADTWTAAPRLPALAAPAARAMPSYTVTVATGSQWFAGTDDYIYLSLVGSAGCSEKHLLDKPFYNDFERGAVDSYDVTVDEELGEIQLVRIEKRKYWLNDDWYLKYITLKTPHGDYIEFPCYRWITGDVEVVLRDGRAKLARDDQIHILKQHRRKELETRQKQYRWMEWNPGFPLSIDAKCHKDLPRDIQFDSEKGVDFVLNYSKAMENLFINRFMHMFQSSWNDFADFEKIFVKISNTISERVMNHWQEDLMFGYQFLNGCNPVLIRRCTELPEKLPVTTEMVECSLERQLSLEQEVQPDFWSYLTHRNL

SEQ ID NO: 863080 - protein, 329 aa, Homo sapiens
AAALDADTWTAAPRLPALAAPAARAMPSYTVTVATGSQWFAGTDDYIYLSLVGSAGCSEKHLLDKPFYNDFERGAVDSYDVTVDEELGEIQLVRIEKRKYWLNDDWYLKYITLKTPHGDYIEFPCYRWITGDVEVVLRDGRAKLARDDQIHILKQHRRKELETRQKQYRWMEWNPGFPLSIDAKCHKDLPRDIQFDSEKGVDFVLNYSKAMENLFINRFMHMFQSSWNDFADFEKIFVKISNTISERVMNHWQEDLMFGYQFLNGCNPVLIRRCTELPEKLPVTTEMVECSLERQLSLEQEVQSSRFQTPQMPNELLPFLHLTPNCHNL

SEQ ID NO: 863081 - protein, 699 aa, Homo sapiens; identical to SEQ ID NO: 863072

SEQ ID NO: 863082 - protein, 699 aa, Homo sapiens; identical to SEQ ID NO: 863072

SEQ ID NO: 863083 - protein, 701 aa, Homo sapiens
LWRWVRVVAVSWLCPAAAECLGHRIHGVLLVFELRFLDDILTAQRDDYIYLSLVGSAGCSEKHLLDKPFYNDFERGAVDSYDVTVDEELGEIQLVRIEKRKYWLNDDWYLKYITLKTPHGDYIEFPCYRWITGDVEVVLRDGRAKLARDDQIHILKQHRRKELETRQKQYRWMEWNPGFPLSIDAKCHKDLPRDIQFDSEKGVDFVLNYSKAMENLFINRFMHMFQSSWNDFADFEKIFVKISNTISERVMNHWQEDLMFGYQFLNGCNPVLIRRCTELPEKLPVTTEMVECSLERQLSLEQEVQQGNIFIVDFELLDGIDANKTDPCTLQFLAAPICLLYKNLANKIVPIAIQLNQIPGDENPIFLPSDAKYDWLLAKIWVRSSDFHVHQTITHLLRTHLVSEVFGIAMYRQLPAVHPIFKLLVAHVRFTIAINTKAREQLICECGLFDKANATGGGGHVQMVQRAMKDLTYASLCFPEAIKARGMESKEDIPYYFYRDDGLLVWEAIRTFTAEVVDIYYEGDQVVEEDPELQDFVNDVYVYGMRGRKSSGFPKSVKSREQLSEYLTVVIFTASAQHAAVNFGQYDWCSWIPNAPPTMRAPPPTAKGVVTIEQIVDTLPDRGRSCWHLGAVWALSQFQENELFLGMYPEEHFIEKPVKEAMARFRKNLEAIVSVIAERNKKKQLPYYYLSPDRIPNSVAI

SEQ ID NO: 863084 - protein, 723 aa, Homo sapiens
AAALDADTWTAAPRLPALAAPAARAMPSYTVTVATGSQWFAGTDDYIYLSLVGSAGCSEKHLLDKPFYNDFERGAVDSYDVTVDEELGEIQLVRIEKRKYWLNDDWYLKYITLKTPHGDYIEFPCYRWITGDVEVVLRDGRAKLARDDQIHILKQHRRKELETRQKQYRWMEWNPGFPLSIDAKCHKDLPRDIQFDSEKGVDFVLNYSKAMENLFINRFMHMFQSSWNDFADFEKIFVKISNTISERVMNHWQEDLMFGYQFLNGCNPVLIRRCTELPEKLPVTTEMVECSLERQLSLEQEVQQGNIFIVDFELLDGIDANKTDPCTLQFLAAPICLLYKNLANKIVPIAIQLNQIPGDENPIFLPSDAKYDWLLAKIWVRSSDFHVHQTITHLLRTHLVSEVFGIAMYRQLPAVHPIFKLLVAHVRFTIAINTKAREQLICECGLFDKANATGGGGHVQMVQRAMKDLTYASLCFPEAIKARGMESKEDIPYYFYRDDGLLVWEAIRTFTAEVVDIYYEGDQVVEEDPELQDFVNDVYVYGMRGRKSSGFPKSVKSREQLSEYLTVVIFTASAQHAAVNFGQYDWCSWIPNAPPTMRAPPPTAKGVVTIEQIVDTLPDRGRSCWHLGAVWALSQFQENEVKLGRAGHSPGHPRLSGSSASGLCDSGPKAHLEQRNPDFQGWKGPEGCSRHQVPRPQPGQSSGCAGQESTQPRLCSLSPEGRV

SEQ ID NO: 863085 - protein, 527 aa, Homo sapiens
AAALDADTWTAAPRLPALAAPAARAMPSYTVTVATGSQWFAGTDDYIYLSLVGSAGCSEKHLLDKPFYNDFERGAVDSYDVTVDEELGEIQLVRIEKRKYWLNDDWYLKYITLKTPHGDYIEFPCYRWITGDVEVVLRDGRAKLARDDQIHILKQHRRKELETRQKQYRWMEWNPGFPLSIDAKCHKDLPRDIQFDSEKGVDFVLNYSKAMENLFINRFMHMFQSSWNDFADFEKIFVKISNTISERVMNHWQEDLMFGYQFLNGCNPVLIRRCTELPEKLPVTTEMVECSLERQLSLEQEVQQGNIFIVDFELLDGIDANKTDPCTLQFLAAPICLLYKNLANKIVPIAIQLNQIPGDENPIFLPSDAKYDWLLAKIWVRSSDFHVHQTITHLLRTHLVSEVFGIAMYRQLPAVHPIFKLLVAHVRFTIAINTKAREQLICECGLFDKANATGGGGHVQMVQRAMKDLTYASLCFPEAIKARGMESKEDIPYYFYRDDGLLVWEAIRTFTAEVVDIYYEGDLPRAW

SEQ ID NO: 863086 - protein, 135 aa, Homo sapiens
  misc_feature (9)..(9): Xaa can be any naturally occurring amino acid
GAGESGAGXAQRAAVNFGQYDWCSWIPNAPPTMRAPPPTAKGVVTIEQIVDTLPDRGRSCWHLGAVWALSQFQENELFLGMYPEEHFIEKPVKEAMARFRKNLEAIVSVIAERNKKKQLPYYYLSPDRIPNSVAI

SEQ ID NO: 863087 - protein, 329 aa, Homo sapiens
AAALDADTWTAAPRLPALAAPAARAMPSYTVTVATGSQWFAGTDDYIYLSLVGSAGCSEKHLLDKPFYNDFERGAVDSYDVTVDEELGEIQLVRIEKRKYWLNDDWYLKYITLKTPHGDYIEFPCYRWITGDVEVVLRDGRAKLARDDQIHILKQHRRKELETRQKQYRWMEWNPGFPLSIDAKCHKDLPRDIQFDSEKGVDFVLNYSKAMENLFINRFMHMFQSSWNDFADFEKIFVKISNTISERVMNHWQEDLMFGYQFLNGCNPVLIRRCTELPEKLPVTTEMVECSLERQLSLEQEVQVGVDGLGKWPRSQSVRWKPVPPGQCS

SEQ ID NO: 863088 - protein, 134 aa, Homo sapiens
SYPELPQPVNTFHVNQSALESEERSTHSELRWVAGKGEGCPEVITLSPGLIFGPSAEPDLDTSLCLLQQGNIFIVDFELLDGIDANKTDPCTLQFLAAPICLLYKNLANKIVPIAIQVGCWGAHLSEQLSPLRS

SEQ ID NO: 863089 - protein, 106 aa, Homo sapiens
MFAPAVMRAFRKNKTLGYGVPMLLLIVGGSFGLREFSQIRYDAVKSKMDPELEKKLKENKISLESEYEKIKDSKFDDWKNIRGPRPWEDPDLLQGRNPESLKTKTT

SEQ ID NO: 863090 - protein, 106 aa, Homo sapiens; identical to SEQ ID NO: 863089

SEQ ID NO: 863091 - protein, 78 aa, Homo sapiens
LLASVGRILSAPPLLGGTEMDPELEKKLKENKISLESEYEKIKDSKFDDWKNIRGPRPWEDPDLLQGRNPESLKTKTT

SEQ ID NO: 863092 - protein, 76 aa, Homo sapiens
  misc_feature (17)..(17): Xaa can be any naturally occurring amino acid
KYAHDDRSQRIYLPTFXMDPELEKKLKENKISLESEYEKIKDSKFDDWKNIRGPRPWEDPDLLQGRNPESLKTKTT

SEQ ID NO: 863093 - protein, 106 aa, Homo sapiens; identical to SEQ ID NO: 863089

SEQ ID NO: 863094 - protein, 77 aa, Homo sapiens
TAYKEKYEDESKPFRYTWMDPELEKKLKENKISLESEYEKIKDSKFDDWKNIRGPRPWEDPDLLQGRNPESLKTKTT

SEQ ID NO: 863095 - protein, 233 aa, Homo sapiens
MKGYQSLVFNFFFLKLSAENESTPIQQLLEHFLRQLQRKDPHGFFAFPVTDAIAPGYSMIIKHPMDFGTMKDKIVANEYKSVTEFKADFKLMCDNAMTYNRPDTVYYKLAKKILHAGFKMMSKQAALLGNEDTAVEEPVPEVVPVQVETAKKSKKPSREVISCMFEPEGNACSLTDSTAEEHVLALVEHAADEARDRINRFLPGGKVVLCGHRERVPRGPRLSVCLSFWVGAV

SEQ ID NO: 863096 - protein, 649 aa, Homo sapiens
PPRPVSGAAQRARQPRRSERGRPARARGRWRPRSDRVPAVPSPRLGPAAGAAMGKKHKKHKAEWRSSYEDYADKPLEKPLKLVLKVGGSEVTELSGSGHDSSYYDDRSDHERERHKEKKKKKKKKSEKEKHLDDEERRKRKEEKKRKREREHCDTEGEADDFDPGKKVEVEPPPDRPVRACRTQPAENESTPIQQLLEHFLRQLQRKDPHGFFAFPVTDAIAPGYSMIIKHPMDFGTMKDKIVANEYKSVTEFKADFKLMCDNAMTYNRPDTVYYKLAKKILHAGFKMMSKQAALLGNEDTAVEEPVPEVVPVQVETAKKSKKPSREVISCMFEPEGNACSLTDSTAEEHVLALVEHAADEARDRINRFLPGGKMGYLKRNGDGSLLYSVVNTAEPDADEEETHPVDLSSLSSKLLPGFTTLGFKDERRNKVTFLSSATTALSMQNNSVFGDLKSDEMELLYSAYGDETGVQCALSLQEFVKDAGSYSKKVVDDLLDQITGGDHSRTLFQLKQRRNVPMKPPDEAKVGDTLGDSSSSVLEFMSMKSYPDVSVDISMLSSLGKVKKELDPDDSHLNLDETTKLLQDLHEAQAERGGSRPSSNLSSLSNASERDQHHLGSPSRLSVGEQPDVTHDPYEFLQSPEPAASAKT

SEQ ID NO: 863097 - protein, 410 aa, Homo sapiens
MLRALHARKPSVFPASGPSLAIPSNKADFKLMCDNAMTYNRPDTVYYKLAKKILHAGFKMMSKQAALLGNEDTAVEEPVPEVVPVQVETAKKSKKPSREVISCMFEPEGNACSLTDSTAEEHVLALVEHAADEARDRINRFLPGGKETSRPSVFSGNRAQAVCSLRLPSSPDKRSRAMQMGYLKRNGDGSLLYSVVNTAEPDADEEETHPVDLSSLSSKLLPGFTTLGFKDERRNKVTFLSSATTALSMQNNSVFGDLKSDEMELLYSAYGDETGVQCALSLQEFVKDAGSYSKKVVDDLLDQITGGDHSRTLFQLKQRRNVPMKPPDEAKVGDTLGDSSSSVLEFMSMKSYPDVSVDISMLSSLVSFRACHLSRDAVLKSDRNLVSYYHGVCFVNLQISVLKLMLVSCA

SEQ ID NO: 863098 - protein, 871 aa, Homo sapiens
PPRPVSGAAQRARQPRRSERGRPARARGRWRPRSDRVPAVPSPRLGPAAGAAMGKKHKKHKAEWRSSYEDYADKPLEKPLKLVLKVGGSEVTELSGSGHDSSYYDDRSDHERERHKEKKKKKKKKSEKEKHLDDEERRKRKEEKKRKREREHCDTEGEADDFDPGKKVEVEPPPDRPVRACRTQPAENESTPIQQLLEHFLRQLQRKDPHGFFAFPVTDAIAPGYSMIIKHPMDFGTMKDKIVANEYKSVTEFKADFKLMCDNAMTYNRPDTVYYKLAKKILHAGFKMMSKERLLALKRSMSFMQDMDFSQQAALLGNEDTAVEEPVPEVVPVQVETAKKSKKPSREVISCMFEPEGNACSLTDSTAEEHVLALVEHAADEARDRINRFLPGGKVVLCGHRERVPRGPRLSVCLSFWVGAVSSSTATGIQRSAWGPDGRSGSDTHKAGLFSRGPGASGRAAAGVSCIVEATVVTDLISLMEALLQANPFSWSEMLTSVSLSLGVDVRHRPCYSSGGAGVGSDRWSIMATDCVHVAPATDGLCGGGAHSADHALLSGRRRSRPSVFSGNRAQAVCSLRLPSSPDKRSRAMQVTLILQMGYLKRNGDGSLLYSVVNTAEPDADEEETHPVDLSSLSSKLLPGFTTLGFKDERRNKVTFLSSATTALSMQNNSVFGDLKSDEMELLYSAYGDETGVQCALSLQEFVKDAGSYSKKVVDDLLDQITGGDHSRTLFQLKQRRNVPMKPPDEAKVGDTLGDSSSSVLEFMSMKSYPDVSVDISMLSSLGKVKKELDPDDSHLNLDETTKLLQDLHEAQAERGGSRPSSNLSSLSNASERDQHHLGSPSRLSVGEQPDVTHDPYEFLQSPEPAASAKT

SEQ ID NO: 863099 - protein, 665 aa, Homo sapiens
PPRPVSGAAQRARQPRRSERGRPARARGRWRPRSDRVPAVPSPRLGPAAGAAMGKKHKKHKAEWRSSYEDYADKPLEKPLKLVLKVGGSEVTELSGSGHDSSYYDDRSDHERERHKEKKKKKKKKSEKEKHLDDEERRKRKEEKKRKREREHCDTEGEADDFDPGKKVEVEPPPDRPVRACRTQPAENESTPIQQLLEHFLRQLQRKDPHGFFAFPVTDAIAPGYSMIIKHPMDFGTMKDKIVANEYKSVTEFKADFKLMCDNAMTYNRPDTVYYKLAKKILHAGFKMMSKQAALLGNEDTAVEEPVPEVVPVQVETAKKSKKPSREVISCMFEPEGNACSLTDSTAEEHVLALVEHAADEARDRINRFLPGGKMGYLKRNGDGSLLYSVVNTAEPDADEEETHPVDLSSLSSKLLPGFTTLGFKDERRNKVTFLSSATTALSMQNNSVFGDLKSDEMELLYSAYGDETGVQCALSLQEFVKDAGSYSKKVVDDLLDQITGGDHSRTLFQLKQVSPGDRDCVLTTPSALRRNVPMKPPDEAKVGDTLGDSSSSVLEFMSMKSYPDVSVDISMLSSLGKVKKELDPDDSHLNLDETTKLLQDLHEAQAERGGSRPSSNLSSLSNASERDQHHLGSPSRLSVGEQPDVTHDPYEFLQSPEPAASAKT

SEQ ID NO: 863100 - protein, 649 aa, Homo sapiens; identical to SEQ ID NO: 863096

SEQ ID NO: 863101 - protein, 649 aa, Homo sapiens; identical to SEQ ID NO: 863096

SEQ ID NO: 863102 - protein, 649 aa, Homo sapiens; identical to SEQ ID NO: 863096

SEQ ID NO: 863103 - protein, 605 aa, Homo sapiens
PPRPVSGAAQRARQPRRSERGRPARARGRWRPRSDRVPAVPSPRLGPAAGAAMGKKHKKHKAEWRSSYEDYADKPLEKPLKLVLKVGGSEVTELSGSGHDSSYYDDRSDHERERHKEKKKKKKKKSEKEKHLDDEERRKRKEEKKRKREREHCDTEGEADDFDPGKKVEVEPPPDRPVRACRTQPAENESTPIQQLLEHFLRQLQRKDPHGFFAFPVTDAIAPGYSMIIKHPMDFGTMKDKIVANEYKSVTEFKADFKLMCDNAMTYNRPDTVYYKLAKKILHAGFKMMSKQAALLGNEDTAVEEPVPEVVPVQVETAKKSKKPSREVISCMFEPEGNACSLTDSTAEEHVLALVEHAADEARDRINRFLPGGKMGYLKRNGDGSLLYSVVNTAEPDADEEETHPVDLSSLSSKLLPGFTTLGFKDERRNKVTFLSSATTALSMQNNSVFGDLKSDEMELLYSAYGDETGVQCALSLQEFVKDAGSYSKKVVDDLLDQITGGDHSRTLFQLKQRRNVPMKPPDEAKVGDTLGDSSSSVLEFMSMKSYPDVSVDISMLSSLVSFRACHLSRDAVLKSDRNLVSYYHGVCFVNLQISVLKLMLVSCA

SEQ ID NO: 863104 - protein, 187 aa, Homo sapiens
PPRPVSGAAQRARQPRRSERGRPARARGRWRPRSDRVPAVPSPRLGPAAGAAMGKKHKKHKAEWRSSYEDYADKPLEKPLKLVLKVGGSEVTELSGSGHDSSYYDDRSDHERERHKEKKKKKKKKSEKEKHLDDEERRKRKEEKKRKREREHCDTEGEADDFDPGKKVEGVVSSFLRPYSPRQPRQL

SEQ ID NO: 863105 - protein, 130 aa, Homo sapiens
MHMGWDVKNAEVGAFQRCLLLFACACWEVAVLCVACVLRGCGLRGSRVGRSWSAWLTCWEVAVVCMACVLGGCSLCGPCVGRLWSAWLVCWEVVVHVACMLGSCCGLRGLCVGRLWFVWLVCWEVAVCVA

SEQ ID NO: 863106 - protein, 501 aa, Homo sapiens
MKGYQSLVFNFFFLKLSAENESTPIQQLLEHFLRQLQRKDPHGFFAFPVTDAIAPGYSMIIKHPMDFGTMKDKIVANEYKSVTEFKADFKLMCDNAMTYNRPDTVYYKLAKKILHAGFKMMSKERLLALKRSMSFMQDMDFSQQAALLGNEDTAVEEPVPEVVPVQVETAKKSKKPSREVISCMFEPEGNACSLTDSTAEEHVLALVEHAADEARDRINRFLPGGKMGYLKRNGDGSLLYSVVNTAEPDADEEETHPVDLSSLSSKLLPGFTTLGFKDERRNKVTFLSSATTALSMQNNSVFGDLKSDEMELLYSAYGDETGVQCALSLQEFVKDAGSYSKKVVDDLLDQITGGDHSRTLFQLKQRRNVPMKPPDEAKVGDTLGDSSSSVLEFMSMKSYPDVSVDISMLSSLGKVKKELDPDDSHLNLDETTKLLQDLHEAQAERGGSRPSSNLSSLSNASERDQHHLGSPSRLSVGEQPDVTHDPYEFLQSPEPAASAKT

SEQ ID NO: 863107 - protein, 481 aa, Homo sapiens
MKGYQSLVFNFFFLKLSAENESTPIQQLLEHFLRQLQRKDPHGFFAFPVTDAIAPGYSMIIKHPMDFGTMKDKIVANEYKSVTEFKADFKLMCDNAMTYNRPDTVYYKLAKKILHAGFKMMSKQAALLGNEDTAVEEPVPEVVPVQVETAKKSKKPSREVISCMFEPEGNACSLTDSTAEEHVLALVEHAADEARDRINRFLPGGKMGYLKRNGDGSLLYSVVNTAEPDADEEETHPVDLSSLSSKLLPGFTTLGFKDERRNKVTFLSSATTALSMQNNSVFGDLKSDEMELLYSAYGDETGVQCALSLQEFVKDAGSYSKKVVDDLLDQITGGDHSRTLFQLKQRRNVPMKPPDEAKVGDTLGDSSSSVLEFMSMKSYPDVSVDISMLSSLGKVKKELDPDDSHLNLDETTKLLQDLHEAQAERGGSRPSSNLSSLSNASERDQHHLGSPSRLSVGEQPDVTHDPYEFLQSPEPAASAKT

SEQ ID NO: 863108 - protein, 669 aa, Homo sapiens
PPRPVSGAAQRARQPRRSERGRPARARGRWRPRSDRVPAVPSPRLGPAAGAAMGKKHKKHKAEWRSSYEDYADKPLEKPLKLVLKVGGSEVTELSGSGHDSSYYDDRSDHERERHKEKKKKKKKKSEKEKHLDDEERRKRKEEKKRKREREHCDTEGEADDFDPGKKVEVEPPPDRPVRACRTQPAENESTPIQQLLEHFLRQLQRKDPHGFFAFPVTDAIAPGYSMIIKHPMDFGTMKDKIVANEYKSVTEFKADFKLMCDNAMTYNRPDTVYYKLAKKILHAGFKMMSKERLLALKRSMSFMQDMDFSQQAALLGNEDTAVEEPVPEVVPVQVETAKKSKKPSREVISCMFEPEGNACSLTDSTAEEHVLALVEHAADEARDRINRFLPGGKMGYLKRNGDGSLLYSVVNTAEPDADEEETHPVDLSSLSSKLLPGFTTLGFKDERRNKVTFLSSATTALSMQNNSVFGDLKSDEMELLYSAYGDETGVQCALSLQEFVKDAGSYSKKVVDDLLDQITGGDHSRTLFQLKQRRNVPMKPPDEAKVGDTLGDSSSSVLEFMSMKSYPDVSVDISMLSSLGKVKKELDPDDSHLNLDETTKLLQDLHEAQAERGGSRPSSNLSSLSNASERDQHHLGSPSRLSVGEQPDVTHDPYEFLQSPEPAASAKT

SEQ ID NO: 863109 - protein, 275 aa, Homo sapiens
MGYLKRNGDGSLLYSVVNTAEPDADEEETHPVDLSSLSSKLLPGFTTLGFKDERRNKVTFLSSATTALSMQNNSVFGDLKSDEMELLYSAYGDETGVQCALSLQEFVKDAGSYSKKVVDDLLDQITGGDHSRTLFQLKQRRNVPMKPPDEAKVGDTLGDSSSSVLEFMSMKSYPDVSVDISMLSSLGKVKKELDPDDSHLNLDETTKLLQDLHEAQAERGGSRPSSNLSSLSNASERDQHHLGSPSRLSVGEQPDVTHDPYEFLQSPEPAASAKT

SEQ ID NO: 863110 - protein, 137 aa, Homo sapiens
RGSHSIRDLQEFVKDAGSYSKKVVDDLLDQITGGDHSRTLFQLKQRRNVPMKPPDEAKVGDTLGDSSSSVLEFMSMKSYPDVSVDISMLSSLVSFRACHLSRDAVLKSDRNLVSYYHGVCFVNLQISVLKLMLVSCA

SEQ ID NO: 863111 - protein, 421 aa, Homo sapiens
PPRPVSGAAQRARQPRRSERGRPARARGRWRPRSDRVPAVPSPRLGPAAGAAMGKKHKKHKAEWRSSYEDYADKPLEKPLKLVLKVGGSEVTELSGSGHDSSYYDDRSDHERERHKEKKKKKKKKSEKEKHLDDEERRKRKEEKKRKREREHCDTEGEADDFDPGKKVEVEPPPDRPVRACRTQPAENESTPIQQLLEHFLRQLQRKDPHGFFAFPVTDAIAPGYSMIIKHPMDFGTMKDKIVANEYKSVTEFKADFKLMCDNAMTYNRPDTVYYKLAKKILHAGFKMMSKERLLALKRSMSFMQDMDFSQQAALLGNEDTAVEEPVPEVVPVQVETAKKSKKPSREVISCMFEPEGNACSLTDSTAEEHVLALVEHAADEARDRINRFLPGGKVVLCGHRERVPRGPRLSVCLSFWVGAV

SEQ ID NO: 863112 - protein, 711 aa, Homo sapiens
RTSQKLLSLTKVSSPAGPTEDNDLSRKAVAQAPGRRYTGKRKSACTPASDHCEPLLPTSSLSIVNRSKEEVTSHKYQHEKLFIQVKGKKSRHQKEDSLSWSNSAYLSLDDDAFTAPFHRDGMLSLKQLLSFLSITDFQLPDEDFGPLKLEKVKSCSEKPVEPFESKMFGERHLKEGSCIFPEELSPKRMDTEMEDLEEDLIVLPGKSHPKRPNSQSQHTKTGLSSSILLYTPLNTVAPDDNDRPTTDMCSPAFPILGTTPAFGPQGSYEKASTEVAGRTCCTPQLAHLKDSVCLASDTKQFDSSGSPAKPHTTLQVSGRQGQPTCDCDSVPPGTPPPIESFTFKENQLCRNTCQELHKHSVEQTETAELPASDSINPGNLQLVSELKNPSGSCSVDVSAMFWERAGCKEPCIITACEDVVSLWKALDAWQWEKLYTWHFAEVPVLQIVPVPDVYNLVCVALGNLEIREIRALFCSSDDESEKQVLLKSGNIKAVLGLTKRRLVSSSGTLSDQQVEVMTFAEDGGGKENQFLMPPEETILTFAEVQGMQEALLGTTIMNNIVIWNLKTGQLLKKMHIDDSYQASVCHKAYSEMGLLFIVLSHPCAKESESLRSPVFQLIVINPKTTLSVGVMLYCLPPGQAGRFLEGDVKDHCAAAILTSGTIAIWDLLLGQCTALLPPVSDQHWSFVKWSGTDSHLLAGQKDGNIFVYHYS

SEQ ID NO: 863113 - protein, 71 aa, Homo sapiens
SADRALRVRSRAPHSFLGRLPGPGQLGPGVGRPGVGDGCSFRSVACPMDEPPGKPLSCEGEGTRDTWTING

SEQ ID NO: 863114 - protein, 312 aa, Homo sapiens
MFWERAGCKEPCIITACEDVVSLWKALDAWQWEKLYTWHFAEVPVLQIVPVPDVYNLVCVALGNLEIREIRALFCSSDDESEKQVLLKSGNIKAVLGLTKRRLVSSSGTLSDQQVEVMTFAEDGGGKENQFLMPPEETILTFAEVQGMQEALLGTTIMNNIVIWNLKTGQLLKKMHIDDSYQASVCHKAYSEMGLLFIVLSHPCAKESESLRSPVFQLIVINPKTTLSVGVMLYCLPPGQAGRFLEGDVKDHCAAAILTSGTIAIWDLLLGQCTALLPPVSDQHWSFVKWSGTDSHLLAGQKDGNIFVYHYS

SEQ ID NO: 863115 - protein, 711 aa, Homo sapiens; identical to SEQ ID NO: 863112

SEQ ID NO: 863116 - protein, 323 aa, Homo sapiens
MDEPPGKPLSCEEKKLKEKLAFLKREYSKTLARLQRAQRAEKIKHSIKKTVEEQDCLSQQDLSPQLKHSEPKNKICVYDKLHIKTHLDEETGEKTSITLDVGPESFNPGDGPGGLPIQRTDDTQEHFPHRVSDPSGEQKQKLPSRRKKQQKRTFISQERDCVFGTDSLRLSGKRLKEQEEISSKNPARSPVTEIRTHLLSLKSELPDSPEPVTEINEDSVLIPPTAQPEKGVDTFLRRPNFTRATTVPLQTLSDSGSSQHLEHIPPKGSSELTTHDLKNIRFTSPVSLEAQGKKMTVSTDNLLVNKAISKSGQLPTSSNLEAN

SEQ ID NO: 863117 - protein, 596 aa, Homo sapiens
RTSQKLLSLTKVSSPAGPTEDNDLSRKAVAQAPGRRYTGKRKSACTPASDHCEPLLPTSSLSIVNRSKEEVTSHKYQHEKLFIQVKGKKSRHQKEDSLSWSNSAYLSLDDDAFTAPFHRDGMLSLKQLLSFLSITDFQLPDEDFGPLKLEKVKSCSEKPVEPFESKMFGERHLKEGSCIFPEELSPKRMDTEMEDLEEDLIVLPGKSHPKRPNSQSQHTKTGLSSSILLYTPLNTVAPDDNDRPTTDMCSPAFPILGTTPAFGPQGSYEKASTEVAGRTCCTPQLAHLKDSVCLASDTKQFDSSGSPAKPHTTLQVSGRQGQPTCDCDSVPPGTPPPIESFTFKENQLCRNTCQELHKHSVEQTETAELPASDSINPGNLQLVSELKNPSGSCSVDVSAMFWERAGCKEPCIITACEDVVSLWKALDAWQWEKLYTWHFAEVPVLQIVPVPDVYNLVCVALGNLEIREIRALFCSSDDESEKQVLLKSGNIKAVLGLTKRRLVSSSGTLSDQQVEVMTFAEDGGGKENQFLMPPEETILTFAEVQGMQEALLGTTIMNNIVIWNLKTGQLLKKMHIDDSYQASVCHKAYSEMVPGR

SEQ ID NO: 863118 - protein, 1972 aa, Homo sapiens
MGQTKSTSSGGGNRKCNQEQSKNQPLDARVDKIKDKKPRKKAMESSSNSDSDSGTSSDTSSEGISSSDSDDLEEDEEEEDQSIEESEDDDSDSESEAQHKSNNQVLLHGISDPKADGQKATEKAQEKRIHQPLPLASESQTHSFQSQQKQPQVLSQQLPFIFQSSQAKEESVNKHTSVIQSTGLVSNVKPLSLVNQAKKETYMKLIVPSPDVLKAGNKNTSEESSLLTSELRSKREQYKQAFPSQLKKQESSKSLKKVIAALSNPKATSSSPAHPKQTLENNHPNPFLTNALLGNHQPNGVIQSVIQEAPLALTTKTKMQSKINENIAAASSTPFSSPVNLSTSGRRTPGNQTPVMPSASPILHSQGKEKAVSNNVNPVKTQHHSHPAKSLVEQFRGTDSDIPSSKDSEDSNEDEEEDDEEEDEEDDEDDESDDSQSESDSNSESDTEGSEEEDDDDKDQDESDSDTEGEKTSMKLNKTTSSVKSPSMSLTGHSTPRNLHIAKAPGSAPAALCSESQSPAFLGTSSSTLTSSPHSGTSKRRRVTDERELRIPLEYGWQRETRIRNFGGRLQGEVAYYAPCGKKLRQYPEVIKYLSRNGIMDISRDNFSFSAKIRVGDFYEARDGPQGMQWCLLKEEDVIPRIRAMEGRRGRPPNPDRQRAREESRMRRRKGRPPNVGNAEFLDNADAKLLRKLQAQEIARQAAQIKLLRKLQKQEQARVAKEAKKQQAIMAAEEKRKQKEQIKIMKQQEKIKRIQQIRMEKELRAQQILEAKKKKKEEAANAKLLEAEKRIKEKEMRRQQAVLLKHQERERRRQHMMLMKAMEARKKAEEKERLKQEKRDEKRLNKERKLEQRRLELEMAKELKKPNEDMCLADQKPLPELPRIPGLVLSGSTFSDCLMVVQFLRNFGKVLGFDVNIDVPNLSVLQEGLLNIGDSMGEVQDLLVRLLSAAVCDPGLITGYKAKTALGEHLLNVGVNRDNVSEILQIFMEAHCGQTELTESLKTKAFQAHTPAQKASVLAFLINELACSKSVVSEIDKNIDYMSNLRRDKWVVEGKLRKLRIIHAKKTGKRDTSGGIDLGEEQHPLGTPTPGRKRRRKGGDSDYDDDDDDDSDDQGDEDDEDEEDKEDKKGKKTDICEDEDEGDQAASVEELEKQIEKLSKQQSQYRRKLFDASHSLRSVMFGQDRYRRRYWILPQCGGIFVEGMESGEGLEEIAKEREKLKKAESVQIKEEMFETSGDSLNCSNTDHCEQKEDLKEKDNTNLFLQKPGSFSKLSKLLEVAKMPPESEVMTPKPNAGANGCTLSYQNSGKHSLGSVQSTATQSNVEKADSNNLFNTGSSGPGKFYSPLPNDQLLKTLTEKNRQWFSLLPRTPCDDTSLTHADMSTASLVTPQSQPPSKSPSPTPAPLGSSAQNPVGLNPFALSPLQVKGGVSMMGLQFCGWPTGVVTSNIPFTSSVPSLGSGLGLSEGNGNSFLTSNVASSKSESPVPQNEKATSAQPAAVEVAKPVDFPSPKPIPEEMQFGWWRIIDPEDLKALLKVLHLRGIREKALQKQIQKHLDYITQACLKNKDVAIIELNENEENQVTRDIVENWSVEEQAMEMDLSVLQQVEDLERRVASASLQVKGWMCPEPASEREDLVYFEHKSFTKLCKEHDGEFTGEDESSAHALERKSDNPLDIAVTRLADLERNIERRIEEDIAPGLRVWRRALSEARSAAQVALCIQQLQKSIAWEKSIMKVYCQICRKGDNEELLLLCDGCDKGCHTYCHRPKITTIPDGDWFCPACIAKASGQTLKIKKLHVKGKKTNESKKGKKVTLTGDTEDEDSASTSSSLKRGNKDLKKRKMEENTSINLSKQESFTSVKKPKRDDSKDLALCSMILTEMETHEDAWPFLLPVNLKLVPGYKKVIKKPMDFSTIREKLSSGQYPNLETFALDVRLVFDNCETFNEDDSDIGRAGHNMRKYFEKKWTDTFKVS

SEQ ID NO: 863119 - protein, 2070 aa, Homo sapiens
MESGERLPSSAASSTTPTSSSTPSVASVVSKGGLSTGVASLSSTINPCAEWWRTTDAHTRTGATFFPPLLGIPPLFAPPAQNHDSSSFHSRTSGKSNRNGPEKGVNGSINGSNTSSVIGINTSVLSTTASSSMGQTKSTSSGGGNRKCNQEQSKNQPLDARVDKIKDKKPRKKAMESSSNSDSDSGTSSDTSSEGISSSDSDDLEEDEEEEDQSIEESEDDDSDSESEAQHKSNNQVLLHGISDPKADGQKATEKAQEKRIHQPLPLASESQTHSFQSQQKQPQVLSQQLPFIFQSSQAKEESVNKHTSVIQSTGLVSNVKPLSLVNQAKKETYMKLIVPSPDVLKAGNKNTSEESSLLTSELRSKREQYKQAFPSQLKKQESSKSLKKVIAALSNPKATSSSPAHPKQTLENNHPNPFLTNALLGNHQPNGVIQSVIQEAPLALTTKTKMQSKINENIAAASSTPFSSPVNLSTSGRRTPGNQTPVMPSASPILHSQGKEKAVSNNVNPVKTQHHSHPAKSLVEQFRGTDSDIPSSKDSEDSNEDEEEDDEEEDEEDDEDDESDDSQSESDSNSESDTEGSEEEDDDDKDQDESDSDTEGEKTSMKLNKTTSSVKSPSMSLTGHSTPRNLHIAKAPGSAPAALCSESQSPAFLGTSSSTLTSSPHSGTSKRRRVTDERELRIPLEYGWQRETRIRNFGGRLQGEVAYYAPCGKKLRQYPEVIKGMQWCLLKEEDVIPRIRAMEGRRGRPPNPDRQRAREESRMRRRKGRPPNVGNAEFLDNADAKLLRKLQAQEIARQAAQIKLLRKLQKQEQARVAKEAKKQQAIMAAEEKRKQKEQIKIMKQQEKIKRIQQIRMEKELRAQQILEAKKKKKEEAANAKLLEAEKRIKEKEMRRQQAVLLKHQERERRRQHMMLMKAMEARKKAEEKERLKQEKRDEKRLNKERKLEQRRLELEMAKELKKPNEDMCLADQKPLPELPRIPGLVLSGSTFSDCLMVVQFLRNFGKVLGFDVNIDVPNLSVLQEGLLNIGDSMGEVQDLLVRLLSAAVCDPGLITGYKAKTALGEHLLNVGVNRDNVSEILQIFMEAHCGQTELTESLKTKAFQAHTPAQKASVLAFLINELACSKSVVSEIDKNIDYMSNLRRDKWVVEGKLRKLRIIHAKKTGKRDTSGGIDLGEEQHPLGTPTPGRKRRRKGGDSDYDDDDDDDSDDQGDEDDEDEEDKEDKKGKKTDICEDEDEGDQAASVEELEKQIEKLSKQQSQYRRKLFDASHSLRSVMFGQDRYRRRYWILPQCGGIFVEGMESGEGLEEIAKEREKLKKAESVQIKEEMFETSGDSLNCSNTDHCEQKEDLKEKDNTNLFLQKPGSFSKLSKLLEVAKMPPESEVMTPKPNAGANGCTLSYQNSGKHSLGSVQSTATQSNVEKADSNNLFNTGSSGPGKFYSPLPNDQLLKTLTEKNRQWFSLLPRTPCDDTSLTHADMSTASLVTPQSQPPSKSPSPTPAPLGSSAQNPVGLNPFALSPLQVKGGVSMMGLQFCGWPTGVVTSNIPFTSSVPSLGSGLGLSEGNGNSFLTSNVASSKSESPVPQNEKATSAQPAAVEVAKPVDFPSPKPIPEEMQFGWWRIIDPEDLKALLKVLHLRGIREKALQKQIQKHLDYITQACLKNKDVAIIELNENEENQVTRDIVENWSVEEQAMEMDLSVLQQVEDLERRVASASLQVKGWMCPEPASEREDLVYFEHKSFTKLCKEHDGEFTGEDESSAHALERKSDNPLDIAVTRLADLERNIERRIEEDIAPGLRVWRRALSEARSAAQVALCIQQLQKSIAWEKSIMKVYCQICRKGDNEELLLLCDGCDKGCHTYCHRPKITTIPDGDWFCPACIAKASGQTLKIKKLHVKGKKTNESKKGKKVTLTGDTEDEDSASTSSSLKRGNKDLKKRKMEENTSINLSKQESFTSVKKPKRDDSKDLALCSMILTEMETHEDAWPFLLPVNLKLVPGYKKVIKKPMDFSTIREKLSSGQYPNLETFALDVRLVFDNCETFNEDDSDIGRAGHNMRKYFEKKWTDTFKVS

SEQ ID NO: 863120 - protein, 2070 aa, Homo sapiens; identical to SEQ ID NO: 863119

SEQ ID NO: 863121 - protein, 1496 aa, Homo sapiens
FFYFPESDSNSESDTEGSEEEDDDDKDQDESDSDTEGEKTSMKLNKTTSSVKSPSMSLTGTSKRRRVTDERELRIPLEYGWQRETRIRNFGGRLQGEVAYYAPCGKKLRQYPEVIKYLSRNGIMDISRDNFSFSAKIRVGDFYEARDGPQGMQWCLLKEEDVIPRIRAMEGRRGRPPNPDRQRAREESRMRRRKGRPPNVGNAEFLDNADAKLLRKLQAQEIARQAAQIKLLRKLQKQEQARVAKEAKKQQAIMAAEEKRKQKEQIKIMKQQEKIKRIQQIRMEKELRAQQILEAKKKKKEEAANAKLLEAEKRIKEKEMRRQQAVLLKHQERERRRQHMMLMKAMEARKKAEEKERLKQEKRDEKRLNKERKLEQRRLELEMAKELKKPNEDMCLADQKPLPELPRIPGLVLSGSTFSDCLMVVQFLRNFGKVLGFDVNIDVPNLSVLQEGLLNIGDSMGEVQDLLVRLLSAAVCDPGLITGYKAKTALGEHLLNVGVNRDNVSEILQIFMEAHCGQTELTESLKTKAFQAHTPAQKASVLAFLINELACSKSVVSEIDKNIDYMSNLRRDKWVVEGKLRKLRIIHAKKTGKRDTSGGIDLGEEQHPLGTPTPGRKRRRKGGDSDYDDDDDDDSDDQGDEDDEDEEDKEDKKGKKTDICEDEDEGDQAASVEELEKQIEKLSKQQSQYRRKLFDASHSLRSVMFGQDRYRRRYWILPQCGGIFVEGMESGEGLEEIAKEREKLKKAESVQIKEEMFETSGDSLNCSNTDHCEQKEDLKEKDNTNLFLQKPGSFSKLSKLLEVAKMPPESEVMTPKPNAGANGCTLSYQNSGKHSLGSVQSTATQSNVEKADSNNLFNTGSSGPGKFYSPLPNDQLLKTLTEKNRQWFSLLPRTPCDDTSLTHADMSTASLVTPQSQPPSKSPSPTPAPLGSSAQNPVGLNPFALSPLQVKGGVSMMGLQFCGWPTGVVTSNIPFTSSVPSLGSGLGLSEGNGNSFLTSNVASSKSESPVPQNEKATSAQPAAVEVAKPVDFPSPKPIPEEMQFGWWRIIDPEDLKALLKVLHLRGIREKALQKQIQKHLDYITQACLKNKDVAIIELNENEENQVTRDIVENWSVEEQAMEMDLSVLQQVEDLERRVASASLQVKGWMCPEPASEREDLVYFEHKSFTKLCKEHDGEFTGEDESSAHALERKSDNPLDIAVTRLADLERNIERRIEEDIAPGLRVWRRALSEARSAAQVALCIQQLQKSIAWEKSIMKVYCQICRKGDNEELLLLCDGCDKGCHTYCHRPKITTIPDGDWFCPACIAKASGQTLKIKKLHVKGKKTNESKKGKKVTLTGDTEDEDSASTSSSLKRGNKDLKKRKMEENTSINLSKQESFTSVKKPKRDDSKDLALCSMILTEMETHEDAWPFLLPVNLKLVPGYKKVIKKPMDFSTIREKLSSGQYPNLETFALDVRLVFDNCETFNEDDSDIGRAGHNMRKYFEKKWTDTFKVS

SEQ ID NO: 863122 - protein, 2078 aa, Homo sapiens
MESGERLPSSAASSTTPTSSSTPSVASVVSKGGLSTGVASLSSTINPCGHLFRTAGDQPFNLSTVSSAFPMVSHPVFGLHSASSGHSEFGGLGTLGTPTALAAHPQLASFPAEWWRTTDAHTRTGATFFPPLLGIPPLFAPPAQNHDSSSFHSRTSGKSNRNGPEKGVNGSINGSNTSSVIGINTSVLSTTASSSMGQTKSTSSGGGNRKCNQEQSKNQPLDARVDKIKDKKPRKKAMESSSNSDSDSGTSSDTSSEGISSSDSDDLEEDEEEEDQSIEESEDDDSDSESEAQHKSNNQVLLHGISDPKADGQKATEKAQEKRIHQPLPLASESQTHSFQSQQKQPQVLSQQLPFIFQSSQAKEESVNKHTSVIQSTGLVSNVKPLSLVNQAKKETYMKLIVPSPDVLKAGNKNTSEESSLLTSELRSKREQYKQAFPSQLKKQESSKSLKKVIAALSNPKATSSSPAHPKQTLENNHPNPFLTNALLGNHQPNGVIQSVIQEAPLALTTKTKMQSKINENIAAASSTPFSSPVNLSTSGRRTPGNQTPVMPSASPILHSQGKEKAVSNNVNPVKTQHHSHPAKSLVEQFRGTDSDIPSSKDSEDSNEDEEEDDEEEDEEDDEDDESDDSQSGTSKRRRVTDERELRIPLEYGWQRETRIRNFGGRLQGEVAYYAPCGKKLRQYPEVIKYLSRNGIMDISRDNFSFSAKIRVGDFYEARDGPQGMQWCLLKEEDVIPRIRAMEGRRGRPPNPDRQRAREESRMRRRKGRPPNVGNAEFLDNADAKLLRKLQAQEIARQAAQIKLLRKLQKQEQARVAKEAKKQQAIMAAEEKRKQKEQIKIMKQQEKIKRIQQIRMEKELRAQQILEAKKKKKEEAANAKLLEAEKRIKEKEMRRQQAVLLKHQELERHRLDMERERRRQHMMLMKAMEARKKAEEKERLKQEKRDEKRLNKERKLEQRRLELEMAKELKKPNEDMCLADQKPLPELPRIPGLVLSGSTFSDCLMVVQFLRNFGKVLGFDVNIDVPNLSVLQEGLLNIGDSMGEVQDLLVRLLSAAVCDPGLITGYKAKTALGEHLLNVGVNRDNVSEILQIFMEAHCGQTELTESLKTKAFQAHTPAQKASVLAFLINELACSKSVVSEIDKNIDYMSNLRRDKWVVEGKLRKLRIIHAKKTGKRDTSGGIDLGEEQHPLGTPTPGRKRRRKGGDSDYDDDDDDDSDDQGDEDDEDEEDKEDKKGKKTDICEDEDEGDQAASVEELEKQIEKLSKQQSQYRRKLFDASHSLRSVMFGQDRYRRRYWILPQCGGIFVEGMESGEGLEEIAKEREKLKKAESVQIKEEMFETSGDSLNCSNTDHCEQKEDLKEKDNTNLFLQKPGSFSKLSKLLEVAKMPPESEVMTPKPNAGANGCTLSYQNSGKHSLGSVQSTATQSNVEKADSNNLFNTGSSGPGKFYSPLPNDQLLKTLTEKNRQWFSLLPRTPCDDTSLTHADMSTASLVTPQSQPPSKSPSPTPAPLGSSAQNPVGLNPFALSPLQVKGGVSMMGLQFCGWPTGVVTSNIPFTSSVPSLGSGLGLSEGNGNSFLTSNVASSKSESPVPQNEKATSAQPAAVEVAKPVDFPSPKPIPEEMQFGWWRIIDPEDLKALLKVLHLRGIREKALQKQIQKHLDYITQACLKNKDVAIIELNENEENQVTRDIVENWSVEEQAMEMDLSVLQQVEDLERRVASASLQVKGWMCPEPASEREDLVYFEHKSFTKLCKEHDGEFTGEDESSAHALERKSDNPLDIAVTRLADLERNIERRIEEDIAPGLRVWRRALSEARSAAQVALCIQQLQKSIAWEKSIMKVYCQICRKGDNEELLLLCDGCDKGCHTYCHRPKITTIPDGDWFCPACIAKASGQTLKIKKLHVKGKKTNESKKGKKVTLTGDTEDEDSASTSSSLKRGNKDLKKRKMEENTSINLSKQESFTSVKKPKRDDSKDLALCSMILTEMETHEDAWPFLLPVNLKLVPGYKKVIKKPMDFSTIREKLSSGQYPNLETFALDVRLVFDNCETFNEDDSDIGRAGHNMRKYFEKKWTDTFKVS

SEQ ID NO: 863123 - protein, 2086 aa, Homo sapiens
MESGERLPSSAASSTTPTSSSTPSVASVVSKGGLSTGVASLSSTINPCGHLFRTAGDQPFNLSTVSSAFPMVSHPVFGLHSASSGHSEFGGLGTLGTPTALAAHPQLASFPAEWWRTTDAHTRTGATFFPPLLGIPPLFAPPAQNHDSSSFHSRTSGKSNRNGPEKGVNGSINGSNTSSVIGINTSVLSTTASSSMGQTKSTSSGGGNRKCNQEQSKNQPLDARVDKIKDKKPRKKAMESSSNSDSDSGTSSDTSSEGISSSDSDDLEEDEEEEDQSIEESEDDDSDSESEAQHKSNNQVLLHGISDPKADGQKATEKAQEKRIHQPLPLASESQTHSFQSQQKQPQVLSQQLPFIFQSSQAKEESVNKHTSVIQSTGLVSNVKPLSLVNQAKKETYMKLIVPSPDVLKAGNKNTSEESSLLTSELRSKREQYKQAFPSQLKKQESSKSLKKVIAALSNPKATSSSPAHPKQTLENNHPNPFLTNALLGNHQPNGVIQSVIQEAPLALTTKTKMQSKINENIAAASSTPFSSPVNLSTSGRRTPGNQTPVMPSASPILHSQGKEKAVSNNVNPVKTQHHSHPAKSLVEQFRGTDSDIPSSKDSEDSNEDEEEDDEEEDEEDDEDDESDDSQSGTSKRRRVTDERELRIPLEYGWQRETRIRNFGGRLQGEVAYYAPCGKKLRQYPEVIKYLSRNGIMDISRDNFSFSAKIRVGDFYEARDGPQGMQWCLLKEEDVIPRIRAMEGRRGRPPNPDRQRAREESRMRRRKGRPPNVGNAEFLDNADAKLLRKLQAQEIARQAAQIKLLRKLQKQEQARVAKEAKKQQAIMAAEEKRKQKEQIKIMKQQEKIKRIQQIRMEKELRAQQILEAKKKKKEEAANAKLLEAEKRIKEKEMRRQQAVLLKHQERERRRQHMMLMKAMEARKKAEEKERLKQEKRDEKRLNKERKLEQRRLELEMAKELKKPNEDMCLADQKPLPELPRIPGLVLSGSTFSDCLMVVQFLRNFGKVLGFDVNIDVPNLSVLQEGLLNIGDSMGEVQDLLVRLLSAAVCDPGLITGYKAKTALGEHLLNVGVNRDNVSEILQIFMEAHCGQTELTESLKTKAFQAHTPAQKASVLAFLINELACSKSVVSEIDKNIDYMSNLRRDKWVVEGKLRKLRIIHAKKTGKRDTSGGIDLGEEQHPLGTPTPGRKRRRKGGDSDYDDDDDDDSDDQGDEDDEDEEDKEDKKGKKTDICEDEDEGDQAASVEELEKQIEKLSKQQSQYRRKLFDASHSLRSVMFGQDRYRRRYWILPQCGGIFVEGMESGEGLEEIAKEREKLKKAESVQIKEEMFETSGDSLNCSNTDHCEQKEDLKEKDNTNLFLQKPGSFSKLSKLLEVAKMPPESEVMTPKPNAGANGCTLSYQNSGKHSLGSVQSTATQSNVEKADSNNLFNTGSSGPGKFYSPLPNDQLLKTLTEKNRQWFSLLPRTPCDDTSLTHADMSTASLVTPQSQPPSKSPSPTPAPLGSSAQNPVGLNPFALSPLQVKGGVSMMGLQFCGWPTGVVTSNIPFTSSVPSLGSGLGLSEGNGNSFLTSNVASSKSESPVPQNEKATSAQPAAVEVAKPVDFPSPKPIPEEMQFGWWRIIDPEDLKALLKVLHLRGIREKALQKQIQKHLDYITQACLKNKDVAIIELNENEENQVTRDIVENWSVEEQAMEMDLSVLQQVEDLERRVASASLQVKGWMCPEPASEREDLVYFEHKSFTKLCKEHDGEFTGEDESSAHALERKSDNPLDIAVTRLADLERNIERRYLKSPLSTTIQIKLDNVGTVTVPAPAPSVSGDGDGIEEDIAPGLRVWRRALSEARSAAQVALCIQQLQKSIAWELLLLCDGCDKGCHTYCHRPKITTIPDGDWFCPACIAKASGQTLKIKKLHVKGKKTNESKKGKKVTLTGDTEDEDSASTSSSLKRGNKDLKKRKMEENTSINLSKQESFTSVKKPKRDDSKDLALCSMILTEMETHEDAWPFLLPVNLKLVPGYKKVIKKPMDFSTIREKLSSGQYPNLETFALDVRLVFDNCETFNEDDSDIGRAGHNMRKYFEKKWTDTFKVS

SEQ ID NO: 863124 - protein, 1823 aa, Homo sapiens
MESGERLPSSAASSTTPTSSSTPSVASVVSKGGLSTGVASLSSTINPCGHLFRTAGDQPFNLSTVSSAFPMVSHPVFGLHSASSGHSEFGGLGTLGTPTALAAHPQLASFPAEWWRTTDAHTRTGATFFPPLLGIPPLFAPPAQNHDSSSFHSRTSGKSNRNGPEKGVNGSINGSNTSSVIGINTSVLSTTASSSMGQTKSTSSGGGNRKCNQEQSKNQPLDARVDKIKDKKPRKKAMESSSNSDSDSGTSSDTSSEGISSSDSDDLEEDEEEEDQSIEESEDDDSDSESEAQHKSNNQVLLHGISDPKADGQKATEKAQEKRIHQPLPLASESQTHSFQSQQKQPQVLSQQLPFIFQSSQAKEESVNKHTSVIQSTGLVSNVKPLSLVNQAKKETYMKLIVPSPDVLKAGNKNTSEESSLLTSELRSKREQYKQAFPSQLKKQESSKSLKKVIAALSNPKATSSSPAHPKQTLENNHPNPFLTNALLGNHQPNGVIQSVIQEAPLALTTKTKMQSKINENIAAASSTPFSSPVNLSTSGRRTPGNQTPVMPSASPILHSQGKEKAVSNNVNPVKTQHHSHPAKSLVEQFRGTDSDIPSSKDSEDSNEDEEEDDEEEDEEDDEDDESDDSQSGTSKRRRVTDERELRIPLEYGWQRETRIRNFGGRLQGEVAYYAPCGKKLRQYPEVIKYLSRNGIMDISRDNFSFSAKIRVGDFYEARDGPQGMQWCLLKEEDVIPRIRAMEGRRGRPPNPDRQRAREESRMRRRKGRPPNVGNAEFLDNADAKLLRKLQAQEIARQAAQIKLLRKLQKQEQARVAKEAKKQQAIMAAEEKRKQKEQIKIMKQQEKIKRIQQIRMEKELRAQQILEAKKKKKEEAANAKLLEAEKRIKEKEMRRQQAVLLKHQERERRRQHMMLMKAMEARKKAEEKERLKQEKRDEKRLNKERKLEQRRLELEMAKELKKPNEDMCLADQKPLPELPRIPGLVLSGSTFSDCLMVVQFLRNFGKVLGFDVNIDVPNLSVLQEGLLNIGDSMGEVQDLLVRLLSAAVCDPGLITGYKAKTALGEHLLNVGVNRDNVSEILQIFMEAHCGQTELTESLKTKAFQAHTPAQKASVLAFLINELACSKSVVSEIDKNIDYMSNLRRDKWVVEGKLRKLRIIHAKKTGKRDTSGGIDLGEEQHPLGTPTPGRKRRRKGGDSDYDDDDDDDSDDQGDEDDEDEEDKEDKKGKKTDICEDEDEGDQAASVEELEKQIEKLSKQQSQYRRKLFDASHSLRSVMFGQDRYRRRYWILPQCGGIFVEGMESGEGLEEIAKEREKLKKAESVQIKEEMFETSGDSLNCSNTDHCEQKEDLKEKDNTNLFLQKPGSFSKLSKLLEVAKMPPESEVMTPKPNAGANGCTLSYQNSGKHSLGSVQSTATQSNVEKADSNNLFNTGSSGPGKFYSPLPNDQLLKTLTEKNRQWFSLLPRTPCDDTSLTHADMSTASLVTPQSQPPSKSPSPTPAPLGSSAQNPVGLNPFALSPLQVKGGVSMMGLQFCGWPTGVVTSNIPFTSSVPSLGSGLGLSEGNGNSFLTSNVASSKSESPVPQNEKATSAQPAAVEVAKPVDFPSPKPIPEEMQFGWWRIIDPEDLKALLKVLHLRGIREKALQKQIQKHLDYITQACLKNKDVAIIELNENEENQVTRDIVENWSVEEQAMEMDLSVLQQVEDLERRVASASLQVKGWMCPEPASEREDLVYFEHKSFTKLCKEHDGEFTGEDESSAHALERKSDNPLDIAVTRLADLERNIERRYLKSPLSTTIQIKLDNVGTVTVPAPAPSVSGDGDG

SEQ ID NO: 863125 - protein, 1153 aa, Homo sapiens
MGVTEMPPENLASQRKLLVQYKRGKKVAAYFTLEDIEIMAFKKLSCFYFICISFYFQPLPELPRIPGLVLSGSTFSDCLMVVQFLRNFGKVLGFDVNIDVPNLSVLQEGLLNIGDSMGEVQDLLVRLLSAAVCDPGLITGYKAKTALGEHLLNVGVNRDNVSEILQIFMEAHCGQTELTESLKTKAFQAHTPAQKASVLAFLINELACSKSVVSEIDKNIDYMSNLRRDKWVVEGKLRKLRIIHAKKTGKRDTSGGIDLGEEQHPLGTPTPGRKRRRKGGDSDYDDDDDDDSDDQGDEDDEDEEDKEDKKGKKTDICEDEDEGDQAASVEELEKQIEKLSKQQSQYRRKLFDASHSLRSVMFGQDRYRRRYWILPQCGGIFVEGMESGEGLEEIAKEREKLKKAESVQIKEEMFETSGDSLNCSNTDHCEQKEDLKEKDNTNLFLQKPGSFSKLSKLLEVAKMPPESEVMTPKPNAGANGCTLSYQNSGKHSLGSVQSTATQSNVEKADSNNLFNTGSSGPGKFYSPLPNDQLLKTLTEKNRQWFSLLPRTPCDDTSLTHADMSTASLVTPQSQPPSKSPSPTPAPLGSSAQNPVGLNPFALSPLQVKGGVSMMGLQFCGWPTGVVTSNIPFTSSVPSLGSGLGLSEGNGNSFLTSNVASSKSESPVPQNEKATSAQPAAVEVAKPVDFPSPKPIPEEMQFGWWRIIDPEDLKALLKVLHLRGIREKALQKQIQKHLDYITQACLKNKDVAIIELNENEENQVTRDIVENWSVEEQAMEMDLSVLQQVEDLERRVASASLQVKGWMCPEPASEREDLVYFEHKSFTKLCKEHDGEFTGEDESSAHALERKSDNPLDIAVTRLADLERNIERRIEEDIAPGLRVWRRALSEARSAAQVALCIQQLQKSIAWEKSIMKVYCQICRKGDNEELLLLCDGCDKGCHTYCHRPKITTIPDGDWFCPACIAKASGQTLKIKKLHVKGKKTNESKKGKKVTLTGDTEDEDSASTSSSLKRGNKDLKKRKMEENTSINLSKQESFTSVKKPKRDDSKDLALCSMILTEMETHEDAWPFLLPVNLKLVPGYKKVIKKPMDFSTIREKLSSGQYPNLETFALDVRLVFDNCETFNEDDSDIGRAGHNMRKYFEKKWTDTFKVS

SEQ ID NO: 863126 - protein, 1177 aa, Homo sapiens
MRRQQAVLLKHQERERRRQHMMLMKAMEARKKAEEKERLKQEKRDEKRLNKERKLEQRRLELEMAKELKKPNEDMCLADQKPLPELPRIPGLVLSGSTFSDCLMVVQFLRNFGKVLGFDVNIDVPNLSVLQEGLLNIGDSMGEVQDLLVRLLSAAVCDPGLITGYKAKTALGEHLLNVGVNRDNVSEILQIFMEAHCGQTELTESLKTKAFQAHTPAQKASVLAFLINELACSKSVVSEIDKNIDYMSNLRRDKWVVEGKLRKLRIIHAKKTGKRDTSGGIDLGEEQHPLGTPTPGRKRRRKGGDSDYDDDDDDDSDDQGDEDDEDEEDKEDKKGKKTDICEDEDEGDQAASVEELEKQIEKLSKQQSQYRRKLFDASHSLRSVMFGQDRYRRRYWILPQCGGIFVEGMESGEGLEEIAKEREKLKKAESVQIKEEMFETSGDSLNCSNTDHCEQKEDLKEKDNTNLFLQKPGSFSKLSKLLEVAKMPPESEVMTPKPNAGANGCTLSYQNSGKHSLGSVQSTATQSNVEKADSNNLFNTGSSGPGKFYSPLPNDQLLKTLTEKNRQWFSLLPRTPCDDTSLTHADMSTASLVTPQSQPPSKSPSPTPAPLGSSAQNPVGLNPFALSPLQVKGGVSMMGLQFCGWPTGVVTSNIPFTSSVPSLGSGLGLSEGNGNSFLTSNVASSKSESPVPQNEKATSAQPAAVEVAKPVDFPSPKPIPEEMQFGWWRIIDPEDLKALLKVLHLRGIREKALQKQIQKHLDYITQACLKNKDVAIIELNENEENQVTRDIVENWSVEEQAMEMDLSVLQQVEDLERRVASASLQVKGWMCPEPASEREDLVYFEHKSFTKLCKEHDGEFTGEDESSAHALERKSDNPLDIAVTRLADLERNIERRIEEDIAPGLRVWRRALSEARSAAQVALCIQQLQKSIAWEKSIMKVYCQICRKGDNEELLLLCDGCDKGCHTYCHRPKITTIPDGDWFCPACIAKASGQTLKIKKLHVKGKKTNESKKGKKVTLTGDTEDEDSASTSSSLKRGNKDLKKRKMEENTSINLSKQESFTSVKKPKRDDSKDLALCSMILTEMETHEDAWPFLLPVNLKLVPGYKKVIKKPMDFSTIREKLSSGQYPNLETFALDVRLVFDNCETFNEDDSDIGRAGHNMRKYFEKKWTDTFKVS

SEQ ID NO: 863127 - protein, 1823 aa, Homo sapiens; identical to SEQ ID NO: 863124

SEQ ID NO: 863128 - protein, 1802 aa, Homo sapiens
  misc_feature (1802)..(1802): Xaa can be any naturally occurring amino acid
MESGERLPSSAASSTTPTSSSTPSVASVVSKGGLSTGVASLSSTINPCGHLFRTAGDQPFNLSTVSSAFPMVSHPVFGLHSASSGHSEFGGLGTLGTPTALAAHPQLASFPAEWWRTTDAHTRTGATFFPPLLGIPPLFAPPAQNHDSSSFHSRTSGKSNRNGPEKGVNGSINGSNTSSVIGINTSVLSTTASSSMGQTKSTSSGGGNRKCNQEQSKNQPLDARVDKIKDKKPRKKAMESSSNSDSDSGTSSDTSSEGISSSDSDDLEEDEEEEDQSIEESEDDDSDSESEAQHKSNNQVLLHGISDPKADGQKATEKAQEKRIHQPLPLASESQTHSFQSQQKQPQVLSQQLPFIFQSSQAKEESVNKHTSVIQSTGLVSNVKPLSLVNQAKKETYMKLIVPSPDVLKAGNKNTSEESSLLTSELRSKREQYKQAFPSQLKKQESSKSLKKVIAALSNPKATSSSPAHPKQTLENNHPNPFLTNALLGNHQPNGVIQSVIQEAPLALTTKTKMQSKINENIAAASSTPFSSPVNLSTSGRRTPGNQTPVMPSASPILHSQGKEKAVSNNVNPVKTQHHSHPAKSLVEQFRGTDSDIPSSKDSEDSNEDEEEDDEEEDEEDDEDDESDDSQSGTSKRRRVTDERELRIPLEYGWQRETRIRNFGGRLQGEVAYYAPCGKKLRQYPEVIKYLSRNGIMDISRDNFSFSAKIRVGDFYEARDGPQGMQWCLLKEEDVIPRIRAMEGRRGRPPNPDRQRAREESRMRRRKGRPPNVGNAEFLDNADAKLLRKLQAQEIARQAAQIKLLRKLQKQEQARVAKEAKKQQAIMAAEEKRKQKEQIKIMKQQEKIKRIQQIRMEKELRAQQILEAKKKKKEEAANAKLLEAEKRIKEKEMRRQQAVLLKHQERERRRQHMMLMKAMEARKKAEEKERLKQEKRDEKRLNKERKLEQRRLELEMAKELKKPNEDMCLADQKPLPELPRIPGLVLSGSTFSDCLMVVQFLRNFGKVLGFDVNIDVPNLSVLQEGLLNIGDSMGEVQDLLVRLLSAAVCDPGLITGYKAKTALGEHLLNVGVNRDNVSEILQIFMEAHCGQTELTESLKTKAFQAHTPAQKASVLAFLINELACSKSVVSEIDKNIDYMSNLRRDKWVVEGKLRKLRIIHAKKTGKRDTSGGIDLGEEQHPLGTPTPGRKRRRKGGDSDYDDDDDDDSDDQGDEDDEDEEDKEDKKGKKTDICEDEDEGDQAASVEELEKQIEKLSKQQSQYRRKLFDASHSLRSVMFGQDRYRRRYWILPQCGGIFVEGMESGEGLEEIAKEREKLKKAESVQIKEEMFETSGDSLNCSNTDHCEQKEDLKEKDNTNLFLQKPGSFSKLSKLLEVAKMPPESEVMTPKPNAGANGCTLSYQNSGKHSLGSVQSTATQSNVEKADSNNLFNTGSSGPGKFYSPLPNDQLLKTLTEKNRQWFSLLPRTPCDDTSLTHADMSTASLVTPQSQPPSKSPSPTPAPLGSSAQNPVGLNPFALSPLQVKGGVSMMGLQFCGWPTGVVTSNIPFTSSVPSLGSGLGLSEGNGNSFLTSNVASSKSESPVPQNEKATSAQPAAVEVAKPVDFPSPKPIPEEMQFGWWRIIDPEDLKALLKVLHLRGIREKALQKQIQKHLDYITQACLKNKDVAIIELNENEENQVTRDIVENWSVEEQAMEMDLSVLQQVEDLERRVASASLQVKGWMCPEPASEREDLVYFEHKSFTKLCKEHDGEFTGEDESSAHALERKSDNPLDIAVTRLADLERNIERRYLKSPLSTTIQIKX

SEQ ID NO: 863129 - protein, 2069 aa, Homo sapiens
MESGERLPSSAASSTTPTSSSTPSVASVVSKGGLSTGVASLSSTINPCGHLFRTAGDQPFNLSTVSSAFPMVSHPVFGLHSASSGHSEFGGLGTLGTPTALAAHPQLASFPAEWWRTTDAHTRTGATFFPPLLGIPPLFAPPAQNHDSSSFHSRTSGKSNRNGPEKGVNGSINGSNTSSVIGINTSVLSTTASSSMGQTKSTSSGGGNRKCNQEQSKNQPLDARVDKIKDKKPRKKAMESSSNSDSDSGTSSDTSSEGISSSDSDDLEEDEEEEDQSIEESEDDDSDSESEAQHKSNNQVLLHGISDPKADGQKATEKAQEKRIHQPLPLASESQTHSFQSQQKQPQVLSQQLPFIFQSSQAKEESVNKHTSVIQSTGLVSNVKPLSLVNQAKKETYMKLIVPSPDVLKAGNKNTSEESSLLTSELRSKREQYKQAFPSQLKKQESSKSLKKVIAALSNPKATSSSPAHPKQTLENNHPNPFLTNALLGNHQPNGVIQSVIQEAPLALTTKTKMQSKINENIAAASSTPFSSPVNLSTSGRRTPGNQTPVMPSASPILHSQGKEKAVSNNVNPVKTQHHSHPAKSLVEQFRGTDSDIPSSKDSEDSNEDEEEDDEEEDEEDDEDDESDDSQSGTSKRRRVTDERELRIPLEYGWQRETRIRNFGGRLQGEVAYYAPCGKKLRQYPEVIKYLSRNGIMDISRDNFSFSAKIRVGDFYEARDGPQGMQWCLLKEEDVIPRIRAMEGRRGRPPNPDRQRAREESRMRRRKGRPPNVGNAEFLDNADAKLLRKLQAQEIARQAAQIKLLRKLQKQEQARVAKEAKKQQAIMAAEEKRKQKEQIKIMKQQEKIKRIQQIRMEKELRAQQILEAKKKKKEEAANAKLLEAEKRIKEKEMRRQQAVLLKHQERERRRQHMMLMKAMEARKKAEEKERLKQEKRDEKRLNKERKLEQRRLELEMAKELKKPNEDMCLADQKPLPELPRIPGLVLSGSTFSDCLMVVQFLRNFGKVLGFDVNIDVPNLSVLQEGLLNIGDSMGEVQDLLVRLLSAAVCDPGLITGYKAKTALGEHLLNVGVNRDNVSEILQIFMEAHCGQTELTESLKTKAFQAHTPAQKASVLAFLINELACSKSVVSEIDKNIDYMSNLRRDKWVVEGKLRKLRIIHAKKTGKRDTSGGIDLGEEQHPLGTPTPGRKRRRKGGDSDYDDDDDDDSDDQGDEDDEDEEDKEDKKGKKTDICEDEDEGDQAASVEELEKQIEKLSKQQSQYRRKLFDASHSLRSVMFGQDRYRRRYWILPQCGGIFVEGMESGEGLEEIAKEREKLKKAESVQIKEEMFETSGDSLNCSNTDHCEQKEDLKEKDNTNLFLQKPGSFSKLSKLLEVAKMPPESEVMTPKPNAGANGCTLSYQNSGKHSLGSVQSTATQSNVEKADSNNLFNTGSSGPGKFYSPLPNDQLLKTLTEKNRQWFSLLPRTPCDDTSLTHADMSTASLVTPQSQPPSKSPSPTPAPLGSSAQNPVGLNPFALSPLQVKGGVSMMGLQFCGWPTGVVTSNIPFTSSVPSLGSGLGLSEGNGNSFLTSNVASSKSESPVPQNEKATSAQPAAVEVAKPVDFPSPKPIPEEMQFGWWRIIDPEDLKALLKVLHLRGIREKALQKQIQKHLDYITQACLKNKDVAIIELNENEENQVTRDIVENWSVEEQAMEMDLSVLQQVEDLERRVASASLQVKGWMCPEPASEREDLVYFEHKSFTKLCKEHDGEFTGEDESSAHALERKSDNPLDIAVTRLADLERNIERRIEEDIAPGLRVWRRALSEARSAAQVALCIQQLQKSIAWEKSIMKVYCQICRKGDNEELLLLCDGCDKGCHTYCHRPKITTIPDGDWFCPACIAKASGQTLKIKKLHVKGKKTNESKKGKKVTLTGDTEDEDSASTSSSLKRGNKDLKKRKMEENTSINLSKQESFTSVKKPKRDDSKDLALCSMILTEMETHEDAWPFLLPVNLKLVPGYKKVIKKPMDFSTIREKLSSGQYPNLETFALDVRLVFDNCETFNEDDSDIGRAGHNMRKYFEKKWTDTFKVS

SEQ ID NO: 863130 - protein, 2133 aa, Homo sapiens
MESGERLPSSAASSTTPTSSSTPSVASVVSKGGLSTGVASLSSTINPCGHLFRTAGDQPFNLSTVSSAFPMVSHPVFGLHSASSGHSEFGGLGTLGTPTALAAHPQLASFPAEWWRTTDAHTRTGATFFPPLLGIPPLFAPPAQNHDSSSFHSRTSGKSNRNGPEKGVNGSINGSNTSSVIGINTSVLSTTASSSMGQTKSTSSGGGNRKCNQEQSKNQPLDARVDKIKDKKPRKKAMESSSNSDSDSGTSSDTSSEGISSSDSDDLEEDEEEEDQSIEESEDDDSDSESEAQHKSNNQVLLHGISDPKADGQKATEKAQEKRIHQPLPLASESQTHSFQSQQKQPQVLSQQLPFIFQSSQAKEESVNKHTSVIQSTGLVSNVKPLSLVNQAKKETYMKLIVPSPDVLKAGNKNTSEESSLLTSELRSKREQYKQAFPSQLKKQESSKSLKKVIAALSNPKATSSSPAHPKQTLENNHPNPFLTNALLGNHQPNGVIQSVIQEAPLALTTKTKMQSKINENIAAASSTPFSSPVNLSTSGRRTPGNQTPVMPSASPILHSQGKEKAVSNNVNPVKTQHHSHPAKSLVEQFRGTDSDIPSSKDSEDSNEDEEEDDEEEDEEDDEDDESDDSQSESDSNSESDTEGSEEEDDDDKDQDESDSDTEGEKTSMKLNKTTSSVKSPSMSLTGHSTPRNLHIAKAPGSAPAALCSESQSPAFLGTSSSTLTSSPHSGTSKRRRVTDERELRIPLEYGWQRETRIRNFGGRLQGEVAYYAPCGKKLRQYPEVIKGMQWCLLKEEDVIPRIRAMEGRRGRPPNPDRQRAREESRMRRRKGRPPNVGNAEFLDNADAKLLRKLQAQEIARQAAQIKLLRKLQKQEQARVAKEAKKQQAIMAAEEKRKQKEQIKIMKQQEKIKRIQQIRMEKELRAQQILEAKKKKKEEAANAKLLEAEKRIKEKEMRRQQAVLLKHQERERRRQHMMLMKAMEARKKAEEKERLKQEKRDEKRLNKERKLEQRRLELEMAKELKKPNEDMCLADQKPLPELPRIPGLVLSGSTFSDCLMVVQFLRNFGKVLGFDVNIDVPNLSVLQEGLLNIGDSMGEVQDLLVRLLSAAVCDPGLITGYKAKTALGEHLLNVGVNRDNVSEILQIFMEAHCGQTELTESLKTKAFQAHTPAQKASVLAFLINELACSKSVVSEIDKNIDYMSNLRRDKWVVEGKLRKLRIIHAKKTGKRDTSGGIDLGEEQHPLGTPTPGRKRRRKGGDSDYDDDDDDDSDDQGDEDDEDEEDKEDKKGKKTDICEDEDEGDQAASVEELEKQIEKLSKQQSQYRRKLFDASHSLRSVMFGQDRYRRRYWILPQCGGIFVEGMESGEGLEEIAKEREKLKKAESVQIKEEMFETSGDSLNCSNTDHCEQKEDLKEKDNTNLFLQKPGSFSKLSKLLEVAKMPPESEVMTPKPNAGANGCTLSYQNSGKHSLGSVQSTATQSNVEKADSNNLFNTGSSGPGKFYSPLPNDQLLKTLTEKNRQWFSLLPRTPCDDTSLTHADMSTASLVTPQSQPPSKSPSPTPAPLGSSAQNPVGLNPFALSPLQVKGGVSMMGLQFCGWPTGVVTSNIPFTSSVPSLGSGLGLSEGNGNSFLTSNVASSKSESPVPQNEKATSAQPAAVEVAKPVDFPSPKPIPEEMQFGWWRIIDPEDLKALLKVLHLRGIREKALQKQIQKHLDYITQACLKNKDVAIIELNENEENQVTRDIVENWSVEEQAMEMDLSVLQQVEDLERRVASASLQVKGWMCPEPASEREDLVYFEHKSFTKLCKEHDGEFTGEDESSAHALERKSDNPLDIAVTRLADLERNIERRIEEDIAPGLRVWRRALSEARSAAQVALCIQQLQKSIAWEKSIMKVYCQICRKGDNEELLLLCDGCDKGCHTYCHRPKITTIPDGDWFCPACIAKASGQTLKIKKLHVKGKKTNESKKGKKVTLTGDTEDEDSASTSSSLKRGNKDLKKRKMEENTSINLSKQESFTSVKKPKRDDSKDLALCSMILTEMETHEDAWPFLLPVNLKLVPGYKKVIKKPMDFSTIREKLSSGQYPNLETFALDVRLVFDNCETFNEDDSDIGRAGHNMRKYFEKKWTDTFKVS

SEQ ID NO: 863131 - protein, 2069 aa, Homo sapiens; identical to SEQ ID NO: 863129

SEQ ID NO: 863132 - protein, 2154 aa, Homo sapiens
MESGERLPSSAASSTTPTSSSTPSVASVVSKGGLSTGVASLSSTINPCGHLFRTAGDQPFNLSTVSSAFPMVSHPVFGLHSASSGHSEFGGLGTLGTPTALAAHPQLASFPAEWWRTTDAHTRTGATFFPPLLGIPPLFAPPAQNHDSSSFHSRTSGKSNRNGPEKGVNGSINGSNTSSVIGINTSVLSTTASSSMGQTKSTSSGGGNRKCNQEQSKNQPLDARVDKIKDKKPRKKAMESSSNSDSDSGTSSDTSSEGISSSDSDDLEEDEEEEDQSIEESEDDDSDSESEAQHKSNNQVLLHGISDPKADGQKATEKAQEKRIHQPLPLASESQTHSFQSQQKQPQVLSQQLPFIFQSSQAKEESVNKHTSVIQSTGLVSNVKPLSLVNQAKKETYMKLIVPSPDVLKAGNKNTSEESSLLTSELRSKREQYKQAFPSQLKKQESSKSLKKVIAALSNPKATSSSPAHPKQTLENNHPNPFLTNALLGNHQPNGVIQSVIQEAPLALTTKTKMQSKINENIAAASSTPFSSPVNLSTSGRRTPGNQTPVMPSASPILHSQGKEKAVSNNVNPVKTQHHSHPAKSLVEQFRGTDSDIPSSKDSEDSNEDEEEDDEEEDEEDDEDDESDDSQSESDSNSESDTEGSEEEDDDDKDQDESDSDTEGEKTSMKLNKTTSSVKSPSMSLTGHSTPRNLHIAKAPGSAPAALCSESQSPAFLGTSKRRRVTDERELRIPLEYGWQRETRIRNFGGRLQGEVAYYAPCGKKLRQYPEVIKYLSRNGIMDISRDNFSFSAKIRVGDFYEARDGPQGMQWCLLKEEDVIPRIRAMEGRRGRPPNPDRQRAREESRMRRRKGRPPNVGNAEFLDNADAKLLRKLQAQEIARQAAQIKLLRKLQKQEQARVAKEAKKQQAIMAAEEKRKQKEQIKIMKQQEKIKRIQQIRMEKELRAQQILEAKKKKKEEAANAKLLEAEKRIKEKEMRRQQAVLLKHQERERRRQHMMLMKAMEARKKAEEKERLKQEKRDEKRLNKERKLEQRRLELEMAKELKKPNEDMCLADQKPLPELPRIPGLVLSGSTFSDCLMVVQFLRNFGKVLGFDVNIDVPNLSVLQEGLLNIGDSMGEVQDLLVRLLSAAVCDPGLITGYKAKTALGEHLLNVGVNRDNVSEILQIFMEAHCGQTELTESLKTKAFQAHTPAQKASVLAFLINELACSKSVVSEIDKNIDYMSNLRRDKWVVEGKLRKLRIIHAKKTGKRDTSGGIDLGEEQHPLGTPTPGRKRRRKGGDSDYDDDDDDDSDDQGDEDDEDEEDKEDKKGKKTDICEDEDEGDQAASVEELEKQIEKLSKQQSQYRRKLFDASHSLRSVMFGQDRYRRRYWILPQCGGIFVEGMESGEGLEEIAKEREKLKKAESVQIKEEMFETSGDSLNCSNTDHCEQKEDLKEKDNTNLFLQKPGSFSKLSKLLEVAKMPPESEVMTPKPNAGANGCTLSYQNSGKHSLGSVQSTATQSNVEKADSNNLFNTGSSGPGKFYSPLPNDQLLKTLTEKNRQWFSLLPRTPCDDTSLTHADMSTASLVTPQSQPPSKSPSPTPAPLGSSAQNPVGLNPFALSPLQVKGGVSMMGLQFCGWPTGVVTSNIPFTSSVPSLGSGLGLSEGNGNSFLTSNVASSKSESPVPQNEKATSAQPAAVEVAKPVDFPSPKPIPEEMQFGWWRIIDPEDLKALLKVLHLRGIREKALQKQIQKHLDYITQACLKNKDVAIIELNENEENQVTRDIVENWSVEEQAMEMDLSVLQQVEDLERRVASASLQVKGWMCPEPASEREDLVYFEHKSFTKLCKEHDGEFTGEDESSAHALERKSDNPLDIAVTRLADLERNIERRIEEDIAPGLRVWRRALSEARSAAQVALCIQQLQKSIAWEKSIMKVYCQICRKGDNEELLLLCDGCDKGCHTYCHRPKITTIPDGDWFCPACIAKASGQTLKIKKLHVKGKKTNESKKGKKVTLTGDTEDEDSASTSSSLKRGNKDLKKRKMEENTSINLSKQESFTSVKKPKRDDSKDLALCSMILTEMETHEDAWPFLLPVNLKLVPGYKKVIKKPMDFSTIREKLSSGQYPNLETFALDVRLVFDNCETFNEDDSDIGRAGHNMRKYFEKKWTDTFKVS

SEQ ID NO: 863133 - protein, 1255 aa, Homo sapiens
VVLILYYYMSLDKDIYEKLNEKEEIKIMKQQEKIKRIQQIRMEKELRAQQILEAKKKKKEEAANAKLLEAEKRIKEKEMRRQQAVLLKHQERERRRQHMMLMKAMEARKKAEEKERLKQEKRDEKRLNKERKLEQRRLELEMAKELKKPNEDMCLADQKPLPELPRIPGLVLSGSTFSDCLMVVQFLRNFGKVLGFDVNIDVPNLSVLQEGLLNIGDSMGEVQDLLVRLLSAAVCDPGLITGYKAKTALGEHLLNVGVNRDNVSEILQIFMEAHCGQTELTESLKTKAFQAHTPAQKASVLAFLINELACSKSVVSEIDKNIDYMSNLRRDKWVVEGKLRKLRIIHAKKTGKRDTSGGIDLGEEQHPLGTPTPGRKRRRKGGDSDYDDDDDDDSDDQGDEDDEDEEDKEDKKGKKTDICEDEDEGDQAASVEELEKQIEKLSKQQSQYRRKLFDASHSLRSVMFGQDRYRRRYWILPQCGGIFVEGMESGEGLEEIAKEREKLKKAESVQIKEEMFETSGDSLNCSNTDHCEQKEDLKEKDNTNLFLQKPGSFSKLSKLLEVAKMPPESEVMTPKPNAGANGCTLSYQNSGKHSLGSVQSTATQSNVEKADSNNLFNTGSSGPGKFYSPLPNDQLLKTLTEKNRQWFSLLPRTPCDDTSLTHADMSTASLVTPQSQPPSKSPSPTPAPLGSSAQNPVGLNPFALSPLQVKGGVSMMGLQFCGWPTGVVTSNIPFTSSVPSLGSGLGLSEGNGNSFLTSNVASSKSESPVPQNEKATSAQPAAVEVAKPVDFPSPKPIPEEMQFGWWRIIDPEDLKALLKVLHLRGIREKALQKQIQKHLDYITQACLKNKDVAIIELNENEENQVTRDIVENWSVEEQAMEMDLSVLQQVEDLERRVASASLQVKGWMCPEPASEREDLVYFEHKSFTKLCKEHDGEFTGEDESSAHALERKSDNPLDIAVTRLADLERNIERRIEEDIAPGLRVWRRALSEARSAAQVALCIQQLQKSIAWEKSIMKVYCQICRKGDNEELLLLCDGCDKGCHTYCHRPKITTIPDGDWFCPACIAKASGQTLKIKKLHVKGKKTNESKKGKKVTLTGDTEDEDSASTSSSLKRGNKDLKKRKMEENTSINLSKQESFTSVKKPKRDDSKDLALCSMILTEMETHEDAWPFLLPVNLKLVPGYKKVIKKPMDFSTIREKLSSGQYPNLETFALDVRLVFDNCETFNEDDSDIGRAGHNMRKYFEKKWTDTFKVS

SEQ ID NO: 863134 - protein, 2045 aa, Homo sapiens
MESGERLPSSAASSTTPTSSSTPSVASVVSKGGLSTGVASLSSTINPCGHLFRTAGDQPFNLSTVSSAFPMVSHPVFGLHSASSGHSEFGGLGTLGTPTALAAHPQLASFPAEWWRTTDAHTRTGATFFPPLLGIPPLFAPPAQNHDSSSFHSRTSGKSNRNGPEKGVNGSINGSNTSSVIGINTSVLSTTASSSMGQTKSTSSGGGNRKCNQEQSKNQPLDARVDKIKDKKPRKKAMESSSNSDSDSGTSSDTSSEGISSSDSDDLEEDEEEEDQSIEESEDDDSDSESEAQHKSNNQVLLHGISDPKADGQKATEKAQEKRIHQPLPLASESQTHSFQSQQKQPQVLSQQLPFIFQSSQAKEESVNKHTSVIQSTGLVSNVKPLSLVNQAKKETYMKLIVPSPDVLKAGNKNTSEESSLLTSELRSKREQYKQAFPSQLKKQESSKSLKKVIAALSNPKATSSSPAHPKQTLENNHPNPFLTNALLGNHQPNGVIQSVIQEAPLALTTKTKMQSKINENIAAASSTPFSSPVNLSTSGRRTPGNQTPVMPSASPILHSQGKEKAVSNNVNPVKTQHHSHPAKSLVEQFRGTDSDIPSSKDSEDSNEDEEEDDEEEDEEDDEDDESDDSQSGTSKRRRVTDERELRIPLEYGWQRETRIRNFGGRLQGEVAYYAPCGKKLRQYPEVIKYLSRNGIMDISRDNFSFSAKIRVGDFYEARDGPQGMQWCLLKEEDVIPRIRAMEGRRGRPPNPDRQRAREESRMRRRKGRPPNVGNAEFLDNADAKLLRKLQAQEIARQAAQIKLLRKLQKQEQARVAKEAKKQQAIMAAEEKRKQKEQIKIMKQQEKIKRIQQIRMEKELRAQQILEAKKKKKEEAANAKLLEAEKRIKEKEMRRQQAVLLKHQERERRRQHMMLMKAMEARKKAEEKERLKQEKRDEKRLNKERKLEQRRLELEMAKELKKPNEDMCLADQKPLPELPRIPGLVLSGSTFSDCLMVVQFLRNFGKVLGFDVNIDVPNLSVLQEGLLNIGDSMGEVQDLLVRLLSAAVCDPGLITGYKIFMEAHCGQTELTESLKTKAFQAHTPAQKASVLAFLINELACSKSVVSEIDKNIDYMSNLRRDKWVVEGKLRKLRIIHAKKTGKRDTSGGIDLGEEQHPLGTPTPGRKRRRKGGDSDYDDDDDDDSDDQGDEDDEDEEDKEDKKGKKTDICEDEDEGDQAASVEELEKQIEKLSKQQSQYRRKLFDASHSLRSVMFGQDRYRRRYWILPQCGGIFVEGMESGEGLEEIAKEREKLKKAESVQIKEEMFETSGDSLNCSNTDHCEQKEDLKEKDNTNLFLQKPGSFSKLSKLLEVAKMPPESEVMTPKPNAGANGCTLSYQNSGKHSLGSVQSTATQSNVEKADSNNLFNTGSSGPGKFYSPLPNDQLLKTLTEKNRQWFSLLPRTPCDDTSLTHADMSTASLVTPQSQPPSKSPSPTPAPLGSSAQNPVGLNPFALSPLQVKGGVSMMGLQFCGWPTGVVTSNIPFTSSVPSLGSGLGLSEGNGNSFLTSNVASSKSESPVPQNEKATSAQPAAVEVAKPVDFPSPKPIPEEMQFGWWRIIDPEDLKALLKVLHLRGIREKALQKQIQKHLDYITQACLKNKDVAIIELNENEENQVTRDIVENWSVEEQAMEMDLSVLQQVEDLERRVASASLQVKGWMCPEPASEREDLVYFEHKSFTKLCKEHDGEFTGEDESSAHALERKSDNPLDIAVTRLADLERNIERRIEEDIAPGLRVWRRALSEARSAAQVALCIQQLQKSIAWEKSIMKVYCQICRKGDNEELLLLCDGCDKGCHTYCHRPKITTIPDGDWFCPACIAKASGQTLKIKKLHVKGKKTNESKKGKKVTLTGDTEDEDSASTSSSLKRGNKDLKKRKMEENTSINLSKQESFTSVKKPKRDDSKDLALCSMILTEMETHEDAWPFLLPVNLKLVPGYKKVIKKPMDFSTIREKLSSGQYPNLETFALDVRLVFDNCETFNEDDSDIGRAGHNMRKYFEKKWTDTFKVS

SEQ ID NO: 863135 - protein, 2086 aa, Homo sapiens; identical to SEQ ID NO: 863123

SEQ ID NO: 863136 - protein, 1074 aa, Homo sapiens
MVVQFLRNFGKVLGFDVNIDVPNLSVLQEGLLNIGDSMGEVQDLLVRLLSAAVCDPGLITGYKAKTALGEHLLNVGVNRDNVSEILQIFMEAHCGQTELTESLKTKAFQAHTPAQKASVLAFLINELACSKSVVSEIDKNIDYMSNLRRDKWVVEGKLRKLRIIHAKKTGKRDTSGGIDLGEEQHPLGTPTPGRKRRRKGGDSDYDDDDDDDSDDQGDEDDEDEEDKEDKKGKKTDICEDEDEGDQAASVEELEKQIEKLSKQQSQYRRKLFDASHSLRSVMFGQDRYRRRYWILPQCGGIFVEGMESGEGLEEIAKEREKLKKAESVQIKEEMFETSGDSLNCSNTDHCEQKEDLKEKDNTNLFLQKPGSFSKLSKLLEVAKMPPESEVMTPKPNAGANGCTLSYQNSGKHSLGSVQSTATQSNVEKADSNNLFNTGSSGPGKFYSPLPNDQLLKTLTEKNRQWFSLLPRTPCDDTSLTHADMSTASLVTPQSQPPSKSPSPTPAPLGSSAQNPVGLNPFALSPLQVKGGVSMMGLQFCGWPTGVVTSNIPFTSSVPSLGSGLGLSEGNGNSFLTSNVASSKSESPVPQNEKATSAQPAAVEVAKPVDFPSPKPIPEEMQFGWWRIIDPEDLKALLKVLHLRGIREKALQKQIQKHLDYITQACLKNKDVAIIELNENEENQVTRDIVENWSVEEQAMEMDLSVLQQVEDLERRVASASLQVKGWMCPEPASEREDLVYFEHKSFTKLCKEHDGEFTGEDESSAHALERKSDNPLDIAVTRLADLERNIERRIEEDIAPGLRVWRRALSEARSAAQVALCIQQLQKSIAWEKSIMKVYCQICRKGDNEELLLLCDGCDKGCHTYCHRPKITTIPDGDWFCPACIAKASGQTLKIKKLHVKGKKTNESKKGKKVTLTGDTEDEDSASTSSSLKRGNKDLKKRKMEENTSINLSKQESFTSVKKPKRDDSKDLALCSMILTEMETHEDAWPFLLPVNLKLVPGYKKVIKKPMDFSTIREKLSSGQYPNLETFALDVRLVFDNCETFNEDDSDIGRAGHNMRKYFEKKWTDTFKVS

SEQ ID NO: 863137 - protein, 2114 aa, Homo sapiens
MESGERLPSSAASSTTPTSSSTPSVASVVSKGGLSTGVASLSSTINPCGHLFRTAGDQPFNLSTVSSAFPMVSHPVFGLHSASSGHSEFGGLGTLGTPTALAAHPQLASFPAEWWRTTDAHTRTGATFFPPLLGIPPLFAPPAQNHDSSSFHSRTSGKSNRNGPEKGVNGSINGSNTSSVIGINTSVLSTTASSSMGQTKSTSSGGGNRKCNQEQSKNQPLDARVDKIKDKKPRKKAMESSSNSDSDSGTSSDTSSEGISSSDSDDLEEDEEEEDQSIEESEDDDSDSESEAQHKSNNQVLLHGISDPKADGQKATEKAQEKRIHQPLPLASESQTHSFQSQQKQPQVLSQQLPFIFQSSQAKEESVNKHTSVIQSTGLVSNVKPLSLVNQAKKETYMKLIVPSPDVLKAGNKNTSEESSLLTSELRSKREQYKQAFPSQLKKQESSKSLKKVIAALSNPKATSSSPAHPKQTLENNHPNPFLTNALLGNHQPNGVIQSVIQEAPLALTTKTKMQSKINENIAAASSTPFSSPVNLSTSGRRTPGNQTPVMPSASPILHSQGKEKAVSNNVNPVKTQHHSHPAKSLVEQFRGTDSDIPSSKDSEDSNEDEEEDDEEEDEEDDEDDESDDSQSGTSKRRRVTDERELRIPLEYGWQRETRIRNFGGRLQGEVAYYAPCGKKLRQYPEVIKYLSRNGIMDISRDNFSFSAKIRVGDFYEARDGPQGMQWCLLKEEDVIPRIRAMEGRRGRPPNPDRQRAREESRMRRRKGRPPNVGNAEFLDNADAKLLRKLQAQEIARQAAQIKLLRKLQKQEQARVAKEAKKQQAIMAAEEKRKQKEQIKIMKQQEKIKRIQQIRMEKELRAQQILEAKKKKKEEAANAKLLEAEKRIKEKEMRRQQAVLLKHQERERRRQHMMLMKAMEARKKAEEKERLKQEKRDEKRLNKERKLEQRRLELEMAKELKKPNEDMCLADQKPLPELPRIPGLVLSGSTFSDCLMVVQFLRNFGKVLGFDVNIDVPNLSVLQEGLLNIGDSMGEVQDLLVRLLSAAVCDPGLITGYKAKTALGEHLLNVGVNRDNVSEILQIFMEAHCGQTELTESLKTKAFQAHTPAQKASVLAFLINELACSKSVVSEIDKNIDYMSNLRRDKWVVEGKLRKLRIIHAKKTGKRDTSGGIDLGEEQHPLGTPTPGRKRRRKGGDSDYDDDDDDDSDDQGDEDDEDEEDKEDKKGKKTDICEDEDEGDQAASVEELEKQIEKLSKQQSQYRRKLFDASHSLRSVMFGQDRYRRRYWILPQCGGIFVEGMESGEGLEEIAKEREKLKKAESVQIKEEMFETSGDSLNCSNTDHCEQKEDLKEKDNTNLFLQKPGSFSKLSKLLEVAKMPPESEVMTPKPNAGANGCTLSYQNSGKHSLGSVQSTATQSNVEKADSNNLFNTGSSGPGKFYSPLPNDQLLKTLTEKNRQWFSLLPRTPCDDTSLTHADMSTASLVTPQSQPPSKSPSPTPAPLGSSAQNPVGLNPFALSPLQVKGGVSMMGLQFCGWPTGVVTSNIPFTSSVPSLGSGLGLSEGNGNSFLTSNVASSKSESPVPQNEKATSAQPAAVEVAKPVDFPSPKPIPEEMQFGWWRIIDPEDLKALLKVLHLRGIREKALQKQIQKHLDYITQACLKNKDVAIIELNENEENQVTRDIVENWSVEEQAMEMDLSVLQQVEDLERRVASASLQVKGWMCPEPASEREDLVYFEHKSFTKLCKEHDGEFTGEDESSAHALERKSDNPLDIAVTRLADLERNIERRYLKSPLSTTIQIKLDNVGTVTVPAPAPSVSGDGDGIEEDIAPGLRVWRRALSEARSAAQVALCIQQLQKSIAWELLLLCDGCDKGCHTYCHRPKITTIPDGDWFCPACIAKASGQTLKIKKLHVKGKKTNESKKGKKVTLTGDTEDEDSASTSSSLKRGNKDLKKRKMEENTSINLSKQESFTSVKKPKRDDSKDLALCSMILTEMETHEDAWPFLLPVNLKLVPGYKKVIKKPMDFSTIREKLSSGQYPNLETFALDVRLVFDNCETFNEDDSDIGRAGHNMRKYFEKKWTDTFKPLCYEDALAAQPYGAANSYHQLTSPVPEAS

SEQ ID NO: 863138 - protein, 1256 aa, Homo sapiens
MESGERLPSSAASSTTPTSSSTPSVASVVSKGGLSTGVASLSSTINPCGHLFRTAGDQPFNLSTVSSAFPMVSHPVFGLHSASSGHSEFGGLGTLGTPTALAAHPQLASFPAEWWRTTDAHTRTGATFFPPLLGIPPLFAPPAQNHDSSSFHSRTSGKSNRNGPEKGVNGSINGSNTSSVIGINTSVLSTTASSSMGQTKSTSSGGGNRKCNQEQSKNQPLDARVDKIKDKKPRKKAMESSSNSDSDSGTSSDTSSEGISSSDSDDLEEDEEEEDQSIEESEDDDSDSESEAQHKSNNQVLLHGISDPKADGQKATEKAQEKRIHQPLPLASESQTHSFQSQQKQPQVLSQQLPFIFQSSQAKEESVNKHTSVIQSTGLVSNVKPLSLVNQAKKETYMKLIVPSPDVLKAGNKNTSEESSLLTSELRSKREQYKQAFPSQLKKQESSKSLKKVIAALSNPKATSSSPAHPKQTLENNHPNPFLTNALLGNHQPNGVIQSVIQEAPLALTTKTKMQSKINENIAAASSTPFSSPVNLSTSGRRTPGNQTPVMPSASPILHSQGKEKAVSNNVNPVKTQHHSHPAKSLVEQFRGTDSDIPSSKDSEDSNEDEEEDDEEEDEEDDEDDESDDSQSGTSKRRRVTDERELRIPLEYGWQRETRIRNFGGRLQGEVAYYAPCGKKLRQYPEVIKYLSRNGIMDISRDNFSFSAKIRVGDFYEARDGPQGMQWCLLKEEDVIPRIRAMEGRRGRPPNPDRQRAREESRMRRRKGRPPNVGNAEFLDNADAKLLRKLQAQEIARQAAQIKLLRKLQKQEQARVAKEAKKQQAIMAAEEKRKQKEQIKIMKQQEKIKRIQQIRMEKELRAQQILEAKKKKKEEAANAKLLEAEKRIKEKEMRRQQAVLLKHQERERRRQHMMLMKAMEARKKAEEKERLKQEKRDEKRLNKERKLEQRRLELEMAKELKKPNEDMCLADQKPLPELPRIPGLVLSGSTFSDCLMVVQFLRNFGKVLGFDVNIDVPNLSVLQEGLLNIGDSMGEVQDLLVRLLSAAVCDPGLITGYKAKTALGEHLLNVGVNRDNVSEILQIFMEAHCGQTELTESLKTKAFQAHTPAQKASVLAFLINELACSKSVVSEIDKNIDYMSNLRRDKWVVEGKLRKLRIIHAKKTGKRDTSGGIDLGEEQHPLGTPTPGRKRRRKGGDSDYDDDDDDDSDDQGDEDDEDEEDKEDKKGKKTDICEDEDEGDQAAVLRHSGSSRVTSA

SEQ ID NO: 863139 - protein, 393 aa, Homo sapiens
MLRRLLERPCTLALLVGSQLAVMMYLSLGGFRSLSALFGRDQGPTFDYSHPRDVYSNLSHLPGAPGGPPAPQGLPYCPERSPLLVGPVSVSFSPVPSLAEIVERNPRVEPGGRYRPAGCEPRSRTAIIVPHRAREHHLRLLLYHLHPFLQRQQLAYGIYVIHQAGNGTFNRAKLLNVGVREALRDEEWDCLFLHDVDLLPENDHNLYVCDPRGPRHVAVAMNKFGYSLPYPQYFGGVSALTPDQYLKMNGFPNEYWGWGGEDDDIATRVRLAGMKISRPPTSVGHYKMVKHRGDKGNEENPHRFDLLVRTQNSWTQDGMNSLTYQLLARELGPLYTNITADIGTDPRGPRAPSGPRYPPGSSQAFRQEMLQRRPPARPGPLSTANHTALRGSH

SEQ ID NO: 863140 - protein, 393 aa, Homo sapiens; identical to SEQ ID NO: 863139

SEQ ID NO: 863141 - protein, 393 aa, Homo sapiens; identical to SEQ ID NO: 863139

SEQ ID NO: 863142 - protein, 393 aa, Homo sapiens; identical to SEQ ID NO: 863139

SEQ ID NO: 863143 - protein, 393 aa, Homo sapiens; identical to SEQ ID NO: 863139

SEQ ID NO: 863144 - protein, 393 aa, Homo sapiens; identical to SEQ ID NO: 863139

SEQ ID NO: 863145 - protein, 310 aa, Homo sapiens
MLRRLLERPCTLALLVGSQLAVMMYLSLGGFRSLSALFGRDQGPTFDYSHPRDVYSNLSHLPGAPGGPPAPQGLPYCPERSPLLVGPVSVSFSPVPSLAEIVERNPRVEPGGRYRPAGCEPRSRTAIIVPHRAREHHLRLLLYHLHPFLQRQQLAYGIYVIHQAGNGTFNRAKLLNVGVREALRDEEWDCLFLHDVDLLPENDHNLYVCDPRGPRHVAVAMNKFGYSLPYPQYFGGVSALTPDQYLKMNGFPNEYWGWGGEDDDIATRVRLAGMKISRPPTSVGHYKMVKHRGDKGNEENPHRIPGRKMG

SEQ ID NO: 863146 - protein, 400 aa, Homo sapiens
MYEAVVIGETPPPQRPLPRWRQRCLPGCWGGGDDRQQKTSWSQIRCWSAGWSLSLPSVTFPILDNASHLCPPGGPPAPQGLPYCPERSPLLVGPVSVSFSPVPSLAEIVERNPRVEPGGRYRPAGCEPRSRTAIIVPHRAREHHLRLLLYHLHPFLQRQQLAYGIYVIHQAGNGTFNRAKLLNVGVREALRDEEWDCLFLHDVDLLPENDHNLYVCDPRGPRHVAVAMNKFGYSLPYPQYFGGVSALTPDQYLKMNGFPNEYWGWGGEDDDIATRVRLAGMKISRPPTSVGHYKMVKHRGDKGNEENPHRFDLLVRTQNSWTQDGMNSLTYQLLARELGPLYTNITADIGTDPRGPRAPSGPRYPPGSSQAFRQEMLQRRPPARPGPLSTANHTALRGSH

SEQ ID NO: 863147 - protein, 173 aa, Homo sapiens
MNKFGYSLPYPQYFGGVSALTPDQYLKMNGFPNEYWGWGGEDDDIATRVRLAGMKISRPPTSVGHYKMVKHRGDKGNEENPHRFDLLVRTQNSWTQDGMNSLTYQLLARELGPLYTNITADIGTDPRGPRAPSGPRYPPGSSQAFRQEMLQRRPPARPGPLSTANHTALRGSH

SEQ ID NO: 863148 - protein, 148 aa, Homo sapiens
MLRRLLERPCTLALLVGSQLAVMMYLSLGGFRSLSALFGRDQGPTFDYSHPRDVYSNLSHLPGAPGGPPAPQGLPYCPERSPLLVGPVSVSFSPVPSLAEIVERNPRVEPGGRCCSTTCTPSCSASSLLMASMSSTRLEMEHLTGQNC

SEQ ID NO: 863149 - protein, 304 aa, Homo sapiens
MEFVLVLREFVLVLREFVLVLRELYRPAGCEPRSRTAIIVPHRAREHHLRLLLYHLHPFLQRQQLAYGIYVIHQAGNGTFNRAKLLNVGVREALRDEEWDCLFLHDVDLLPENDHNLYVCDPRGPRHVAVAMNKFGYSLPYPQYFGGVSALTPDQYLKMNGFPNEYWGWGGEDDDIATRVRLAGMKISRPPTSVGHYKMVKHRGDKGNEENPHRFDLLVRTQNSWTQDGMNSLTYQLLARELGPLYTNITADIGTDPRGPRAPSGPRYPPGSSQAFRQEMLQRRPPARPGPLSTANHTALRGSH

SEQ ID NO: 863150 - protein, 219 aa, Homo sapiens
SRGSHKAALRDEEWDCLFLHDVDLLPENDHNLYVCDPRGPRHVAVAMNKFGYSLPYPQYFGGVSALTPDQYLKMNGFPNEYWGWGGEDDDIATRVRLAGMKISRPPTSVGHYKMVKHRGDKGNEENPHRFDLLVRTQNSWTQDGMNSLTYQLLARELGPLYTNITADIGTDPRGPRAPSGPRYPPGSSQAFRQEMLQRRPPARPGPLSTANHTALRGSH

SEQ ID NO: 863151 - protein, 312 aa, Homo sapiens
MLRRLLERPCTLALLVGSQLAVMMYLSLGGFRSLSALFGRDQGPTFDYSHPRDVYSNLSHLPGAPGGPPAPQGLPYCPERSPLLVGPVSVSFSPVPSLAEIVERNPRVEPGGRYRPAGCEPRSRTAIIVPHRAREHHLRLLLYHLHPFLQRQQLAYGIYVIHQAGNGTFNRAKLLNVGVREALRDEEWDCLFLHDVDLLPENDHNLYVCDPRGPRHVAVAMNKFGYSLPYPQYFGGVSALTPDQYLKMNGFPNEYWGWGGEDDDIATRVRLAGMKISRPPTSVGHYKMVKHRGDKGNEENPHRLTPGSVPEF

SEQ ID NO: 863152 - protein, 82 aa, Homo sapiens
GYYEAVVIGETPPPQRPLPRWRQRCLPGCWGGGDDRQQKTSWSQIRCWSAGWSLSLPSVTFPILDNASHLCPPGTPWSPHDP

SEQ ID NO: 863153 - protein, 52 aa, Homo sapiens
GCVPRRLGVCKDLSLPSLPYPQYFGGVSALTPDQYLKMNGFPNEYWGWGGED

SEQ ID NO: 863154 - protein, 393 aa, Homo sapiens; identical to SEQ ID NO: 863139

SEQ ID NO: 863155 - protein, 393 aa, Homo sapiens; identical to SEQ ID NO: 863139

SEQ ID NO: 863156 - protein, 393 aa, Homo sapiens; identical to SEQ ID NO: 863139

SEQ ID NO: 863157 - protein, 393 aa, Homo sapiens; identical to SEQ ID NO: 863139

SEQ ID NO: 863158 - protein, 303 aa, Homo sapiens
MLRRLLERPCTLALLVGSQLAVMMYLSLGGFRSLSALFGRDQGPTFDYSHPRDVYSNLSHLPGAPGGPPAPQGLPYCPERSPLLVGPVSVSFSPVPSLAEIVERNPRVEPGGRYRPAGCEPRSRTAIIVPHRAREHHLRLLLYHLHPFLQRQQLAYGIYVIHQAGNGTFNRAKLLNVGVREALRDEEWDCLFLHDVDLLPENDHNLYVCDPRGPRHVAVAMNKFGYSLPYPQYFGGVSALTPDQYLKMNGFPNEYWGWGGEDDDIATRVRLAGMKISRPPTSVGHYKMVKHRGDKGNEENPHR

SEQ ID NO: 863159 - protein, 349 aa, Homo sapiens
LWRWYAPELRDSNLSHLPGAPGGPPAPQGLPYCPERSPLLVGPVSVSFSPVPSLAEIVERNPRVEPGGRYRPAGCEPRSRTAIIVPHRAREHHLRLLLYHLHPFLQRQQLAYGIYVIHQAGNGTFNRAKLLNVGVREALRDEEWDCLFLHDVDLLPENDHNLYVCDPRGPRHVAVAMNKFGYSLPYPQYFGGVSALTPDQYLKMNGFPNEYWGWGGEDDDIATRVRLAGMKISRPPTSVGHYKMVKHRGDKGNEENPHRFDLLVRTQNSWTQDGMNSLTYQLLARELGPLYTNITADIGTDPRGPRAPSGPRYPPGSSQAFRQEMLQRRPPARPGPLSTANHTALRGSH

SEQ ID NO: 863160 - protein, 327 aa, Homo sapiens
MVYVELGVNSDEAEHLSLLGPVSVSFSPVPSLAEIVERNPRVEPGGRYRPAGCEPRSRTAIIVPHRAREHHLRLLLYHLHPFLQRQQLAYGIYVIHQAGNGTFNRAKLLNVGVREALRDEEWDCLFLHDVDLLPENDHNLYVCDPRGPRHVAVAMNKFGYSLPYPQYFGGVSALTPDQYLKMNGFPNEYWGWGGEDDDIATRVRLAGMKISRPPTSVGHYKMVKHRGDKGNEENPHRFDLLVRTQNSWTQDGMNSLTYQLLARELGPLYTNITADIGTDPRGPRAPSGPRYPPGSSQAFRQEMLQRRPPARPGPLSTANHTALRGSH

SEQ ID NO: 863161 - protein, 393 aa, Homo sapiens; identical to SEQ ID NO: 863139

SEQ ID NO: 863162 - protein, 120 aa, Homo sapiens
MKISRPPTSVGHYKMVKHRGDKGNEENPHRFDLLVRTQNSWTQDGMNSLTYQLLARELGPLYTNITADIGTDPRGPRAPSGPRYPPGSSQAFRQEMLQRRPPARPGPLSTANHTALRGSH

SEQ ID NO: 863163 - protein, 82 aa, Homo sapiens; identical to SEQ ID NO: 863152

SEQ ID NO: 863164 - protein, 187 aa, Homo sapiens
MEENEVESSSDAAPGPGRPEEPSESGLGVGTSEAVSADSSDAAAAPGQAEADDSGVGQSSDRGSRSQEEVSESSSSADPLPNSYLPDSSSVSHGPVAGVTGGPPALVHSSALPDPNMLVSDCTASSSDLGSAIDKIIESTIGPDLIQNCITVTSAEDGGAETTRYLILQGPDDGAPLTSPMASSQEL

SEQ ID NO: 863165 - protein, 1342 aa, Homo sapiens
MEENEVESSSDAAPGPGRPEEPSESGLGVGTSEAVSADSSDAAAAPGQAEADDSGVGQSSDRGSRSQEEVSESSSSADPLPNSYLPDSSSVSHGPVAGVTGGPPALVHSSALPDPNMLVSDCTASSSDLGSAIDKIIESTIGPDLIQNCITVTSAEDGGAETTRYLILQGPDDGAPMTSPMSSSTLAHSLAAIEALADGPTSTSTCLEAQGGPSSPVQLPPASGAEEPDLQSLEAMMEVVVVQQFKCKMCQYRSSTKATLLRHMRERHFRPVAAAAAAAGKKGRLRKWSTSTKSQEEEGPEEEDDDDIVDAGAIDDLEEDSDYNPAEDEPRGRQLRLQRPTPSTPRPRRRPGRPRKLPRLEISDLPDGVEGEPLVSSQSGQSPPEPQDPEAPSSSGPGHLVAMGKVSRTPVEAGVSQSDAENAAPSCPDEHDTLPRRRGRPSRRFLGKKYRKYYYKSPKPLLRPFLCRICGSRFLSHEDLRFHVNSHEAGDPQLFKCLQCSYRSRRWSSLKEHMFNHVGSKPYKCDECSYTSVYRKDVIRHAAVHSRDRKKRPDPTPKLSSFPCPVCGRVYPMQKRLTQHMKTHSTEKPHMCDKCGKSFKKRYTFKMHLLTHIQAVANRRFKCEFCEFVCEDKKALLNHQLSHVSDKPFKCSFCPYRTFREDFLLSHVAVKHTGAKPFACEYCHFSTRHKKNLRLHVRCRHASSFEEWGRRHPEEPPSRRRPFFSLQQIEELKQQHSAAPGPPPSSPGPPEIPPEATTFQSSEAPSLLCSDTLGGATIIYQQGAEESTAMATQTALDLLLNMSAQRELGGTALQVAVVKSEDVEAGLASPGGQPSPEGATPQVVTLHVAEPGGGAAAESQLGPPDLPQITLAPGPFGGTGYSVITAPPMEEGTSAPGTPYSEEPAGEAAQAVVVSDTLKEAGTHYIMATDGTQLHHIELTADGSISFPSPDALASGAKWPLLQCGGLPRDGPEPPSPAKTHCVGDSQSSASSPPATSKALGLAVPPSPPSAATAASKKFSCKICAEAFPGRAEMESHKRAHAGPGAFKCPDCPFSARQWPEVRAHMAQHSSLRPHQCSQCSFASKNKKDLRRHMLTHTKEKPFACHLCGQRFNRNGHLKFHIQRLHSPDGRKSGTPTARAPTQTPTQTIILNSDDETLATLHTALQSSHGVLGPERLQQALSQEHIIVAQEQTVTNQEEAAYIQEITTADGQTVQHLVTSDNQVQYIISQDGVQHLLPQEYVVVPEGHHIQVQEGQITHIQYEQGAPFLQESQIQYVPVSPGQQLVTQAQLEAAAHSAVTAVADAAMAQAQGLFGTDETVPEHIQQLQHQGIEYDVITLADD

SEQ ID NO: 863166 - protein, 1079 aa, Homo sapiens
MEENEVESSSDAAPGPGRPEEPSESGLGVGTSEAVSADSSDAAAAPGQAEADDSGEDSDYNPAEDEPRGRQLRLQRPTPSTPRPRRRPGRPRKLPRLEISDLPDGVEGEPLVSSQSGQSPPEPQDPEAPSSSGPGHLVAMGKVSRTPVEAGVSQSDAENAAPSCPDEHDTLPRRRGRPSRRFLGKKYRKYYYKSPKPLLRPFLCRICGSRFLSHEDLRFHVNSHEAGDPQLFKCLQCSYRSRRWSSLKEHMFNHVGSKPYKCDECSYTSVYRKDVIRHAAVHSRDRKKRPDPTPKLSSFPCPVCGRVYPMQKRLTQHMKTHSTEKPHMCDKCGKSFKKRYTFKMHLLTHIQAVANRRFKCEFCEFVCEDKKALLNHQLSHVSDKPFKCSFCPYRTFREDFLLSHVAVKHTGAKPFACEYCHFSTRHKKNLRLHVRCRHASSFEEWGRRHPEEPPSRRRPFFSLQQIEELKQQHSAAPGPPPSSPGPPEIPPEATTFQSSEAPSLLCSDTLGGATIIYQQGAEESTAMATQTALDLLLNMSAQRELGGTALQVAVVKSEDVEAGLASPGGQPSPEGATPQVVTLHVAEPGGGAAAESQLGPPDLPQITLAPGPFGGTGYSVITAPPMEEGTSAPGTPYSEEPAGEAAQAVVVSDTLKEAGTHYIMATDGTQLHHIELTADGSISFPSPDALASGAKWPLLQCGGLPRDGPEPPSPAKTHCVGDSQSSASSPPATSKALGLAVPPSPPSAATAASKKFSCKICAEAFPGRAEMESHKRAHAGPGAFKCPDCPFSARQWPEVRAHMAQHSSLRPHQCSQCSFASKNKKDLRRHMLTHTKEKPFACHLCGQRFNRNGHLKFHIQRLHSPDGRKSGTPTARAPTQTPTQTIILNSDDETLATLHTALQSSHGVLGPERLQQALSQEHIIVAQEQTVTNQEEAAYIQEITTADGQTVQHLVTSDNQVQYIISQDGVQHLLPQEYVVVPEGHHIQVQEGQITHIQYEQGAPFLQESQIQYVPVSPGQQLVTQAQLEAAAHSAVTAVADAAMAQAQGLFGTDETVPEHIQQLQHQGIEYDVITLADD

SEQ ID NO: 863167 - protein, 979 aa, Homo sapiens
MSVAGVEGEPLVSSQSGQSPPEPQDPEAPSSSGPGHLVAMGKVSRTPVEAGVSQSDAENAAPSCPDEHDTLPRRRGRPSRRFLGKKYRKYYYKSPKPLLRPFLCRICGSRFLSHEDLRFHVNSHEAGDPQLFKCLQCSYRSRRWSSLKEHMFNHVGSKPYKCDECSYTSVYRKDVIRHAAVHSRDRKKRPDPTPKLSSFPCPVCGRVYPMQKRLTQHMKTHSTEKPHMCDKCGKSFKKRYTFKMHLLTHIQAVANRRFKCEFCEFVCEDKKALLNHQLSHVSDKPFKCSFCPYRTFREDFLLSHVAVKHTGAKPFACEYCHFSTRHKKNLRLHVRCRHASSFEEWGRRHPEEPPSRRRPFFSLQQIEELKQQHSAAPGPPPSSPGPPEIPPEATTFQSSEAPSLLCSDTLGGATIIYQQGAEESTAMATQTALDLLLNMSAQRELGGTALQVAVVKSEDVEAGLASPGGQPSPEGATPQVVTLHVAEPGGGAAAESQLGPPDLPQITLAPGPFGGTGYSVITAPPMEEGTSAPGTPYSEEPAGEAAQAVVVSDTLKEAGTHYIMATDGTQLHHIELTADGSISFPSPDALASGAKWPLLQCGGLPRDGPEPPSPAKTHCVGDSQSSASSPPATSKALGLAVPPSPPSAATAASKKFSCKICAEAFPGRAEMESHKRAHAGPGAFKCPDCPFSARQWPEVRAHMAQHSSLRPHQCSQCSFASKNKKDLRRHMLTHTKEKPFACHLCGQRFNRNGHLKFHIQRLHSPDGRKSGTPTARAPTQTPTQTIILNSDDETLATLHTALQSSHGVLGPERLQQALSQEHIIVAQEQTVTNQEEAAYIQEITTADGQTVQHLVTSDNQVQYIISQDGVQHLLPQEYVVVPEGHHIQVQEGQITHIQYEQGAPFLQESQIQYVPVSPGQQLVTQAQLEAAAHSAVTAVADAAMAQAQGLFGTDETVPEHIQQLQHQGIEYDVITLADD

SEQ ID NO: 863168 - protein, 1418 aa, Homo sapiens
MEENEVESSSDAAPGPGRPEEPSESGLGVGTSEAVSADSSDAAAAPGQAEADDSGVGQSSDRGSRSQEEVSESSSSADPLPNSYLPDSSSVSHGPVAGVTGGPPALVHSSALPDPNMLVSDCTASSSDLGSAIDKIIESTIGPDLIQNCITVTSAEDGGAETTRYLILQGPDDGAPMTSPMSSSTLAHSLAAIEALADGPTSTSTCLEAQGGPSSPVQLPPASGAEEPDLQSLEAMMEVVVVQQFKCKMCQYRSSTKATLLRHMRERHFRPVAAAAAAAGKKGRLRKWSTSTKSQEEEGPEEEDDDDIVDAGAIDDLEEDSDYNPAEDEPRGRQLRLQRPTPSTPRPRRRPGRPRKLPRLEISDLPDGVEGEPLVSSQSGQSPPEPQDPEAPSSSGPGHLVAMGKVSRTPVEAGVSQSDAENAAPSCPDEHDTLPRRRGRPSRRFLGKKYRKYYYKSPKPLLRPFLCRICGSRFLSHEDLRFHVNSHEAGDPQLFKCLQCSYRSRRWSSLKEHMFNHVGSKPYKCDECSYTSVYRKDVIRHAAVHSRDRKKRPDPTPKLSSFPCPVCGRVYPMQKRLTQHMKTHSTEKPHMCDKCGKSFKKRYTFKMHLLTHIQAVANRRFKCEFCEFVCEDKKALLNHQLSHVSDKPFKCSFCPYRTFREDFLLSHVAVKHTGAKPFACEYCHFSTRHKKNLRLHVRCRHASSFEEWGRRHPEEPPSRRRPFFSLQQIEELKQQHSAAPGPPPSSPGPPEIPPEATTFQSSEAPSLLCSDTLGGATIIYQQGELCRRIGALEGRTSELGRGRSCWWGLEDGEGVVLGASFLALCQAEVPPHPGAEESTAMATQTALDLLLNMSAQRELGGTALQVAVVKSEDVEAGLASPGGQPSPEGATPQVVTLHVAEPGGGAAAESQLGPPDLPQITLAPGPFGGTGYSVITAPPMEEGTSAPGTPYSEEPAGEAAQAVVVSDTLKEAGTHYIMATDGTQLHHIEVRLGDANHSPTSLPFSVPHAPCLSQLTADGSISFPSPDALASGAKWPLLQCGGLPRDGPEPPSPAKTHCVGDSQSSASSPPATSKALGLAVPPSPPSAATAASKKFSCKICAEAFPGRAEMESHKRAHAGPGAFKCPDCPFSARQWPEVRAHMAQHSSLRPHQCSQCSFASKNKKDLRRHMLTHTKEKPFACHLCGQRFNRNGHLKFHIQRLHSPDGRKSGTPTARAPTQTPTQTIILNSDDETLATLHTALQSSHGVLGPERLQQALSQEHIIVAQEQTVTNQEEAAYIQEITTADGQTVQHLVTSDNQVQYIISQDGVQHLLPQEYVVVPEGHHIQVQEGQITHIQYEQGAPFLQESQIQYVPVSPGQQLVTQAQLEAAAHSAVTAVADAAMAQAQGLFGTDETVPEHIQQLQHQGIEYDVITLADD

SEQ ID NO: 863169 - protein, 613 aa, Homo sapiens
MEENEVESSSDAAPGPGRPEEPSESGLGVGTSEAVSADSSDAAAAPGQAEADDSGVGQSSDRGSRSQEEVSESSSSADPLPNSYLPDSSSVSHGPVAGVTGGPPALVHSSALPDPNMLVSDCTASSSDLGSAIDKIIESTIGPDLIQNCITVTSAEDGGAETTRYLILQGPDDGAPMTSPMSSSTLAHSLAAIEALADGPTSTSTCLEAQGGPSSPVQLPPASGAEEPDLQSLEAMMEVVVVQQFKCKMCQYRSSTKATLLRHMRERHFRPVAAAAAAAGKKGRLRKWSTSTKSQEEEGPEEEDDDDIVDAGAIDDLEEDSDYNPAEDEPRGRQLRLQRPTPSTPRPRRRPGRPRKLPRLEISDLPDGVEGEPLVSSQSGQSPPEPQDPEAPSSSGPGHLVAMGKVSRTPVEAGVSQSDAENAAPSCPDEHDTLPRRRGRPSRRFLGKKYRKYYYKSPKPLLRPFLCRICGSRFLSHEDLRFHVNSHEAGDPQLFKCLQCSYRSRRWSSLKEHMFNHVGSKPYKCDECSYTSVYRKDVIRHAAVHSRDRSVWGWEGPGQERPGWVGKWRPGITMVPTYRAPALSQPHLLHTTGMSRKAVHPSSFGLEQDSTRP

SEQ ID NO: 863170 - protein, 708 aa, Homo sapiens
MEENEVESSSDAAPGPGRPEEPSESGLGVGTSEAVSADSSDAAAAPGQAEADDSGVGQSSDRGSRSQEEVSESSSSADPLPNSYLPDSSSVSHGPVAGVTGGPPALVHSSALPDPNMLVSDCTASSSDLGSAIDKIIESTIGPDLIQNCITVTSAEDGGAETTRYLILQGPDDGAPMTSPMSSSTLAHSLAAIEALADGPTSTSTCLEAQGGPSSPVQLPPASGAEEPDLQSLEAMMEVVVVQQFKCKMCQYRSSTKATLLRHMRERHFRPVAAAAAAAGKKGRLRKWSTSTKSQEEEGPEEEDDDDIVDAGAIDDLEEDSDYNPAEDEPRGRQLRLQRPTPSTPRPRRRPGRPRKLPRLEISDLPDGVEGEPLVSSQSGQSPPEPQDPEAPSSSGPGHLVAMGKVSRTPVEAGVSQSDAENAAPSCPDEHDTLPRRRGRPSRRFLGKKYRKYYYKSPKPLLRPFLCRICGSRFLSHEDLRFHVNSHEAGDPQLFKCLQCSYRSRRWSSLKEHMFNHVGSKPYKCDECSYTSVYRKDVIRHAAVHSRDRKKRPDPTPKLSSFPCPVCGRVYPMQKRLTQHMKTHSTEKPHMCDKCGKSFKKRYTFKMHLLTHIQAVANRRFKCEFCEFVCEDKKALLNHQLSHVSDKPFKCSFCPYRTFREDFLLSHVAVKHTGAKPFACGSRFLSHEDLRFHVNSHEAGDPQLYQCR

SEQ ID NO: 863171 - protein, 233 aa, Homo sapiens
MEENEVESSSDAAPGPGRPEEPSESGLGVGTSEAVSADSSDAAAAPGQAEADDSGVGQSSDRGSRSQEEVSESSSSADPLPNSYLPDSSSVSHGPVAGVTGGPPALVHSSALPDPNMLVSDCTASSSDLGSAIDKIIESTIGPDLIQNCITVTSAEDGGAETTRYLILQGPDDGAPMTSPMSSSTLAHSLAPWAPARTCWVPQPAGRLWERNLFLFGWTHWPVSLNKGTGVQS

SEQ ID NO: 863172 - protein, 821 aa, Homo sapiens
MQKRLTQHMKTHSTEKPHMCDKCGKSFKKRYTFKMHLLTHIQAVANRRFKCEFCEFVCEDKKALLNHQLSHVSDKPFKCSFCPYRTFREDFLLSHVAVKHTGAKPFACEYCHFSTRHKKNLRLHVRCRHASSFEEWGRRHPEEPPSRRRPFFSLQQIEELKQQHSAAPGPPPSSPGPPEIPPEATTFQSSEAPSLLCSDTLGGATIIYQQGELCRRIGALEGRTSELGRGRSCWWGLEDGEGVVLGASFLALCQAEVPPHPGAEESTAMATQTALDLLLNMSAQRELGGTALQVAVVKSEDVEAGLASPGGQPSPEGATPQVVTLHVAEPGGGAAAESQLGPPDLPQITLAPGPFGGTGYSVITAPPMEEGTSAPGTPYSEEPAGEAAQAVVVSDTLKEAGTHYIMATDGTQLHHIELTADGSISFPSPDALASGAKWPLLQCGGLPRDGPEPPSPAKTHCVGDSQSSASSPPATSKALGLAVPPSPPSAATAASKKFSCKICAEAFPGRAEMESHKRAHAGPGAFKCPDCPFSARQWPEVRAHMAQHSSLRPHQCSQCSFASKNKKDLRRHMLTHTKEKPFACHLCGQRFNRNGHLKFHIQRLHSPDGRKSGTPTARAPTQTPTQTIILNSDDETLATLHTALQSSHGVLGPERLQQALSQEHIIVAQEQTVTNQEEAAYIQEITTADGQTVQHLVTSDNQVQYIISQDGVQHLLPQEYVVVPEGHHIQVQEGQITHIQYEQGAPFLQESQIQYVPVSPGQQLVTQAQLEAAAHSAVTAVADAAMAQAQGLFGTDETVPEHIQQLQHQGIEYDVITLADD

SEQ ID NO: 863173 - protein, 128 aa, Homo sapiens
RHARPPHQQVQYIISQDGVQHLLPQEYVVVPEGHHIQVQEGQITHIQYEQGAPFLQESQIQYVPVSPGQQLVTQAQLEAAAHSAVTAVADAAMAQAQGLFGTDETVPEHIQQLQHQGIEYDVITLADD

SEQ ID NO: 863174 - protein, 279 aa, Homo sapiens
MSVAGVEGEPLVSSQSGQSPPEPQDPEAPSSSGPGHLVAMGKVSRTPVEAGVSQSDAENAAPSCPDEHDTLPRRRGRPSRRFLGKKYRKYVEQRRGWGMHVVKPPTPPDLSATLSSCRYYYKSPKPLLRPFLCRICGSRFLSHEDLRFHVNSHEAGDPQLFKCLQCSYRSRRWSSLKEHMFNHVGSKPYKCDECSYTSVYRKDVIRHAAVHSRDRSVWGWEGPGQERPGWVGKWRPGITMVPTYRAPALSQPHLLHTTGMSRKAVHPSSFGLEQDSTRP

SEQ ID NO: 863175 - protein, 1342 aa, Homo sapiens; identical to SEQ ID NO: 863165

SEQ ID NO: 863176 - protein, 1342 aa, Homo sapiens; identical to SEQ ID NO: 863165

SEQ ID NO: 863177 - protein, 1393 aa, Homo sapiens
MEENEVESSSDAAPGPGRPEEPSESGLGVGTSEAVSADSSDAAAAPGQAEADDSGVGQSSDRGSRSQEEVSESSSSADPLPNSYLPDSSSVSHGPVAGVTGGPPALVHSSALPDPNMLVSDCTASSSDLGSAIDKIIESTIGPDLIQNCITVTSAEDGGAETTRYLILQGPDDGAPMTSPMSSSTLAHSLAAIEALADGPTSTSTCLEAQGGPSSPVQLPPASGAEEPDLQSLEAMMEVVVVQQFKCKMCQYRSSTKATLLRHMRERHFRPVAAAAAAAGKKGRLRKWSTSTKSQEEEGPEEEDDDDIVDAGAIDDLEEDSDYNPAEDEPRGRQLRLQRPTPSTPRPRRRPGRPRKLPRLEISDLPDGVEGEPLVSSQSGQSPPEPQDPEAPSSSGPGHLVAMGKVSRTPVEAGVSQSDAENAAPSCPDEHDTLPRRRGRPSRRFLGKKYRKYYYKSPKPLLRPFLCRICGSRFLSHEDLRFHVNSHEAGDPQLFKCLQCSYRSRRWSSLKEHMFNHVGSKPYKCDECSYTSVYRKDVIRHAAVHSRDRKKRPDPTPKLSSFPCPVCGRVYPMQKRLTQHMKTHSTEKPHMCDKCGKSFKKRYTFKMHLLTHIQAVANRRFKCEFCEFVCEDKKALLNHQLSHVSDKPFKCSFCPYRTFREDFLLSHVAVKHTGAKPFACEYCHFSTRHKKNLRLHVRCRHASSFEEWGRRHPEEPPSRRRPFFSLQQIEELKQQHSAAPGPPPSSPGPPEIPPEATTFQSSEAPSLLCSDTLGGATIIYQQGELCRRIGALEGRTSELGRGRSCWWGLEDGEGVVLGASFLALCQAEVPPHPGAEESTAMATQTALDLLLNMSAQRELGGTALQVAVVKSEDVEAGLASPGGQPSPEGATPQVVTLHVAEPGGGAAAESQLGPPDLPQITLAPGPFGGTGYSVITAPPMEEGTSAPGTPYSEEPAGEAAQAVVVSDTLKEAGTHYIMATDGTQLHHIELTADGSISFPSPDALASGAKWPLLQCGGLPRDGPEPPSPAKTHCVGDSQSSASSPPATSKALGLAVPPSPPSAATAASKKFSCKICAEAFPGRAEMESHKRAHAGPGAFKCPDCPFSARQWPEVRAHMAQHSSLRPHQCSQCSFASKNKKDLRRHMLTHTKEKPFACHLCGQRFNRNGHLKFHIQRLHSPDGRKSGTPTARAPTQTPTQTIILNSDDETLATLHTALQSSHGVLGPERLQQALSQEHIIVAQEQTVTNQEEAAYIQEITTADGQTVQHLVTSDNQVQYIISQDGVQHLLPQEYVVVPEGHHIQVQEGQITHIQYEQGAPFLQESQIQYVPVSPGQQLVTQAQLEAAAHSAVTAVADAAMAQAQGLFGTDETVPEHIQQLQHQGIEYDVITLADD

SEQ ID NO: 863178 - protein, 1313 aa, Homo sapiens
MEENEVESSSDAAPGPGRPEEPSESGLGVGTSEAVSADSSDAAAAPGQAEADDSGVGQSSDRGSRSQEEVSESSSSADPLPNSYLPDSSSVSHGPVAGVTGGPPALVHSSALPDPNMLVSDCTASSSDLGSAIDKIIESTIGPDLIQNCITVTSAEDGGAETTRYLILQGPDDGAPMTSPMSSSTLAHSLAAIEALADGPTSTSTCLEAQGGPSSPVQLPPASGAEEPDLQSLEAMMEVVVVQQFKCKMCQYRSSTKATLLRHMRERHFRPVAAAAAAAGKKGRLRKWSTSTKSQEEEGPEEEDDDDIVDAGAIDDLEEDSDYNPAEDEPRGRQLRLQRPTPSTPRPRRRPGRPRKLPRLEISDLPDGVEGEPLVSSQSGQSPPEPQDPEAPSSSGPGHLVAMGKVSRTPVEAGVSQSDAENAAPSCPDEHDTLPRRRGRPSRRFLGKKYRKYYYKSPKPLLRPFLCRICGSRFLSHEDLRFHVNSHEAGDPQLFKCLQCSYRSRRWSSLKEHMFNHVGSKPYKCDECSYTSVYRKDVIRHAAVHSRDRKKRPDPTPKLSSFPCPVCGRVYPMQKRLTQHMKTHSTEKPHMCDKCGKSFKKRYTFKMHLLTHIQAVANRRFKCEFCEFVCEDKKALLNHQLSHVSDKPFKCSFCPYRTFREDFLLSHVAVKHTGAKPFACEYCHFSTRHKKNLRLHVRCRHASSFEEWGRRHPEEPPSRRRPFFSLQQIEELKQQHSAAPGPPPSSPGPPEIPPEATTFQSSEAPSLLCSDTLGGATIIYQQGELCRRIGALEGRTSELGRGRSCWWGLEDGEGVVLGASFLALCQAEVPPHPGAEESTAMATQTALDLLLNMSAQRELGGTALQVAVVKSEDVEAGLASPGGQPSPEGATPQVVTLHVAEPGGGAAAESQLGPPDLPQITLAPGPFGGTGYSVITAPPMEEGTSAPGTPYSEEPAGEAAQAVVVSDTLKEAGTHYIMATDGTQLHHIELTADGSISFPSPDALASGAKWPLLQCGGLPRDGPEPPSPAKTHCVGDSQSSASSPPATSKALGLAVPPSPPSAATAASKKFSCKICAEAFPGRAEMESHKRAHAGPGAFKCPDCPFSARQWPEVRAHMAQHSSLRPHQCSQCSFASKNKKDLRRHMLTHTKEKPFACHLCGQRFNRNGHLKFHIQRLHSPDGRKSGTPTARAPTQTPTQTIILNSDDETLATLHTALQSSHGVLGPERLQQALSQEHIIVAQEQTVTNQEEAAYIQEITTADGQTVQHLVTSDNQVQYIISQDGVQHLLPQEYVVVPEGHHIQVGQTWDEGAVW

SEQ ID NO: 863179 - protein, 172 aa, Homo sapiens
MEENEVESSSDAAPGPGRPEEPSESGLGVGTSEAVSADSSDAAAAPGQAEADDSGVGQSSDRGSRSQEEVSESSSSADPLPNSYLPDSSSVSHGPVAGVTGGPPALVHSSALPDPNMLVSDCTASSSDLGSAIDKIIESTIGPDLIQSESGRGAPQGFSCSVRQPAVPTLAV

SEQ ID NO: 863180 - protein, 120 aa, Homo sapiens
MEENEVESSSDAAPGPGRPEEPSESGLGVGTSEAVSADSSDAAAAPGQAEADDSGVGQSSDRGSRSQVWTRLDGVGGGKDREQQCLTAKRKQGLFVANTWCFWFTVSQAPSQTPKMDFLI

SEQ ID NO: 863181 - protein, 288 aa, Homo sapiens [sequence omitted]

SEQ ID NO: 863182 - protein, 76 aa, Homo sapiens
SSSWGIAGFPGPQVSILSSLPSCTPVQSRGPGPRAATAGTEPGTHHRCPGTDSDQSGKSQDWGPSGQRQAGVGVEK

SEQ ID NO: 863183 - protein, 443 aa, Homo sapiens
MDFPCLWLGLLLPLVAALDFNYHRQEGMEAFLKTVAQNYSSVTHLHSIGKSVKGRNLWVLVVGRFPKEHRIGIPEFKYVANMHGDETVGRELLLHLIDYLVTSDGKDPEITNLINSTRIHIMPSMNPDGFEAVKKPDCYYSIGRENYNQYDLNRNFPDAFEYNNVSRQPETVAVMKWLKTETFVLSANLHGGALVASYPFDNGVQATGALYSRSLTPDDDVFQYLAHTYASRNPNMKKGDECKNKMNFPNGVTNGYSWYPLQGGMQDYNYIWAQCFEITLELSCCKYPREEKLPSFWNNNKASLIEYIKQVHLGVKGQVFDQNGNPLPNVIVEVQDRKHICPYRTNKYGEYYLLLLPGSYIINVTVPGHDPHITKVIIPEKSQNFSALKKDILLPFQGQLDSIPVSNPSCPMIPLYRNLPDHSAATKPSLFLFLVSLLHIFFK

SEQ ID NO: 863184 - protein, 468 aa, Homo sapiens
AFLPSAYGTGPFLEWGSYDLQSNKNMDFPCLWLGLLLPLVAALDFNYHRQEGMEAFLKTVAQNYSSVTHLHSIGKSVKGRNLWVLVVGRFPKEHRIGIPEFKYVANMHGDETVGRELLLHLIDYLVTSDGKDPEITNLINSTRIHIMPSMNPDGFEAVKKPDCYYSIGRENYNQYDLNRNFPDAFEYNNVSRQPETVAVMKWLKTETFVLSANLHGGALVASYPFDNGVQATGALYSRSLTPDDDVFQYLAHTYASRNPNMKKGDECKNKMNFPNGVTNGYSWYPLQGGMQDYNYIWAQCFEITLELSCCKYPREEKLPSFWNNNKASLIEYIKQVHLGVKGQVFDQNGNPLPNVIVEVQDRKHICPYRTNKYGEYYLLLLPGSYIINVTVPGHDPHITKVIIPEKSQNFSALKKDILLPFQGQLDSIPVSNPSCPMIPLYRNLPDHSAATKPSLFLFLVSLLHIFFK

SEQ ID NO: 863185 - protein, 468 aa, Homo sapiens; identical to SEQ ID NO: 863184

SEQ ID NO: 863186 - protein, 443 aa, Homo sapiens; identical to SEQ ID NO: 863183

SEQ ID NO: 863187 - protein, 443 aa, Homo sapiens; identical to SEQ ID NO: 863183

SEQ ID NO: 863188 - protein, 127 aa, Homo sapiens
MDLKPSKSLTVTTASEGKEGLVYLYLKTTQHKGSRQAPVGLGKRRCVMVRALRAGVMSLMCQSSRHIRAASGLQEEMQIRLLCPGAHLASPSSFATPSLSPASSPLGLLPGSTRCFLTSAFYTHRFP

SEQ ID NO: 863189 - protein, 48 aa, Homo sapiens
MTTPEITNLINSTRIHIMPSMNPDGFEAVKKPDCYYSIGRENYNQGGE

SEQ ID NO: 863190 - protein, 443 aa, Homo sapiens; identical to SEQ ID NO: 863183

SEQ ID NO: 863191 - protein, 468 aa, Homo sapiens; identical to SEQ ID NO: 863184

SEQ ID NO: 863192 - protein, 443 aa, Homo sapiens; identical to SEQ ID NO: 863183

SEQ ID NO: 863193 - protein, 315 aa, Homo sapiens
MDFPCLWLGLLLPLVAALDFNYHRQEGMEAFLKTVAQNYSSVTHLHSIGKSVKGRNLWVLVVGRFPKEHRIGIPEFKYVANMHGDETVGRELLLHLIDYLVTSDGKDPEITNLINSTRIHIMPSMNPDGFEAVKKPDCYYSIGRENYNQYDLNRNFPDAFEYNNVSRQPETVAVMKWLKTETFVLSANLHGGALVASYPFDNGVQATGALYSRSLTPDDDVFQYLAHTYASRNPNMKKGDECKNKMNFPNGVTNGYSWYPLQGGMQDYNYIWAQCFEITLELSCCKYPREEKLPSFWNNNKASLIEYIKQVHLGL

SEQ ID NO: 863194 - protein, 865 aa, Homo sapiens
RPHPCRPPRPSRVPEPSGMEPWKQCAQWLIHCKVLPTNHRVTWDSAQVFDLAQTLRDGVLLCQLLNNLRAHSINLKEINLRPQMSQFLCLKNIRTFLTACCETFGMRKSELFEAFDLFDVRDFGKVIETLSRLSRTPIALATGIRPFPTEESINDEDIYKGLPDLIDETLVEDEEDLYDCVYGEDEGGEVYEDLMKAEEAHQPKCPENDIRSCCLAEIKQTEEKYTETLESIEKYFMAPLKRFLTAAEFDSVFINIPELVKLHRNLMQEIHDSIVNKNDQNLYQVFINYKERLVIYGQYCSGVESAISSLDYISKTKEDVKLKLEECSKRANNGKFTLRDLLVVPMQRVLKYHLLLQELVKHTTDPTEKANLKLALDAMKDLAQYVNEVKRDNETLREIKQFQLSIENLNQPVLLFGRPQGDGEIRITTLDKHTKQERHIFLFDLAVIVCKRKGDNYEMKEIIDLQQYKIANNPTTDKENKKWSYGFYLIHTQGQNGLEFYCKTKDLKKKWLEQFEMALSNIRPDYADSNFHDFKMHTFTRVTSCKVCQMLLRGTFYQGYLCFKCGARAHKECLGRVDNCGRVNSGEQGTLKLPEKRTNGLRRTPKQVDPGLPKMQVIRNYSGTPPPALHEGPPLQLQAGDTVELLKGDAHSLFWQGRNLASGEVGFFPSDAVKPCPCVPKPVDYSCQPWYAGAMERLQAETELINRVNSTYLVRHRTKESGEYAISIKYNNEAKHIKILTRDGFFHIAENRKFKSLMELVEYYKHHSLKEGFRTLDTTLQFPYKEPEHSAGQRGNRAGNSLLSPKVLGIAIARYDFCARDMRELSLLKGDVVKIYTKMSANGWWRGEVNGRVGWFPSTYVEEDE

SEQ ID NO: 863195 - protein, 67 aa, Homo sapiens
SGALLKMALHSMRKARERWSFIRALHKGSAAAPALQVTKDGPSLRGFPSREVLLIPLPSIYFSPPAS

SEQ ID NO: 863196 - protein, 366 aa, Homo sapiens
SGALLKMALHSMRKARERWSFIRALHKGSAAAPALQKDSKKRVFSGIQPTGILHLGNYLGAIESWVRLQDEYDSVLYSIVDLHSITVPQDPAVLRQSILDMTAVLLACGINPEKSILFQQSQVSEHTQLSWILSCMVRLPRLQHLHQWKAKTTKQKHDGTVGLLTYPVLQAADILLYKSTHVPVGEDQVQHMELVQDLAQGFNKKYGEFFPVPESILTSMKKVKSLRDPSAKMSKSDPDKLATVRITDSPEEIVQKFRKAVTDFTSEVTYDPAGRAGVSNIVAVHAAVTGLSVEEVVRRSAGMNTARYKLAVADAVIEKFAPIKREIEKLKLDKDHLEKVLQIGSAKAKELAYTVCQEVKKLVGFL

SEQ ID NO: 863197 - protein, 366 aa, Homo sapiens; identical to SEQ ID NO: 863196

SEQ ID NO: 863198 - protein, 261 aa, Homo sapiens
SGALLKMALHSMRKARERWSFIRALHKGSAAAPALQKDSKKRVFSGIQPTGILHLGNYLGAIESWVRLQDEYDSVLYSIVDLHSITVPQDPAVLRQSILDMTAVLLACGINPEKSILFQQSQVSEHTQLSWILSCMVRLPRLQHLHQWKAKTTKQKHDGTVGLLTYPVLQAADILLYKSTHVPVGEDQVQHMELVQDLAQGFNKKYGEFFPVPESILTSMKKVKSLRDPSAKMSKSDPDKLATVRITDSPEEIVQKFRKML

SEQ ID NO: 863199 - protein, 376 aa, Homo sapiens
SGALLKMALHSMRKARERWSFIRALHKGSAAAPALQKDSKKRVFSGIQPTGILHLGNYLGAIESWVRLQDEYDSVLYSIVDLHSITVPQDPAVLRQSILDMTAVLLACGINPEKSILFQQSQVSEHTQLSWILSCMVRLPRLQHLHQWKAKTTKQKHDGTVGLLTYPVLQAADILLYKSTHVPVGEDQVQHMELVQDLAQGFNKKYGEFFPVPESILSMCVLVFLTYASMKKVKSLRDPSAKMSKSDPDKLATVRITDSPEEIVQKFRKAVTDFTSEVTYDPAGRAGVSNIVAVHAAVTGLSVEEVVRRSAGMNTARYKLAVADAVIEKFAPIKREIEKLKLDKDHLEKVLQIGSAKAKELAYTVCQEVKKLVGFL

SEQ ID NO: 863200 - protein, 379 aa, Homo sapiens
RPHPCRPPRPSRVPEPSGMEPWKQCAQWLIHCKVLPTNHRVTWDSAQVFDLAQTLRDGVLLCQLLNNLRAHSINLKEINLRPQMSQFLCLKNIRTFLTACCETFGMRKSELFEAFDLFDVRDFGKVSEHTQLSWILSCMVRLPRLQHLHQWKAKTTKQKHDGTVGLLTYPVLQAADILLYKSTHVPVGEDQVQHMELVQDLAQGFNKKYGEFFPVPESILSMCVLVFFNLASMKKVKSLRDPSAKMSKSDPDKLATVRITDSPEEIVQKFRKAVTDFTSEVTYDPAGRAGVSNIVAVHAAVTGLSVEEVVRRSAGMNTARYKLAVADAVIEKFAPIKREIEKLKLDKDHLEKVLQIGSAKAKELAYTVCQEVKKLVGFL

SEQ ID NO: 863201 - protein, 175 aa, Homo sapiens [sequence omitted]

SEQ ID NO: 863202 - protein, 366 aa, Homo sapiens; identical to SEQ ID NO: 863196

SEQ ID NO: 863203 - protein, 753 aa, Homo sapiens
MQLPDCPCRAHLPVIETLSRLSRTPIALATGIRPFPTEESINDEDIYKGLPDLIDETLVEDEEDLYDCVYGEDEGGEVYEDLMKAEEAHQPKCPENDIRSCCLAEIKQTEEKYTETLESIEKYFMAPLKRFLTAAEFDSVFINIPELVKLHRNLMQEIHDSIVNKNDQNLYQVFINYKERLVIYGQYCSGVESAISSLDYISKTKEDVKLKLEECSKRANNGKFTLRDLLVVPMQRVLKYHLLLQELVKHTTDPTEKANLKLALDAMKDLAQYVNEVKRDNETLREIKQFQLSIENLNQPVLLFGRPQGDGEIRITTLDKHTKQERHIFLFDLAVIVCKRKGDNYEMKEIIDLQQYKIANNPTTDKENKKWSYGFYLIHTQGQNGLEFYCKTKDLKKKWLEQFEMALSNIRPDYADSNFHDFKMHTFTRVTSCKVCQMLLRGTFYQGYLCFKCGARAHKECLGRVDNCGRVNSGEQGTLKLPEKRTNGLRRTPKQVDPGLPKMQVIRNYSGTPPPALHEGPPLQLQAGDTVELLKGDAHSLFWQGRNLASGEVGFFPSDAVKPCPCVPKPVDYSCQPWYAGAMERLQAETELINRVNSTYLVRHRTKESGEYAISIKYNNEAKHIKILTRDGFFHIAENRKFKSLMELVEYYKHHSLKEGFRTLDTTLQFPYKEPEHSAGQRGNRAGNSLLSPKVLGIAIARYDFCARDMRELSLLKGDVVKIYTKMSANGWWRGEVNGRVGWFPSTYVEEDE

SEQ ID NO: 863204 - protein, 312 aa, Homo sapiens
TKQWCFTTLQRKLRLLTKQNNFTLTMPIFTFLSEQGTLKLPEKRTNGLRRTPKQVDPGLPKMQVIRNYSGTPPPALHEGPPLQLQAGDTVELLKGDAHSLFWQGRNLASGEVGFFPSDAVKPCPCVPKPVDYSCQPWYAGAMERLQAETELINRVNSTYLVRHRTKESGEYAISIKYNNEAKHIKILTRDGFFHIAENRKFKSLMELVEYYKHHSLKEGFRTLDTTLQFPYKEPEHSAGQRGNRAGNSLLSPKVLGIAIARYDFCARDMRELSLLKGDVVKIYTKMSANGWWRGEVNGRVGWFPSTYVEEDE

SEQ ID NO: 863205 - protein, 331 aa, Homo sapiens
MKDSKKRVFSGIQPTGILHLGNYLGAIESWVRLQDEYDSVLYSIVDLHSITVPQDPAVLRQSILDMTAVLLACGINPEKSILFQQSQVSEHTQLSWILSCMVRLPRLQHLHQWKAKTTKQKHDGTVGLLTYPVLQAADILLYKSTHVPVGEDQVQHMELVQDLAQGFNKKYGEFFPVPESILTSMKKVKSLRDPSAKMSKSDPDKLATVRITDSPEEIVQKFRKAVTDFTSEVTYDPAGRAGVSNIVAVHAAVTGLSVEEVVRRSAGMNTARYKLAVADAVIEKFAPIKREIEKLKLDKDHLEKVLQIGSAKAKELAYTVCQEVKKLVGFL

SEQ ID NO: 863206 - protein, 319 aa, Homo sapiens
SGALLKMALHSMRKARERWSFIRALHKGSAAAPALQKDSKKRVFSGIQPTGILHLGNYLGAIESWVSEHTQLSWILSCMVRLPRLQHLHQWKAKTTKQKHDGTVGLLTYPVLQAADILLYKSTHVPVGEDQVQHMELVQDLAQGFNKKYGEFFPVPESILSMCVLVFFNLASMKKVKSLRDPSAKMSKSDPDKLATVRITDSPEEIVQKFRKAVTDFTSEVTYDPAGRAGVSNIVAVHAAVTGLSVEEVVRRSAGMNTARYKLAVADAVIEKFAPIKREIEKLKLDKDHLEKVLQIGSAKAKELAYTVCQEVKKLVGFL

SEQ ID NO: 863207 - protein, 753 aa, Homo sapiens; identical to SEQ ID NO: 863203

SEQ ID NO: 863208 - protein, 220 aa, Homo sapiens
GPRKPAKARPPSRGRTMVDQLRERTTMADPLRERTELLLADYLGYCAREPGTPEPAPSTPEAAVLRSAAARLRQIHRSFFSAYLGYPGNRFELVALMADSVLSDSPGPTWGRVVTLVTFAGTLLERGPLVTARWKKWGFQPRLKEQEGDVARDCQRLVALLSSRLMGQHRAWLQAQGGWDGFCHFFRTPFPLAFWRKQLVQAFLSCLLTTAFIYLWTRLL

SEQ ID NO: 863209 - protein, 299 aa, Homo sapiens
MVDKKLVVVFGGTGAQGGSVARTLLEDGTFKVRVVTRNPRKKAAKELRLQGAEVVQGDQDDQVIMELALNGAYATFIVTNYWESCSQEQEVKQGKLLADLARRLGLHYVVYSGLENIKKLTAGRLAAAHFDGKGEVEEYFRDIGVPMTSVRLPCYFENLLSHFLPQKAPDGKSYLLSLPTGDVPMDGMSVSDLGPVVLSLLKMPEKYVGQNIGLSTCRHTAEEYAALLTKHTRKVVHDAKMTPEDYEKLGFPGARDLANMFRFYALRPDRDIELTLRLNPKALTLDQWLEQHKGDFNLL

SEQ ID NO: 863210 - protein, 210 aa, Homo sapiens
RTRGSTHASADALGRGRVGQNIKKLTAGRLAAAHFDGKGEVEEYFRDIGVPMTSVRLPCYFENLLSHFLPQKAPDGKSYLLSLPTGDVPMDGMSVSDLGPVVLSLLKMPEKYVGQNIGLSTCRHTAEEYAALLTKHTRKVVHDAKVGLPPQMTPEDYEKLGFPGARDLANMFRFYALRPDRDIELTLRLNPKALTLDQWLEQHKGDFNLL

SEQ ID NO: 863211 - protein, 348 aa, Homo sapiens
VSWYGRKHFDGVSADTSGLAAAARGPPTLGFRERRSARSLDRIRPILVLMVDKKLVVVFGGTGAQGGSVARTLLEDGTFKVRVVTRNPRKKAAKELRLQGAEVVQGDQDDQVIMELALNGAYATFIVTNYWESCSQEQEVKQGKLLADLARRLGLHYVVYSGLENIKKLTAGRLAAAHFDGKGEVEEYFRDIGVPMTSVRLPCYFENLLSHFLPQKAPDGKSYLLSLPTGDVPMDGMSVSDLGPVVLSLLKMPEKYVGQNIGLSTCRHTAEEYAALLTKHTRKVVHDAKMTPEDYEKLGFPGARDLANMFRFYALRPDRDIELTLRLNPKALTLDQWLEQHKGDFNLL

SEQ ID NO: 863212 - protein, 235 aa, Homo sapiens
MELALNGAYATFIVTNYWESCSQEQEVKQGKLLADLARRLGLHYVVYSGLENIKKLTAGRLAAAHFDGKGEVEEYFRDIGVPMTSVRLPCYFENLLSHFLPQKAPDGKSYLLSLPTGDVPMDGMSVSDLGPVVLSLLKMPEKYVGQNIGLSTCRHTAEEYAALLTKHTRKVVHDAKMTPEDYEKLGFPGARDLANMFRFYALRPDRDIELTLRLNPKALTLDQWLEQHKGDFNLL

SEQ ID NO: 863213 - protein, 330 aa, Homo sapiens
MVDKKLVVVFGGTEIWFHHVAQAGLKLLSSRDLRASASQSVWITGAQGGSVARTLLEDGTFKVRVVTRNPRKKAAKELRLQGAEVVQGDQDDQVIMELALNGAYATFIVTNYWESCSQEQEVKQGKLLADLARRLGLHYVVYSGLENIKKLTAGRLAAAHFDGKGEVEEYFRDIGVPMTSVRLPCYFENLLSHFLPQKAPDGKSYLLSLPTGDVPMDGMSVSDLGPVVLSLLKMPEKYVGQNIGLSTCRHTAEEYAALLTKHTRKVVHDAKMTPEDYEKLGFPGARDLANMFRFYALRPDRDIELTLRLNPKALTLDQWLEQHKGDFNLL

SEQ ID NO: 863214 - protein, 344 aa, Homo sapiens
MVDKKLVVVFGGTEIWFHHVAQAGLKLLSSRDLRASASQSVWITGMSPWAQLQRAKSKGAQGGSVARTLLEDGTFKVRVVTRNPRKKAAKELRLQGAEVVQGDQDDQVIMELALNGAYATFIVTNYWESCSQEQEVKQGKLLADLARRLGLHYVVYSGLENIKKLTAGRLAAAHFDGKGEVEEYFRDIGVPMTSVRLPCYFENLLSHFLPQKAPDGKSYLLSLPTGDVPMDGMSVSDLGPVVLSLLKMPEKYVGQNIGLSTCRHTAEEYAALLTKHTRKVVHDAKMTPEDYEKLGFPGARDLANMFRFYALRPDRDIELTLRLNPKALTLDQWLEQHKGDFNLL

SEQ ID NO: 863215 - protein, 327 aa, Homo sapiens
MVDKKLVVVFGGTGAQGGSVARTLLEDGTFKVRVVTRNPRKKAAKELRLQGAEVVQGDQDDQVIMELALNGAYATFIVTNYWESCSQEQEVKQGKLLADLARRLGLHYVVYSGLENIKKLTAGRLAAAHFDGKGEVEEYFRDIGVPMTSVRLPCYFENLLSHFLPQKAPDGKSYLLSLPTGDVPMDGMSVSDLGPVVLSLLKMPEKYVGQNIGLSTCRHTAEEYAALLTKHTRKVVHDAKMTPEDYEKLGFPGARDLANMFRFYALRPDRDIELTLRLNPAEEYAALLTKHTRKVAHDAKMTPEDYEKLGFPGARDLANMFRFYALR

SEQ ID NO: 863216 - protein, 251 aa, Homo sapiens
MVDKKLVVVFGGTGAQGGSVARTLLEDGTFKVRVVTRNPRKKAAKELRLQGAEVVQGDQDDQVIMELALNGAYATFIVTNYWESCSQEQEVKQGKLLADLARRLGLHYVVYSGLENIKKLTAGRLAAAHFDGKGEVEEYFRDIGVPMTSVRLPCYFENLLSHFLPQKAPDGKSYLLSLPTGDVPMDGMSVSDLGPVVLSLLKMPEKYVGQNIGLSTCRHTAEEYAALLTKHTRKVVHDAKELTGHRVKFLA

SEQ ID NO: 863217 - protein, 274 aa, Homo sapiens [sequence omitted]

SEQ ID NO: 863218 - protein, 78 aa, Homo sapiens
RYRQRTPRPCARKVVHDAKMTPEDYEKLGFPGARDLANMFRFYALRPDRDIELTLRLNPKALTLDQWLEQHKGDFNLL

SEQ ID NO: 863219 - protein, 151 aa, Homo sapiens
SAGITGMSHSIWPRTIFKLIYNVRQLRRAAVSELSALQKFSNDLVRRTWVRDRDNSGSGCSRSGDPSPSGLPAPPPPGALEDAGHDRLLCFQMTPEDYEKLGFPGARDLANMFRFYALRPDRDIELTLRLNPKALTLDQWLEQHKGDFNLL

SEQ ID NO: 863220 - protein, 299 aa, Homo sapiens; identical to SEQ ID NO: 863209

SEQ ID NO: 863221 - protein, 335 aa, Homo sapiens
MGVSFVAPGGNPGPTPNSTPPITPRSLDRIRPILVLMVDKKLVVVFGGTGAQGGSVARTLLEDGTFKVRVVTRNPRKKAAKELRLQGAEVVQGDQDDQVIMELALNGAYATFIVTNYWESCSQEQEVKQGKLLADLARRLGLHYVVYSGLENIKKLTAGRLAAAHFDGKGEVEEYFRDIGVPMTSVRLPCYFENLLSHFLPQKAPDGKSYLLSLPTGDVPMDGMSVSDLGPVVLSLLKMPEKYVGQNIGLSTCRHTAEEYAALLTKHTRKVVHDAKMTPEDYEKLGFPGARDLANMFRFYALRPDRDIELTLRLNPKALTLDQWLEQHKGDFNLL

SEQ ID NO: 863222 - protein, 235 aa, Homo sapiens; identical to SEQ ID NO: 863212

SEQ ID NO: 863223 - protein, 236 aa, Homo sapiens
MRIVVEKVSWMLLAVVEHSLRGFALQWDFQGKLLADLARRLGLHYVVYSGLENIKKLTAGRLAAAHFDGKGEVEEYFRDIGVPMTSVRLPCYFENLLSHFLPQKAPDGKSYLLSLPTGDVPMDGMSVSDLGPVVLSLLKMPEKYVGQNIGLSTCRHTAEEYAALLTKHTRKVVHDAKMTPEDYEKLGFPGARDLANMFRFYALRPDRDIELTLRLNPKALTLDQWLEQHKGDFNLL

SEQ ID NO: 863224 - protein, 274 aa, Homo sapiens [sequence omitted]

SEQ ID NO: 863225 - protein, 115 aa, Homo sapiens [sequence omitted]

SEQ ID NO: 863226 - protein, 108 aa, Homo sapiens
MILQRLFRFSSVIRSAVSVHLRRNIGVTAVAFNKELDPIQKLFVDKIREYKSKRQTSGGPVDASSEYQQELERELFKLKQMFGNADMNTFPTFKFEDPKFEVIEKPQA

SEQ ID NO: 863227 - protein, 245 aa, Homo sapiens
MGVTAPGTSGNKTQRRPRGGPCGGKGPGTRPAREGPRSPPPRRPHSPTPESALSPPPALQSRLRTAAARAPRAASLRVRPAAPATRSVRSQGPSRGIGAEKPQPPSRLPGTFGSRTTTPGRVRKTTAQGNGGSRGISMILQRLFRFSSVIRSAVSVHLRRNIGVTAVAFNKELDPIQKLFVDKIREYKSKRQTSGGPVDASSEYQQELERELFKLKQMFGNADMNTFPTFKFEDPKFEVIEKPQA

SEQ ID NO: 863228 - protein, 108 aa, Homo sapiens; identical to SEQ ID NO: 863226

SEQ ID NO: 863229 - protein, 116 aa, Homo sapiens
MHCDGGISMILQRLFRFSSVIRSAVSVHLRRNIGVTAVAFNKELDPIQKLFVDKIREYKSKRQTSGGPVDASSEYQQELERELFKLKQMFGNADMNTFPTFKFEDPKFEVIEKPQA

SEQ ID NO: 863230 - protein, 245 aa, Homo sapiens; identical to SEQ ID NO: 863227

SEQ ID NO: 863231 - protein, 116 aa, Homo sapiens; identical to SEQ ID NO: 863229

SEQ ID NO: 863232 - protein, 108 aa, Homo sapiens; identical to SEQ ID NO: 863226

SEQ ID NO: 863233 - protein, 108 aa, Homo sapiens; identical to SEQ ID NO: 863226

SEQ ID NO: 863234 - protein, 108 aa, Homo sapiens; identical to SEQ ID NO: 863226

SEQ ID NO: 863235 - protein, 119 aa, Homo sapiens
MILQRLFRFSSVIRSAVSVHLRRNIGVTAVAFNKELDPIQKLFVDKIREYKSKRQTSGGPVDASSEYQQELERELFKLKQMFGNADMNTFPTFKFEEHFSQHLRSWQPSRDDDILILSS

SEQ ID NO: 863236 - protein, 108 aa, Homo sapiens; identical to SEQ ID NO: 863226

SEQ ID NO: 863237 - protein, 108 aa, Homo sapiens; identical to SEQ ID NO: 863226

SEQ ID NO: 863238 - protein, 109 aa, Homo sapiens [sequence omitted]

SEQ ID NO: 863239 - protein, 109 aa, Homo sapiens [sequence omitted]

SEQ ID NO: 863240 - protein, 172 aa, Homo sapiens
MGVTAPGTSGNKTQRRPRGGPCGGKGPGTRPAREGPRSPPPRRPHSPTPESALSPPPALQSRLRTAAARAPRAASLRVRPAAPATRSVRSQGPSRGIGAEKPQPPSRLPGTFGSRTTTPGRVRKTTAQGNGGSRGTRKHNAPIRFVLHSLTFPAPLYTSITLTNRTLTRRGA

SEQ ID NO: 863241 - protein, 116 aa, Homo sapiens; identical to SEQ ID NO: 863229

SEQ ID NO: 863242 - protein, 108 aa, Homo sapiens; identical to SEQ ID NO: 863226

SEQ ID NO: 863243 - protein, 108 aa, Homo sapiens; identical to SEQ ID NO: 863226

SEQ ID NO: 863244 - protein, 108 aa, Homo sapiens; identical to SEQ ID NO: 863226

SEQ ID NO: 863245 - protein, 108 aa, Homo sapiens; identical to SEQ ID NO: 863226

SEQ ID NO: 863246 - protein, 124 aa, Homo sapiens
  misc_feature (107)..(107): Xaa can be any naturally occurring amino acid
  misc_feature (118)..(118): Xaa can be any naturally occurring amino acid
MILQRLFRFSSVIRSAVSVHLRRNIGVTAVAFNKELDPIQKLFVDKIREYKSKRQTSGGPVDASSEYQQELERELFKLKQMFGNADMNTFPTFKFEDPKFEVIDYPXHQSNLQNTPHXTPAQAP

SEQ ID NO: 863247 - protein, 125 aa, Homo sapiens
DLVCGTLKGLFCLRGEVLAPSAPDSFPDMSGIGESSIGDIIFSSTRACRRRCVRAIQKLFVDKIREYKSKRQTSGGPVDASSEYQQELERELFKLKQMFGNADMNTFPTFKFEDPKFEVIEKPQA

SEQ ID NO: 863248 - protein, 109 aa, Homo sapiens [sequence omitted]

SEQ ID NO: 863249 - protein, 119 aa, Homo sapiens; identical to SEQ ID NO: 863235

SEQ ID NO: 863250 - protein, 172 aa, Homo sapiens; identical to SEQ ID NO: 863240

SEQ ID NO: 863251 - protein, 172 aa, Homo sapiens; identical to SEQ ID NO: 863240

SEQ ID NO: 863252 - protein, 205 aa, Homo sapiens
MGVTAPGTSGNKTQRRPRGGPCGGKGPGTRPAREGPRSPPPRRPHSPTPESALSPPPALQSRLRTAAARAPRAASLRVRPAAPATRSVRSQGPSRGIGAEKPQPPSRLPGTFGSRTTTPGRVRGSSGSPLSFGQPSQSICGGTLVLQQWHLIRNLILYRNSLWTRLENTNLSDRHLEDLLMLVQSISKSWRGSFLSSSKCLVMQT

SEQ ID NO: 863253 - protein, 1043 aa, Homo sapiens
MPLLEGSVGVEDLVLLEPLVEESLLKNLQLRYENKEIYTYIGNVVISVNPYQQLPIYGPEFIAKYQDYTFYELKPHIYALANVAYQSLRDRDRDQCILITGESGSGKTEASKLVMSYVAAVCGKGEQVNSVKEQLLQSNPVLEAFGNAKTIRNNNSSRFGKYMDIEFDFKGSPLGGVITNYLLEKSRLVKQLKGERNFHIFYQLLAGADEQLLKALKLERDTTGYAYLNHEVSRVDGMDDASSFRAVQSAMAVIGFSEEEIRQVLEVTSMVLKLGNVLVADEFQASGIPASGIRDGRGVREIGEMVGLNSEEVERALCSRTMETAKEKVVTALNVMQAQYARDALAKNIYSRLFDWIVNRINESIKVGIGEKKKVMGVLDIYGFEILEDNSFEQFVINYCNEKLQQVFIEMTLKEEQEEYKREGIPWTKVDYFDNGIICKLIEHNQRGILAMLDEECLRPGVVSDSTFLAKLNQLFSKHGHYESKVTQNAQRQYDHTMGLSCFRICHYAGKVTYNVTSFIDKNNDLLFRDLLQAMWKAQHPLLRSLFPEGNPKQASLKRPPTAGAQFKSSVAILMKNLYSKSPNYIRCIKPNEHQQRGQFSSDLVATQARYLGLLENVRVRRAGYAHRQGYGPFLERYRLLSRSTWPHWNGGDREGVEKVLGELSMSSGELAFGKTKIFIRSPKTLFYLEEQRRLRLQQLATLIQKIYRGWRCRTHYQLMRKSQILISSWFRGNMQKKCYGKIKASVLLIQAFVRGWKARKNYRKYFRSEAALTLADFIYKSMVQKFLLGLKNNLPSTNVLDKTWPAAPYKCLSTANQELQQLFYQWKCKRFRDQLSPKQVEILREKLCASELFKGKKASYPQSVPIPFCGDYIGLQGNPKLQKLKGGEEGPVLMAEAVKKVNRGNGKTSSRILLLTKGHVILTDTKKSQAKIVIGLDNVAGVSVTSLKDGLFSLHLSEMSSVGSKGDFLLVSEHVIELLTKMYRAVLDATQRQLTVTVTEKFSVRFKENSVAVKVVQGPAGGDNSKLRYKKKGSHCLEVTVQ

SEQ ID NO: 863254 - protein, 1020 aa, Homo sapiens
MPLLEGSVGVEDLVLLEPLVEESLLKNLQLRYENKEIYTYIGNVVISVNPYQQLPIYGPEFIAKYQDYTFYELKPHIYALANVAYQSLRDRDRDQCILITGESGSGKTEASKLVMSYVAAVCGKGEQVNSVKEQLLQSNPVLEAFGNAKTIRNNNSSRFGKYMDIEFDFKGSPLGGVITNYLLEKSRLVKQLKGERNFHIFYQLLAGADEQLLKALKLERDTTGYAYLNHEVSRVDGMDDASSFRAVQSAMAVIGFSEEEIRQVLEVTSMVLKLGNVLVADEFQASGIPASGIRDGRGVREIGEMVGLNSEEVERALCSRTMETAKEKVVTALNVMQAQYARDALAKNIYSRLFDWIVNRINESIKVGIGEKKKVMGVLDIYGFEILEDNSFEQFVINYCNEKLQQVFIEMTLKEEQEEYKREGIPWTKVDYFDNGIICKLIEHNQRGILAMLDEECLRPGVVSDSTFLAKLNQLFSKHGHYESKVTQNAQRQYDHTMGLSCFRICHYAGKVTYNVTSFIDKNNDLLFRDLLQAMWKAQHPLLRSLFPEGNPKQASLKRPPTAGAQFKSSVAILMKNLYSKSPNYIRCIKPNEHQQRGQFSSDLVATQARYLGLLENVRVRRAGYAHRQGYGPFLERYRLLSRSTWPHWNGGDREGVEKVLGELSMSSGELAFGKTKIFIRSPKTLFYLEEQRRLRLQQLATLIQKIYRGWRCRTHYQLMRKSQILISSWFRGNMARKNYRKYFRSEAALTLADFIYKSMVQKFLLGLKNNLPSTNVLDKTWPAAPYKCLSTANQELQQLFYQWKCKRFRDQLSPKQVEILREKLCASELFKGKKASYPQSVPIPFCGDYIGLQGNPKLQKLKGGEEGPVLMAEAVKKVNRGNGKTSSRILLLTKGHVILTDTKKSQAKIVIGLDNVAGVSVTSLKDGLFSLHLSEMSSVGSKGDFLLVSEHVIELLTKMYRAVLDATQRQLTVTVTEKFSVRFKENSVAVKVVQGPAGGDNSKLRYKKKGSHCLEVTVQ

SEQ ID NO: 863255 - protein, 1043 aa, Homo sapiens; identical to SEQ ID NO: 863253

SEQ ID NO: 863256 - protein, 841 aa, Homo sapiens
MPLLEGSVGVEDLVLLEPLVEESLLKNLQLRYENKEIYTYIGNVVISVNPYQQLPIYGPEFIAKYQDYTFYELKPHIYALANVAYQSLRDRDRDQCILITGESGSGKTEASKLVMSYVAAVCGKGEQVNSVKEQLLQSNPVLEAFGNAKTIRNNNSSRFGKYMDIEFDFKGSPLGGVITNYLLEKSRLVKQLKGERNFHIFYQLLAGADEQLLKALKLERDTTGYAYLNHEVSRVDGMDDASSFRAVQSAMAVIGFSEEEIRQVLEVTSMVLKLGNVLVADEFQASGIPASGIRDGRGVREIGEMVGLNSEEVERALCSRTMETAKEKVVTALNVMQAQYARDALAKNIYSRLFDWIVNRINESIKVGIGEKKKVMGVLDIYGFEILEDNSFEQFVINYCNEKLQQVFIEMTLKEEQEEYKREGIPWTKVDYFDNGIICKLIEHNQRGILAMLDEECLRPGVVSDSTFLAKLNQLFSKHGHYESKVTQNAQRQYDHTMGLSCFRICHYAGKVTYNVTSFIDKNNDLLFRDLLQAMWKAQHPLLRSLFPEGNPKQASLKRPPTAGAQFKSSVAILMKNLYSKSPNYIRCIKPNEHQQRGQFSSDLVATQARYLGLLENVRVRRAGYAHRQGYGPFLERYRLLSRSTWPHWNGGDREGVEKVLGELSMSSGELAFGKTKIFIRSPKTLFYLEEQRRLRLQQLATLIQKIYRGWRCRTHYQLMRKSQILISSWFRGNMARKNYRKYFRSEAALTLADFIYKSMVQKFLLGLKNNLPSTNVLDKTWPAAPYKCLSTANQELQQLFYQWKCKRFRDQLSPKQVEILREKLCASELFKGKKASYPQR

SEQ ID NO: 863257 - protein, 137 aa, Homo sapiens
SPAAAQTSFISKTLSTKTPSAAQNPMMTNASATQATLTAQKFTTAKVAFTQSPSAARKSTNVHSPVTNGLKSTQRFPSAHITATRSTPVSRTTKHFHETTPNKGSGTTSGTTRLLSGHTCFTLTGLLGTLVTMGLLT

SEQ ID NO: 863258 - protein, 381 aa, Homo sapiens
MTVARPSVPAALPLLGELPRLLLLVLLCLPAVWGDCGLPPDVPNAQPALEGRTSFPEDTVITYKCEESFVKIPGEKDSVICLKGSQWSDIEEFCNRSCEVPTRLNSASLKQPYITQNYFPVGTVVEYECRPGYRREPSLSPKLTCLQNLKWSTAVEFCKKKSCPNPGEIRNGQIDVPGGILFGATISFSCNTGYKLFGSTSSFCLISGSSVQWSDPLPECREIYCPAPPQIDNGIIQGERDHYGYRQSVTYACNKGFTMIGEHSIYCTVNNDEGEWSGPPPECRGKSLTSKVPPTVQKPTTVNVPTTEVSPTSQKTTTKTTTPNAQATRSTPVSRTTKHFHETTPNKGSGTTSGTTRLLSGHTCFTLTGLLGTLVTMGLLT

SEQ ID NO: 863259 - protein, 381 aa, Homo sapiens; identical to SEQ ID NO: 863258

SEQ ID NO: 863260 - protein, 381 aa, Homo sapiens; identical to SEQ ID NO: 863258

SEQ ID NO: 863261 - protein, 400 aa, Homo sapiens
MTVARPSVPAALPLLGELPRLLLLVLLCLPAVWGDCGLPPDVPNAQPALEGRTSFPEDTVITYKCEESFVKIPGEKDSVICLKGSQWSDIEEFCNRSCEVPTRLNSASLKQPYITQNYFPVGTVVEYECRPGYRREPSLSPKLTCLQNLKWSTAVEFCKKKSCPNPGEIRNGQIDVPGGILFGATISFSCNTGYKLFGSTSSFCLISGSSVQWSDPLPECREIYCPAPPQIDNGIIQGERDHYGYRQSVTYACNKGFTMIGEHSIYCTVNNDEGEWSGPPPECRGKSLTSKVPPTVQKPTTVNVPTTEVSPTSQKTTTKTTTPNAQATRSTPVSRTTKHFHETTPNKGSGTTSGQLTLFRAHVFHVDRFAWDASNHGLADLAKEELRRKYTQVYRLFLVS

SEQ ID NO: 863262 - protein, 399 aa, Homo sapiens
MTVARPSVPAALPLLGELPRLLLLVLLCLPAVWESSRVEHTMLQTCMSSLSGDCGLPPDVPNAQPALEGRTSFPEDTVITYKCEESFVKIPGEKDSVICLKGSQWSDIEEFCNRSCEVPTRLNSASLKQPYITQNYFPVGTVVEYECRPGYRREPSLSPKLTCLQNLKWSTAVEFCKKKSCPNPGEIRNGQIDVPGGILFGATISFSCNTGYKLFGSTSSFCLISGSSVQWSDPLPECREIYCPAPPQIDNGIIQGERDHYGYRQSVTYACNKGFTMIGEHSIYCTVNNDEGEWSGPPPECRGKSLTSKVPPTVQKPTTVNVPTTEVSPTSQKTTTKTTTPNAQATRSTPVSRTTKHFHETTPNKGSGTTSGTTRLLSGHTCFTLTGLLGTLVTMGLLT

SEQ ID NO: 863263 - protein, 381 aa, Homo sapiens; identical to SEQ ID NO: 863258

SEQ ID NO: 863264 - protein, 381 aa, Homo sapiens; identical to SEQ ID NO: 863258

SEQ ID NO: 863265 - protein, 363 aa, Homo sapiens
MTVARPSVPAALPLLGELPRLLLLVLLCLPAVWGDCGLPPDVPNAQPALEGRTSFPEDTVITYKCEESFVKIPGEKDSVICLKGSQWSDIEEFCNRSCEVPTRLNSASLKQPYITQNYFPVGTVVEYECRPGYRREPSLSPKLTCLQNLKWSTAVEFCKSGILFGATISFSCNTGYKLFGSTSSFCLISGSSVQWSDPLPECREIYCPAPPQIDNGIIQGERDHYGYRQSVTYACNKGFTMIGEHSIYCTVNNDEGEWSGPPPECRGKSLTSKVPPTVQKPTTVNVPTTEVSPTSQKTTTKTTTPNAQATRSTPVSRTTKHFHETTPNKGSGTTSGTTRLLSGHTCFTLTGLLGTLVTMGLLT

SEQ ID NO: 863266 - protein, 394 aa, Homo sapiens
MTVARPSVPAALPLLGELPRLLLLVLLCLPAVWGDCGLPPDVPNAQPALEGRTSFPEDTVITYKCEESFVKIPGEKDSVICLKGSQWSDIEEFCNRSCEVPTRLNSASLKQPYITQNYFPVGTVVEYECRPGYRREPSLSPKLTCLQNLKWSTAVEFCKKKSCPNPGEIRNGQIDVPGGILFGATISFSCNTGYKLFGSTSSFCLISGSSVQWSDPLPECREIYCPAPPQIDNGIIQGERDHYGYRQSVTYACNKGFTMIGEHSIYCTVNNDEGEWSGPPPECRGKSLTSKVPPTVQKPTTVNVPTTEVSPTSQKTTTKTTTPNAQATRSTPVSRTTKHFHETTPNKGSGTTSGQLTLFRFTEYGSNVLWWKYELDQDCRIKWSLIYCSQGFSY

SEQ ID NO: 863267 - protein, 137 aa, Homo sapiens; identical to SEQ ID NO: 863257

SEQ ID NO: 863268 - protein, 233 aa, Homo sapiens
MTVARPSVPAALPLLGELPRLLLLVLLCLPAVWGDCGLPPDVPNAQPALEGRTSFPEDTVITYKCEESFVKIPGEKDSVICLKGSQWSDIEEFCNRSCEVPTRLNSASLKQPYITQNYFPVGTVVEYECRPGYRREPSLSPKLTCLQNLKWSTAVEFCKKKSCPNPGEIRNGQIDVPGGILFGATISFSCNTGYKLFGSTSSFCLISGSSVQWSDPLPECRGPRQEYKWRSLA

SEQ ID NO: 863269 - protein, 444 aa, Homo sapiens
MTVARPSVPAALPLLGELPRLLLLVLLCLPAVWGDCGLPPDVPNAQPALEGRTSFPEDTVITYKCEESFVKIPGEKDSVICLKGSQWSDIEEFCNRSCEVPTRLNSASLKQPYITQNYFPVGTVVEYECRPGYRREPSLSPKLTCLQNLKWSTAVEFCKKKSCPNPGEIRNGQIDVPGGILFGATISFSCNTGYKLFGSTSSFCLISGSSVQWSDPLPECREIYCPAPPQIDNGIIQGERDHYGYRQSVTYACNKGFTMIGEHSIYCTVNNDEGEWSGPPPECRGKSLTSKVPPTVQKPTTVNVPTTEVSPTSQKTTTKTTTPNAQATRSTPVSRTTKHFHETTPNKGSGTTSGTTRLLSGSRPVTQAGMRWCDRSSLQSRTPGFKRSFHFSLPSSWYYRCVPRHPAKFLKFIFCRDRIFLCCPGWFQTPGRKRFFRPPKTLRL

SEQ ID NO: 863270 - protein, 381 aa, Homo sapiens; identical to SEQ ID NO: 863258

SEQ ID NO: 863271 - protein, 440 aa, Homo sapiens
MTVARPSVPAALPLLGELPRLLLLVLLCLPAVWGDCGLPPDVPNAQPALEGRTSFPEDTVITYKCEESFVKIPGEKDSVICLKGSQWSDIEEFCNRSCEVPTRLNSASLKQPYITQNYFPVGTVVEYECRPGYRREPSLSPKLTCLQNLKWSTAVEFCKKKSCPNPGEIRNGQIDVPGGILFGATISFSCNTGYKLFGSTSSFCLISGSSVQWSDPLPECREIYCPAPPQIDNGIIQGERDHYGYRQSVTYACNKGFTMIGEHSIYCTVNNDEGEWSGPPPECRGKSLTSKVPPTVQKPTTVNVPTTEVSPTSQKTTTKTTTPNAQATRSTPVSRTTKHFHETTPNKGSGTTSGTTRLLSGSRPVTQAGMRWCDRSSLQSRTPGFKRSFHFSLPSSWYYRAHVFHVDRFAWDASNHGLADLAKEELRRKYTQVYRLFLVS

SEQ ID NO: 863272 - protein, 377 aa, Homo sapiens
MTVARPSVPAALPLLGELPRLLLLVLLCLPAVWGDCGLPPDVPNAQPALEGRTSFPEDTVITYKCEESFVKIPGEKDSVICLKGSQWSDIEEFCNRSCEVPTRLNSASLKQPYITQNYFPVGTVVEYECRPGYRREPSLSPKLTCLQNLKWSTAVEFCKKKSCPNPGEIRNGQIDVPGGILFGATISFSCNTGYKLFGSTSSFCLISGSSVQWSDPLPECREIYCPAPPQIDNGIIQGERDHYGYRQSVTYACNKGFTMIGEHSIYCTVNNDEGEWSGPPPECRGKSLTSKVPPTVQKPTTVNVPTTEVSPTSQKTTTKTTTPNAQATRSTPVSRTTKHFHETTPNKGSGTTSGTTRLLSGFSPWKRRRPEASSQTS

SEQ ID NO: 863273 - protein, 410 aa, Homo sapiens
MGGQTADRSPLSTESSRVEHTMLQTCMSSLSGVAFQGGLCLENSNCEDTLIVISFSSAFVSLGDCGLPPDVPNAQPALEGRTSFPEDTVITYKCEESFVKIPGEKDSVICLKGSQWSDIEEFCNRSCEVPTRLNSASLKQPYITQNYFPVGTVVEYECRPGYRREPSLSPKLTCLQNLKWSTAVEFCKKKSCPNPGEIRNGQIDVPGGILFGATISFSCNTGYKLFGSTSSFCLISGSSVQWSDPLPECREIYCPAPPQIDNGIIQGERDHYGYRQSVTYACNKGFTMIGEHSIYCTVNNDEGEWSGPPPECRGKSLTSKVPPTVQKPTTVNVPTTEVSPTSQKTTTKTTTPNAQATRSTPVSRTTKHFHETTPNKGSGTTSGTTRLLSGHTCFTLTGLLGTLVTMGLLT

SEQ ID NO: 863274 - protein, 318 aa, Homo sapiens
MTVARPSVPAALPLLGELPRLLLLVLLCLPAVWGDCGLPPDVPNAQPALEGRTSFPEDTVITYKCEESFVKIPGEKDSVICLKGSQWSDIEEFCNRSCEVPTRLNSASLKQPYITQNYFPVGTVVEYECRPGYRREPSLSPKLTCLQNLKWSTAVEFCKKKSCPNPGEIRNGQIDVPGGILFGATISFSCNTGYKLFGSTSSFCLISGSSVQWSDPLPECRGKSLTSKVPPTVQKPTTVNVPTTEVSPTSQKTTTKTTTPNAQATRSTPVSRTTKHFHETTPNKGSGTTSGTTRLLSGHTCFTLTGLLGTLVTMGLLT

SEQ ID NO: 863275 - protein, 378 aa, Homo sapiens
MTVARPSVPAALPLLGELPRLLLLVLLCLPAVWGDCGLPPDVPNAQPALEGRTSFPEDTVITYKCEESFVKIPGEKDSVICLKGSQWSDIEEFCNRSCEVPTRLNSASLKQPYITQNYFPVGTVVEYECRPGYRREPSLSPKLTCLQNLKWSTAVEFCKKKSCPNPGEIRNGQIDVPGGILFGATISFSCNTGYKLFGSTSSFCLISGSSVQWSDPLPECREIYCPAPPQIDNGIIQGERDHYGYRQSVTYACNKGFTMIGEHSIYCTVNNDEGEWSGPPPECRGKSLTSKVPPTVQKPTTVNVPTTEVSPTSQKTTTKTTTPNAQDNTGWLIPNCDSARWGKAGQCPREHPSLHLTTCYPHAGGDISYAQPFPTAHT

SEQ ID NO: 863276 - protein, 275 aa, Homo sapiens
MTVARPSVPAALPLLGELPRLLLLVLLCLPAVWGDCGLPPDVPNAQPALEGRTSFPEDTVITYKCEESFVKIPGEKDSVICLKGSQWSDIEEFCNRSCEVPTRLNSASLKQPYITQNYFPVGTVVEYECRPGYRREPSLSPKLTCLQNLKWSTAVEFCKKKSCPNPGEIRNGQIDVPGGILFGATISFSCNTGYKLFGSTSSFCLISGSSVQWSDPLPECREIYCPAPPQIDNGIIPTACSADRALTLHCVCYFRDLHNVTSPSLGEQLEALYCQ

SEQ ID NO: 863277 - protein, 166 aa, Homo sapiens
TGGASAGLRVGAHHVLVLQLTERLRDAENESMAKIAELEKQLSQARKELETLRERFSESTAMGASRRPPEPEKAPPAAPTRPSALELKVEELEEKGLIRILRGPGDAVSIEILPVAVATPSGGDAPTPGVPTGSPSPDLAPAAEPAPGAAPPPPPPLPGLPSPQEA

SEQ ID NO: 863278 - protein, 492 aa, Homo sapiens
SSSTPSAHHCPQTPVPGVKAKKPIQTKFRMPLLNWVALKPSQITGTVFTELNDEKVLQELDMSDFEEQFKTKSQGPSLDLSALKSKAAQKAPSKATLIEANRAKNLAITLRKGNLGAERICQAIEAYDLQALGLDFLELLMRFLPTEYERSLITRFEREQRPMEELSEEDRFMLCFSRIPRLPERMTTLTFLGNFPDTAQLLMPQLNAIIAASMSIKSSDKLRQILEIVLAFGNYMNSSKRGAAYGFRLQSLDALLEMKSTDRKQTLLHYLVKVIAEKYPQLTGFHSDLHFLDKAGSVSLDSVLADVRSLQRGLELTQREFVRQDDCMVLKEFLRANSPTMDKLLADSKTAQEAFESVVEYFGENPKTTSPGLFFSLFSRFIKAYKKAEQEVEQWKKEAAAQEAGADTPGKGEPPAPKSPPKARRPQMDLISELKRRQQKEPLIYESDRDGAIEDIITDLRNQPYIRADTGRRSARRRPPGPPLQVTSDLSL

SEQ ID NO: 863279 - protein, 589 aa, Homo sapiens
PPPPGTDGPVPPPPPPPPPPPGGPPDALGRRDSELGPGVKAKKPIQTKFRMPLLNWVALKPSQITGTVFTELNDEKVLQELDMSDFEEQFKTKSQGPSLDLSALKSKAAQKAPSKATLIEANRAKNLAITLRKGNLGAERICQAIEAYDLQALGLDFLELLMRFLPTEYERSLITRFEREQRPMEELSEEDRFMLCFSRIPRLPERMTTLTFLGNFPDTAQLLMPVWAERAGRCDLGGDGQEATPSLGCGREPGSTSASRWRRLQLILPPPSHPQQLNAIIAASMSIKSSDKLRQILEIVLAFGNYMNSSKRGAAYGFRLQSLDAVRRGPWLGDWGWGLAGGLWLTMGPVQLLEMKSTDRKQTLLHYLVKVIAEKYPQLTGFHSDLHFLDKAGSVSLDSVLADVRSLQRGLELTQREFVRQDDCMVLKEFLRANSPTMDKLLADSKTAQEAFESVVEYFGENPKTTSPGLFFSLFSRFIKAYKKAEQEVEQWKKEAAAQEAGADTPGKGEPPAPKSPPKARRPQMDLISELKRRQQKEPLIYESDRDGAIEDIITDLRNQPYIRADTGRRSARRRPPGPPLQVTSDLSL

SEQ ID NO: 863280 - protein, 648 aa, Homo sapiens
SSSTPSAHHCPQTPVPGVKAKKPIQTKFRMPLLNWVALKPSQITGTVFTELNDEKVLQELDMSDFEEQFKTKSQGPSLDLSALKSKAAQKAPSKATLIEANRAKNLAITLRKGNLGAERICQAIEAWCPCPGFVGSPAPLLGWGCQADPSKRASMVSSFIRLHTNPGPGNCPHFKVEKTQSMPKLGCPTSSLPLCLAVSTQAVGFTAGRPPLTYDGDPGCPVSQFLWIPSSQFLWIPTSCSLKLLANRNTEIHLFNQGRGSPAPRDWWVWMMPNLPSPPSHRYDLQALGLDFLELLMRFLPTEYERSLITRFEREQRPMEELSEEDRFMLCFSRIPRLPERMTTLTFLGNFPDTAQLLMPQLNAIIAASMSIKSSDKLRQILEIVLAFGNYMNSSKRGAAYGFRLQSLDALLEMKSTDRKQTLLHYLVKVIAEKYPQLTGFHSDLHFLDKAGSVSLDSVLADVRSLQRGLELTQREFVRQDDCMVLKEFLRANSPTMDKLLADSKTAQEAFESVVEYFGENPKTTSPGLFFSLFSRFIKAYKKAEQEVEQWKKEAAAQEAGADTPGKGEPPAPKSPPKARRPQMDLISELKRRQQKEPLIYESDRDGAIEDIITDLRNQPYIRADTGRRSARRRPPGPPLQVTSDLSL

SEQ ID NO: 863281 - protein, 235 aa, Homo sapiens [sequence omitted]

SEQ ID NO: 863282 - protein, 479 aa, Homo sapiens
PPPPGTDGPVPPPPPPPPPPPGGPPDALGRRDSELGPGVKAKKPIQTKFRMPLLNWVALKPSQITGTVFTELNDEKVLQELDMSDFEEQFKTKSQGPSLDLSALKSKAAQKAPSKATLIEANRAKNLAITLRKGNLGAERICQAIEAYDLQALGLDFLELLMRFLPTEYERSLITRFEREQRPMEELSEEDRFMLCFSRIPRLPERMTTLTFLGNFPDTAQLLMPQLNAIIAASMSIKSSDKLRQILEIVLAFGNYMNSSKRGAAYGFRLQSLDALLEMKSTDRKQTLLHYLVKVIAEKYPQLTGFHSDLHFLDKAGSVSLDSVLADVRSLQRGLELTQREFVRQDDCMVLKEFLRANSPTMDKLLADSKTAQKAEQEVEQWKKEAAAQEAGADTPGKGEPPAPKSPPKARRPQMDLISELKRRQQKEPLIYESDRDGAIEDIITDLRNQPYIRADTGRRSARRRPPGPPLQVTSDLSL

SEQ ID NO: 863283 - protein, 533 aa, Homo sapiens
PPPPGTDGPVPPPPPPPPPPPGGPPDALGRRDSELGPGVKAKKPIQTKFRMPLLNWVALKPSQITGTVFTELNDEKVLQELDMSDFEEQFKTKSQGPSLDLSALKSKAAQKAPSKATLIEANRAKNLAITLRKGNLGAERICQAIEAYDLQALGLDFLELLMRFLPTEYERSLITRFEREQRPMEELSEEDRFMLCFSRIPRLPERMTTLTFLGNFPDTAQLLMPQLNAIIAASMSIKSSDKLRQILEIVLAFGNYMNSSKRGAAYGFRLQSLDALLEMKSTDRKQTLLHYLVKVIAEKYPQLTGFHSDLHFLDKAGSVSLDSVLADVRSLQRGLELTQREFVRQDDCMVLKEFLRANSPTMDKLLADSKTAQKAEQEVEQWKKEAAAQEAGADTPGKGEPPAPKSPPKARRPQMDLISELKRRQQKEPLIYESDRDGAIEDIITGKGLARPWSYPQSVLLCFLLTQCAILWGTGCHTASCYLFCFSFLFPFSTPLHLPHPHSVIKTVPFTARTGKRTSRLLCEASLGEEMPL

SEQ ID NO: 863284 - protein, 455 aa, Homo sapiens
PPPPGTDGPVPPPPPPPPPPPGGPPDALGRRDSELGPGVKAKKPIQTKFRMPLLNWVALKPSQITGTVFTELNDEKVLQELDMSDFEEQFKTKSQGPSLDLSALKSKAAQKAPSKATLIEANRAKNLAITLRKGNLGAERICQAIEAYDLQALGLDFLELLMRFLPTEYERSLITRFEREQRPMEELSEEDRFMLCFSRIPRLPERMTTLTFLGNFPDTAQLLMPQLNAIIAASMSIKSSDKLRQILEIVLAFGNYMNSSKRGAAYGFRLQSLDALLEMKSTDRKQTLLHYLVKVIAEKYPQLTGFHSDLHFLDKAGSVSLDSVLADVRSLQRGLELTQREFVRQDDCMVLKEFLRANSPTMDKLLADSKTAQEAFESVVEYFGENPKTTSPGLFFSLFSRFIKAYKKAEQEVEQWKKEAAAQEAGADTPGKGEPPAPKVGNCSWAWYWAAGMHG

SEQ ID NO: 863285 - protein, 423 aa, Homo sapiens
PPPPGTDGPVPPPPPPPPPPPGGPPDALGRRDSELGPGVKAKKPIQTKFRMPLLNWVALKPSQITGTVFTELNDEKVLQELDMSDFEEQFKTKSQGPSLDLSALKSKAAQKAPSKATLIEANRAKNLAITLRKGNLGAERICQAIEAYDLQALGLDFLELLMRFLPTEYERSLITRFEREQRPMEELSEEDRFMLCFSRIPRLPERMTTLTFLGNFPDTAQLLMPQLNAIIAASMSIKSSDKLRQILEIVLAFGNYMNSSKRGAAYGFRLQSLDALLEMKSTDRKQTLLHYLVKVIAEKYPQLTGFHSDLHFLDKAGSVSLDSVLADVRSLQRGLELTQREFVRQDDCMVLKEFLRANSPTMDKLLADSKTAQEAFESVVEYFGENPKTTSPGLFFSLFSRFIKAYKVFGSGAGWEPCRALKP

SEQ ID NO: 863286 - protein, 389 aa, Homo sapiens
PPPPGTDGPVPPPPPPPPPPPGGPPDALGRRDSELGPGVKAKKPIQTKFRMPLLNWVALKPSQITGTVFTELNDEKVLQELDMSDFEEQFKTKSQGPSLDLSALKSKAAQKAPSKATLIEANRAKNLAITLRKGNLGAERICQAIEAYDLQALGLDFLELLMRFLPTEYERSLITRFEREQRPMEELSEEDRFMLCFSRIPRLPERMTTLTFLGNFPDTAQLLMPQLNAIIAASMSIKSSDKLRQILEIVLAFGNYMNSSKRGAAYGFRLQSLDALLEMKSTDRKQTLLHYLVKVIAEKYPQLTGFHSDLHFLDKAGSVSLDSVLADVRSLQRGLELTQREFVRQDDCMVLKEFLRANSPTMDKLLADSKTAQVRQGWPHLEVGHVGAL

SEQ ID NO: 863287 - protein, 116 aa, Homo sapiens [sequence omitted]

SEQ ID NO: 863288 - protein, 450 aa, Homo sapiens
PPPPGTDGPVPPPPPPPPPPPGGPPDALGRRDSELGPGVKAKKPIQTKFRMPLLNWVALKPSQITGTVFTELNDEKVLQELDMSDFEEQFKTKSQGPSLDLSALKSKAAQKAPSKATLIEANRAKNLAITLRKGNLGAERICQAIEAYDLQALGLDFLELLMRFLPTEYERSLITRFEREQRPMEELSEEDRFMLCFSRIPRLPERMTTLTFLGNFPDTAQLLMPVWAERAGRCDLGGDGQEATPSLGCGREPGSTSASRWRRLQLILPPPSHPQQLNAIIAASMSIKSSDKLRQILEIVLAFGNYMNSSKRGAAYGFRLQSLDALLEMKSTDRKQTLLHYLVKVIAEKYPQLTGFHSDLHFLDKAGSVSLDSVLADVRSLQRGLELTQREFVRQDDCMVLKEFLRANSPTMDKLLADSKTAQEAFESVVEYFGENPKGSFETIAGGPSQ

SEQ ID NO: 863289 - protein, 337 aa, Homo sapiens
LTPAHSRKALRNSRIVSQKDDVHVCIMCLRAIMNYQSGFSLVMNHPACVNEIALSLNNKNPRTKALVLELLAAVCLVRGGHDIILAAFDNFKEVCGEQHRFEKLMEYFRNEDSNIDFMVACMQFINIVVHSVENMNFRVFLQYEFTHLGLDLYLERLRLTESDKLQVQIQAYLDNIFDVGALLEDTETKNAVLEHMEELQEQVALLTERLRDAENESMAKIAELEKQLSQARKELETLRERFSESTAMGASRRPPEPEKAPPAAPTRPSALELKVEELEEKGLIRILRGPGDAVSIEILPVAVATPSGGDAPTPGVPTGSPSPDLAPTDPMPTGSSR

SEQ ID NO: 863290 - protein, 352 aa, Homo sapiens
LTPAHSRKALRNSRIVSQKDDVHVCIMCLRAIMNYQSGFSLVMNHPACVNEIALSLNNKNPRTKALVLELLAAVCLVRGGHDIILAAFDNFKEVCGEQHRFEKLMEYFRNEDSNIDFMVACMQFINIVVHSVENMNFRVFLQYEFTHLGLDLYLERLRLTESDKLQVQIQAYLDNIFDVGALLEDTETKNAVLEHMEELQEQVALLTERLRDAENESMAKIAELEKQLSQARKELETLRERFSESTAMGASRRPPEPEKAPPAAPTRPSALELKVEELEEKGLIRILRGPGDAVSIEILPVAVATPSGGDAPTPGVPTGSPSPDLAPAAEPAPGAAPPPPPPLPGLPSPQEA

SEQ ID NO: 863291 - protein, 142 aa, Homo sapiens
MEELQEQVALLTERLRDAENESMAKIAELEKQLSQARKELETLRERFSESTAMGASRRPPEPEKAPPAAPTRPSALELKVEELEEKGLIRILRGPGDAVSIEILPVAVATPSGGDAPTPGVPTGSPSPDLAPTDPMPTGSSR

SEQ ID NO: 863292 - protein, 513 aa, Homo sapiens
PPPPGTDGPVPPPPPPPPPPPGGPPDALGRRDSELGPGVKAKKPIQTKFRMPLLNWVALKPSQITGTVFTELNDEKVLQELDMSDFEEQFKTKSQGPSLDLSALKSKAAQKAPSKATLIEANRAKNLAITLRKGNLGAERICQAIEAYDLQALGLDFLELLMRFLPTEYERSLITRFEREQRPMEELSEEDRFMLCFSRIPRLPERMTTLTFLGNFPDTAQLLMPQLNAIIAASMSIKSSDKLRQILEIVLAFGNYMNSSKRGAAYGFRLQSLDALLEMKSTDRKQTLLHYLVKVIAEKYPQLTGFHSDLHFLDKAGSVSLDSVLADVRSLQRGLELTQREFVRQDDCMVLKEFLRANSPTMDKLLADSKTAQEAFESVVEYFGENPKTTSPGLFFSLFSRFIKAYKKAEQEVEQWKKEAAAQEAGADTPGKGEPPAPKSPPKARRPQMDLISELKRRQQKEPLIYESDRDGAIEDIITDLRNQPYIRADTGRRSARRRPPGPPLQVTSDLSL

SEQ ID NO: 863293 - protein, 450 aa, Homo sapiens
PDPSPTQLRLLTLYLQELDMSDFEEQFKTKSQGPSLDLSALKSKAAQKAPSKATLIEANRAKNLAITLRKGNLGAERICQAIEAYDLQALGLDFLELLMRFLPTEYERSLITRFEREQRPMEELSEEDRFMLCFSRIPRLPERMTTLTFLGNFPDTAQLLMPQLNAIIAASMSIKSSDKLRQILEIVLAFGNYMNSSKRGAAYGFRLQSLDALLEMKSTDRKQTLLHYLVKVIAEKYPQLTGFHSDLHFLDKAGSVSLDSVLADVRSLQRGLELTQREFVRQDDCMVLKEFLRANSPTMDKLLADSKTAQEAFESVVEYFGENPKTTSPGLFFSLFSRFIKAYKKAEQEVEQWKKEAAAQEAGADTPGKGEPPAPKSPPKARRPQMDLISELKRRQQKEPLIYESDRDGAIEDIITDLRNQPYIRADTGRRSARRRPPGPPLQVTSDLSL

SEQ ID NO: 863294 - protein, 539 aa, Homo sapiens
PPPPGTDGPVPPPPPPPPPPPGGPPDALGRRDSELGPGVKAKKPIQTKFRMPLLNWVALKPSQITGTVFTELNDEKVLQELDMSDFEEQFKTKSQGPSLDLSALKSKAAQKAPSKATLIEANRAKNLAITLRKGNLGAERICQAIEAYDLQALGLDFLELLMRFLPTEYERSLITRFEREQRPMEELSEEDRFMLCFSRIPRLPERMTTLTFLGNFPDTAQLLMPQLNAIIAASMSIKSSDKLRQILEIVLAFGNYMNSSKRGAAYGFRLQSLDAVRRGPWLGDWGWGLAGGLWLTMGLVQLLEMKSTDRKQTLLHYLVKVIAEKYPQLTGFHSDLHFLDKAGSVSLDSVLADVRSLQRGLELTQREFVRQDDCMVLKEFLRANSPTMDKLLADSKTAQEAFESVVEYFGENPKTTSPGLFFSLFSRFIKAYKKAEQEVEQWKKEAAAQEAGADTPGKGEPPAPKSPPKARRPQMDLISELKRRQQKEPLIYESDRDGAIEDIITDLRNQPYIRADTGRRSARRRPPGPPLQVTSDLSL

SEQ ID NO: 863295 - protein, 275 aa, Homo sapiens
VYDSDLSLMIVVCFRLMYMNSSKRGAAYGFRLQSLDALLEMKSTDRKQTLLHYLVKVIAEKYPQLTGFHSDLHFLDKAGSVSLDSVLADVRSLQRGLELTQREFVRQDDCMVLKEFLRANSPTMDKLLADSKTAQEAFESVVEYFGENPKTTSPGLFFSLFSRFIKAYKKAEQEVEQWKKEAAAQEAGADTPGKGEPPAPKSPPKARRPQMDLISELKRRQQKEPLIYESDRDGAIEDIITDLRNQPYIRADTGRRSARRRPPGPPLQVTSDLSL

SEQ ID NO: 863296 - protein, 567 aa, Homo sapiens
PPPPGTDGPVPPPPPPPPPPPGGPPDALGRRDSELGPGVKAKKPIQTKFRMPLLNWVALKPSQITGTVFTELNDEKVLQELDMSDFEEQFKTKSQGPSLDLSALKSKAAQKAPSKATLIEANRAKNLAITLRKGNLGAERICQAIEAYDLQALGLDFLELLMRFLPTEYERSLITRFEREQRPMEELSEEDRFMLCFSRIPRLPERMTTLTFLGNFPDTAQLLMPQLNAIIAASMSIKSSDKLRQILEIVLAFGNYMNSSKRGAAYGFRLQSLDALLEMKSTDRKQTLLHYLVKVIAEKYPQLTGFHSDLHFLDKAGSVSLDSVLADVRSLQRGLELTQREFVRQDDCMVLKEFLRANSPTMDKLLADSKTAQEAFESVVEYFGENPKTTSPGLFFSLFSRFIKAYKKAEQEVEQWKKEAAAQEAGADTPGKGEPPAPKSPPKARRPQMDLISELKRRQQKEPLIYESDRDGAIEDIITGKGLARPWSYPQSVLLCFLLTQCAILWGTGCHTASCYLFCFSFLFPFSTPLHLPHPHSVIKTVPFTARTGKRTSRLLCEASLGEEMPL

SEQ ID NO: 863297 - protein, 509 aa, Homo sapiens
PPPPGTDGPVPPPPPPPPPPPGGPPDALGRRDSELGPGVKAKKPIQTKFRMPLLNWVALKPSQITGTVFTELNDEKVLQELDMSDFEEQFKTKSQGPSLDLSALKSKAAQKAPSKATLIEANRAKNLAITLRKGNLGAERICQAIEAYDLQALGLDFLELLMRFLPTEYERSLITRFEREQRPMEELSEEDRFMLCFSRIPRLPERMTTLTFLGNFPDTAQLLMPQLNAIIAASMSIKSSDKLRQILEIVLAFGNYMNSSKRGAAYGFRLQSLDALLEMKSTDRKQTLLHYLVKVIAEKYPQLTGFHSDLHFLDKAGSVSLDSVLADVRSLQRGLELTQREFVRQDDCMVLKEFLRANSPTMDKLLADSKTAQEAFESVVEYFGENPKTTSPGLFFSLFSRFIKAYKKAEQEVEQWKKEAAAQEAGADTPGKGEPPAPKSPPKARRPQMDLISELKRRQQKEPLIYESDRDGAIEDIITVIKTVPFTARTGKRTSRLLCEASLGEEMPL

SEQ ID NO: 863298 - protein, 165 aa, Homo sapiens [sequence omitted]

SEQ ID NO: 863299 - protein, 156 aa, Homo sapiens
QAVRGLSWGADRLCPQEAFESVVEYFGENPKTTSPGLFFSLFSRFIKAYKKAEQEVEQWKKEAAAQEAGADTPGKGEPPAPKSPPKARRPQMDLISELKRRQQKEPLIYESDRDGAIEDIITDLRNQPYIRADTGRRSARRRPPGPPLQVTSDLSL

SEQ ID NO: 863300 - protein, 111 aa, Homo sapiens
MGPLKTSSQICGTSPTSAQTQAAAVPVGVPRAPHCRSPPTSRCSRYFCRWILQGCGAVDRLRLKEGGPQLGWPGSPSSAVARLKRAGASSSWPQRAASPAPSPKCCLQHPP

SEQ ID NO: 863301 - protein, 335 aa, Homo sapiens
PPPPGTDGPVPPPPPPPPPPPGGPPDALGRRDSELGPGVKAKKPIQTKFRMPLLNWVALKPSQITGTVFTELNDEKVLQELDMSDFEEQFKTKSQGPSLDLSALKSKAAQKAPSKATLIEANRAKNLAITLRKGNLGAERICQAIEAYDLQALGLDFLELLMRFLPTEYERSLITRFEREQRPMEELSEEDRFMLCFSRIPRLPERMTTLTFLGNFPDTAQLLMPQLNAIIAASMSIKSSDKLRQILEIVLAFGNYMNSSKRGAAYGFRLQSLDALLEMKSTDRKQTLLHYLVKVIAEKYPQLTGFHSDLHFLDKAGSGRRHTDPWVWGGAVGWG

SEQ ID NO: 863302 - protein, 262 aa, Homo sapiens
PPPPGTDGPVPPPPPPPPPPPGGPPDALGRRDSELGPGVKAKKPIQTKFRMPLLNWVALKPSQITGTVFTELNDEKVLQELDMSDFEEQFKTKSQGPSLDLSALKSKAAQKAPSKATLIEANRAKNLAITLRKGNLGAERICQAIEAYDLQALGLDFLELLMRFLPTEYERSLITRFEREQRPMEELSEEDRFMLCFSRIPRLPERMTTLTFLGNFPDTAQLLMPQLNAIIAASMSIKSSDKLRQILEVRGQEVGPTLACSG

SEQ ID NO: 863303 - protein, 357 aa, Homo sapiens
LTPAHSRKALRNSRIVSQKDDVHVCIMCLRAIMNYQSGFSLVMNHPACVNEIALSLNNKNPRTKALVLELLAAVCLVRGGHDIILAAFDNFKEVCGEQHRFEKLMEYFRNEDSNIDFMVACMQFINIVVHSVENMNFRVFLQYEFTHLGLDLYLERLRLTESDKLQVQIQAYLDNIFDVGALLEDTETKNAVLEHMEELQEQVALLTERLRDAENESMAKIAELEKQLSQARKELETLRERFSESTAMGASRRPPEPEKAPPAAPTRPSALELKVEELEEKGLIRILRGPGDAVSIEILPVAVATPSGGDAPTPGVPTGSPSPGAQELQAGGDAGQGLEGSPGASVAGRVGRGRFGL

SEQ ID NO: 863304 - protein, 163 aa, Homo sapiens
SSSTPSAHHCPQTPVPGVKAKKPIQTKFRMPLLNWVALKPSQITGTVFTELNDEKVLQELDMSDFEEQFKTKSQGPSLDLSALKSKAAQKAPSKATLIEANRAKNLAITLRKGNLGAERICQAIEAYDLQALGLDFLELLMRFLPTEYERSLITLKPPPNSHT

SEQ ID NO: 863305 - protein, 299 aa, Homo sapiens
LTPAHSRKALRNSRIVSQKDDVHVCIMCLRAIMNYQSGFSLVMNHPACVNEIALSLNNKNPRTKALVLELLAAVCLVRGGHDIILAAFDNFKEVCGEQHRFEKLMEYFRNEDSNIDFMVACMQFINIVVHSVENMNFRVFLQYEFTHLGLDLYLERLRLTESDKLQVQIQAYLDNIFDVGALLEDTETKNAVLEHMEELQEQVALLTERLRDAENESMAKIAELEKQLSQARKELETLRERFSESTAMGASRRPPEPEKAPPAAPTRPSALELKVEELEEKGLIRKPQPRGPSMDLIFI

SEQ ID NO: 863306 - protein, 74 aa, Homo sapiens
SSSTPSAHHCPQTPVPGVKAKKPIQTKFRMPLLNWVALKPSQITGTVFTELNDEKVLQVSGPAWLPMWAPEEEG

SEQ ID NO: 863307 - protein, 152 aa, Homo sapiens
MANLERTFIAIKPDGVQRGLVGEIIKRFEQKGFRLVAMKFLRASEEHLKQHYIDLKDRPFFPGLVKYMNSGPVVAMVWEGLNVVKTGRVMLGETNPADSKPGTIRGDFCIQVGRNIIHGSDSVKSAEKEISLWFKPEELVDYKSCAHDWVYE

SEQ ID NO: 863308 - protein, 95 aa, Homo sapiens
  misc_feature (17)..(17): Xaa can be any naturally occurring amino acid
IRSVMYLSILYPTPHKXPRVWEGLNVVKTGRVMLGETNPADSKPGTIRGDFCIQVGRNIIHGSDSVKSAEKEISLWFKPEELVDYKSCAHDWVYE

SEQ ID NO: 863309 - protein, 152 aa, Homo sapiens; identical to SEQ ID NO: 863307

SEQ ID NO: 863310 - protein, 152 aa, Homo sapiens; identical to SEQ ID NO: 863307

SEQ ID NO: 863311 - protein, 152 aa, Homo sapiens; identical to SEQ ID NO: 863307

SEQ ID NO: 863312 - protein, 152 aa, Homo sapiens; identical to SEQ ID NO: 863307

SEQ ID NO: 863313 - protein, 152 aa, Homo sapiens; identical to SEQ ID NO: 863307

SEQ ID NO: 863314 - protein, 152 aa, Homo sapiens; identical to SEQ ID NO: 863307

SEQ ID NO: 863315 - protein, 202 aa, Homo sapiens
KWALRQRICAEAFRACKCCEPRGSRARFGCWRLQPEFKPKQLEGTMANCERTFIAIKPDGVQRGLVGEIIKRFEQKGFRLVGLKFMQMKFLRASEEHLKQHYIDLKDRPFFPGLVKYMNSGPVVAMVWEGLNVVKTGRVMLGETNPADSKPGTIRGDFCIQVGRNIIHGSDSVKSAEKEISLWFKPEELVDYKSCAHDWVYE

SEQ ID NO: 863316 - protein, 152 aa, Homo sapiens; identical to SEQ ID NO: 863307

SEQ ID NO: 863317 - protein, 152 aa, Homo sapiens; identical to SEQ ID NO: 863307

SEQ ID NO: 863318 - protein, 152 aa, Homo sapiens; identical to SEQ ID NO: 863307

SEQ ID NO: 863319 - protein, 258 aa, Homo sapiens
KWALRQRICAEAFRACKCCEPRGSRARFGCWRLQPEFKPKQLEGTMANCERTFIAIKPDGVQRGLVGEIIKRFEQKGFRLVGLKFMQASEDLLKEHYVDLKDRPFFAGLVKYMHSGPVVAMVWEGLNVVKTGRVMLGETNPADSKPGTIRGDFCIQVGRTMANLERTFIAIKPDGVQRGLVGEIIKRFEQKGFRLVAMKFLRASEEHLKQHYIDGLGGAERGEDRPSDAWGDQSSRFKARHHSWGLLHSGWQEHHSWQ

SEQ ID NO: 863320 - protein, 94 aa, Homo sapiens
AAAYYYYYYYFKFAAASTVWEGLNVVKTGRVMLGETNPADSKPGTIRGDFCIQVGRNIIHGSDSVKSAEKEISLWFKPEELVDYKSCAHDWVYE

SEQ ID NO: 863321 - protein, 216 aa, Homo sapiens
KWALRQRICAEAFRACKCCEPRGSRARFGCWRLQPEFKPKQLEGTMANCERTFIAIKPDGVQRGLVGEIIKRFEQKGFRLVGLKFMQVWEGLNVVKTGRVMLGETNPADSKPGTIRGDFCIQVGRTMANLERTFIAIKPDGVQRGLVGEIIKRFEQKGFRLVAMKFLRASEEHLKQHYIDLKDRPFFPGLVKYMNSGPVVAMVWEGELNVGERQAE

SEQ ID NO: 863322 - protein, 242 aa, Homo sapiens
KWALRQRICAEAFRACKCCEPRGSRARFGCWRLQPEFKPKQLEGTMANCERTFIAIKPDGVQRGLVGEIIKRFEQKGFRLVGLKFMQASEDLLKEHYVDLKDRPFFAGLVKYMHSGPVVAMVWEGLNVVKTGRVMLGETNPADSKPGTIRGDFCIQVGRTMANLERTFIAIKPDGVQRGLVGEIIKRFEQKGFRLVAMKFLRASEEHLKQHYIDLKDRPFFPGLVKYMNSGPVVAMEHHSWQ

SEQ ID NO: 863323 - protein, 178 aa, Homo sapiens
  misc_feature (135)..(135): Xaa can be any naturally occurring amino acid
  misc_feature (147)..(147): Xaa can be any naturally occurring amino acid
  misc_feature (159)..(159): Xaa can be any naturally occurring amino acid
MLSRGAPNYRTPPFFVKKEGAIRGGGVNNQPRTRGRGNKPARVEGHTLACGVNSVGRGETPPSRGRGAHQVAGTPPHPKKESKYRERTAEATQLTKNVGARCYSVRVSHNTRGPLILVSSRSRSQNKLVLHQPEXMRNYGTQSFFPXPCAARLVNVAGXPSTKSQNQDSLPDNSYGKE

SEQ ID NO: 863324 - protein, 178 aa, Homo sapiens; identical to SEQ ID NO: 863323
  misc_feature (135)..(135): Xaa can be any naturally occurring amino acid
  misc_feature (147)..(147): Xaa can be any naturally occurring amino acid
  misc_feature (159)..(159): Xaa can be any naturally occurring amino acid

SEQ ID NO: 863325 - protein, 233 aa, Homo sapiens
KWALRQRICAEAFRACKCCEPRGSRARFGCWRLQPEFKPKQLEGTMANCERTFIAIKPDGVQRGLVGEIIKRFEQKGFRLVGLKFMQASEDLLKEHYVDLKDRPFFAGLVKYMHSGPVVAMVWEGLNVVKTGRVMLGETNPADSKPGTIRGDFCIQVGRTMANLERTFIAIKPDGVQRGLVGEIIKRFEQKGFRLVAMKFLRASEEHLKQHYIDLTYNSKVKCFTFGEVFDYH

SEQ ID NO: 863326 - protein, 152 aa, Homo sapiens; identical to SEQ ID NO: 863307

SEQ ID NO: 863327 - protein, 150 aa, Homo sapiens
MANLERTFIAIKPDGVQRGLVGEIIKRFEQKGFRLVAMKFLRASEEHLKQHYIDLKDRPFFPGLVKYMNSGPVVAMVWEGLNVVKTGRVMLGETNPADSKPGTIRGDFCIQVGRNIIHGSDSVKSAEKEISLWFKPEELVDYKSCAHTGL

SEQ ID NO: 863328 - protein, 152 aa, Homo sapiens; identical to SEQ ID NO: 863307

SEQ ID NO: 863329 - protein, 152 aa, Homo sapiens; identical to SEQ ID NO: 863307

SEQ ID NO: 863330 - protein, 312 aa, Homo sapiens
KWALRQRICAEAFRACKCCEPRGSRARFGCWRLQPEFKPKQLEGTMANCERTFIAIKPDGVQRGLVGEIIKRFEQKGFRLVGLKFMQASEDLLKEHYVDLKDRPFFAGLVKYMHSGPVVAMVWEGLNVVKTGRVMLGETNPADSKPGTIRGDFCIQVGRTMANLERTFIAIKPDGVQRGLVGEIIKRFEQKGFRLVAMKFLRASEEHLKQHYIDLKDRPFFPGLVKYMNSGPVVAMVWEGLNVVKTGRVMLGETNPADSKPGTIRGDFCIQVGRNIIHGSDSVKSAEKEISLWFKPEELVDYKSCAHDWVYE

SEQ ID NO: 863331 - protein, 152 aa, Homo sapiens; identical to SEQ ID NO: 863307

SEQ ID NO: 863332 - protein, 152 aa, Homo sapiens; identical to SEQ ID NO: 863307

SEQ ID NO: 863333 - protein, 152 aa, Homo sapiens; identical to SEQ ID NO: 863307

SEQ ID NO: 863334 - protein, 152 aa, Homo sapiens; identical to SEQ ID NO: 863307

SEQ ID NO: 863335 - protein, 299 aa, Homo sapiens
KWALRQRICAEAFRACKCCEPRGSRARFGCWRLQPEFKPKQLEGTMANCERTFIAIKPDGVQRGLVGEIIKRFEQKGFRLVGLKFMQASEDLLKEHYVDLKDRPFFAGLVKYMHSGPVVAMVWEGLNVVKTGRVMLGETNPADSKPGTIRGDFCIQVGRTMANLERTFIAIKPDGVQRGLVGEIIKRFEQKGFRLVAMKFLRASEEHLKQHYIDLKDRPFFPGVWEGLNVVKTGRVMLGETNPADSKPGTIRGDFCIQVGRNIIHGSDSVKSAEKEISLWFKPEELVDYKSCAHDWVYE

SEQ ID NO: 863336 - protein, 152 aa, Homo sapiens; identical to SEQ ID NO: 863307

SEQ ID NO: 863337 - protein, 85 aa, Homo sapiens
IKKTKTPPFSLRRADLVKTGRVMLGETNPADSKPGTIRGDFCIQVGRNIIHGSDSVKSAEKEISLWFKPEELVDYKSCAHDWVYE

SEQ ID NO: 863338 - protein, 178 aa, Homo sapiens; identical to SEQ ID NO: 863323
  misc_feature (135)..(135): Xaa can be any naturally occurring amino acid
  misc_feature (147)..(147): Xaa can be any naturally occurring amino acid
  misc_feature (159)..(159): Xaa can be any naturally occurring amino acid

SEQ ID NO: 863339 - protein, 237 aa, Homo sapiens
KWALRQRICAEAFRACKCCEPRGSRARFGCWRLQPEFKPKQLEGTMANCERTFIAIKPDGVQRGLVGEIIKRFEQKGFRLVGLKFMQASEDLLKEHYVDLKDRPFFAGLVKYMHSGPVVAMVWEGLNVVKTGRVMLGETNPADSKPGTIRGDFCIQVGRTMANLERTFIAIKPDGVQRGLVGEIIKRFEQKGFRLVAMKFLRASEEHLKQHYIDLKDRPFFPGLVKYMNSGPVVAME

SEQ ID NO: 863340 - protein, 178 aa, Homo sapiens; identical to SEQ ID NO: 863323
  misc_feature (135)..(135): Xaa can be any naturally occurring amino acid
  misc_feature (147)..(147): Xaa can be any naturally occurring amino acid
  misc_feature (159)..(159): Xaa can be any naturally occurring amino acid

SEQ ID NO: 863341 - protein, 100 aa, Homo sapiens
WTQPKAEDPWPTKLIFELSPPSPALTCDPRPFGAPLTQLARSRTQTMFPVKVKVEKSELEMAKARNQLDAVLQCLLEKSHMDRERLDEEAGKTPSDTHNK

SEQ ID NO: 863342 - protein, 232 aa, Homo sapiens
MAKARNQLDAVLQCLLEKSHMDRERLDEEAGKTPSDTHNKDCSIAATGKRPSARFPHQRRKKRREMDDGLAEGGPQRSNTYVIKLFDRSVDLAQFSENTPLYPICRAWMRNSPSVRERECSPSSPLPPLPEDEEGSEVTNSKSRDVYKLPPPTPPGPPGDACRSRIPSPLQPEMQGTPDDEPSEPEPSPSTLIYRNMQRWKRIRQRWKEASHRNQLRYSESMKILREMYERQ

SEQ ID NO: 863343 - protein, 167 aa, Homo sapiens
MDDGLAEGGPQRSNTYVIKLFDRSVDLAQFSENTPLYPICRAWMRNSPSVRERECSPSSPLPPLPEDEEGSEVTNSKSRDVYKLPPPTPPGPPGDACRSRIPSPLQPEMQGTPDDEPSEPEPSPSTLIYRNMQRWKRIRQRWKEASHRNQLRYSESMKILREMYERQ

SEQ ID NO: 863344 - protein, 167 aa, Homo sapiens; identical to SEQ ID NO: 863343

SEQ ID NO: 863345 - protein, 167 aa, Homo sapiens; identical to SEQ ID NO: 863343

SEQ ID NO: 863346 - protein, 230 aa, Homo sapiens
NEAVNRARVPVGVLLEKSHVQERLDEEAGKTPSDTHNKDCSIAATGKRPSARFPHQRRKKRREMDDGLAEGGPQRSNTYVIKLFDRSVDLAQFSENTPLYPICRAWMRNSPSVRERECSPSSPLPPLPEDEEGSEVTNSKSRDVYKLPPPTPPGPPGDACRSRIPSPLQPEMQGTPDDEPSEPEPSPSTLIYRNMQRWKRIRQRWKEASHRNQLRYSESMKILREMYERQ

SEQ ID NO: 863347 - protein, 124 aa, Homo sapiens
MRNSPSVRERECSPSSPLPPLPEDEEGSEVTNSKSRDVYKLPPPTPPGPPGDACRSRIPSPLQPEMQGTPDDEPSEPEPSPSTLIYRNMQRWKRIRQRWKEASHRNQLRYSESMKILREMYERQ

SEQ ID NO: 863348 - protein, 129 aa, Homo sapiens
MNLERVSNEEKLNLCRKYYLGGFAFLPFLWLVNIFWFFREAFLVPAYTEQSQIKGYVWRSAVGFLFWVIVLTSWITIFQIYRLHILGPCLFSQDRLLKAEEPVLGAPSQTPKTCFHVPRSLLTSPNKGP

SEQ ID NO: 863349 - protein, 224 aa, Homo sapiens
WTQPKAEDPWPTKLIFELSPPSPALTCDPRPFGAPLTQLARSRTQTMFPVKVKVEKSELEMAKARNQLDAVLQCLLEKSHMDRERLDEEAGKTPSDTHNKDCSIAATGKRPSARFPHQRRKKRREMDDGLAEGGPQRSNTYVIKLFDRSVDLAQFSENTPLYPICRAWMRNSPSVRERECSPSSPLPPLPEDEEVGWVVGPSPAAWCQGSGWIGSKDPAPKLVG

SEQ ID NO: 863350 - protein, 141 aa, Homo sapiens
MDDGLAEGGPQRSNTYVIKLFDRSVDLAQFSENTPLYPICRAWMRNSPSVRERECSPSSPLPPLPEDEEGSEVTNSKSRDVYKLPPPTPPGPPGDACRSRIPSPLQPEMQGTPDDEPSEPEPSPSTLIYRNMQRWKRIRQR

SEQ ID NO: 863351 - protein, 163 aa, Homo sapiens
MAKARNQLDAVLQCLLEKSHMDRERLDEEAGKTPSDTHNKDCSIAATGKRPSARFPHQRRKKRREMDDGLAEGGPQRSNTYVIKLFDRSVDLAQFSENTPLYPICRAWMRNSPSVRERECSPSPLSPSPHPPHSSIATCSAGNASARGGRRPLIGTSFVTQKA

SEQ ID NO: 863352 - protein, 292 aa, Homo sapiens
WTQPKAEDPWPTKLIFELSPPSPALTCDPRPFGAPLTQLARSRTQTMFPVKVKVEKSELEMAKARNQLDAVLQCLLEKSHMDRERLDEEAGKTPSDTHNKDCSIAATGKRPSARFPHQRRKKRREMDDGLAEGGPQRSNTYVIKLFDRSVDLAQFSENTPLYPICRAWMRNSPSVRERECSPSSPLPPLPEDEEGSEVTNSKSRDVYKLPPPTPPGPPGDACRSRIPSPLQPEMQGTPDDEPSEPEPSPSTLIYRNMQRWKRIRQRWKEASHRNQLRYSESMKILREMYERQ

SEQ ID NO: 863353 - protein, 46 aa, Homo sapiens
MCQKVAPVSPTFCDHTGEKPAGGPHKGGAEKVLKRRYRVSTTHSEH

SEQ ID NO: 863354 - protein, 162 aa, Homo sapiens
MRTTTAPTNRTLSPNRQTPARHTQNRGRGIIHHHKNKNHPPGVTQPPAPLTEHHTYTRAAPPRRRPHNKGGAHTTSQGRAPTTGSGRPQHKKHNTRRRRGGRENNHDSHQHRPQTPCTNHRRNDGTTQTTTTRDHMHRQPDHQHDQHRELQQPPRVAHDKQK

SEQ ID NO: 863355 - protein, 147 aa, Homo sapiens
MDDGLAEGGPQRSNTYVIKLFDRSVDLAQFSENTPLYPICRAWMRNSPSGSEVTNSKSRDVYKLPPPTPPGPPGDACRSRIPSPLQPEMQGTPDDEPSEPEPSPSTLIYRNMQRWKRIRQRWKEASHRNQLRYSESMKILREMYERQ

SEQ ID NO: 863356 - protein, 134 aa, Homo sapiens
MDDGLAEGGPQRSNTYVIKLFDRSVDLAQFSENTPLYPICRAWMRNSPSVRERECSPSSPLPPLPEDEEHPEMPADPASHLHCSLRCRAPLTMSPLSPSPHPPHSSIATCSAGNASARGGRRPLIGTSFVTQKA

SEQ ID NO: 863357 - protein, 980 aa, Homo sapiens
MALAVLRVLEPFPTETPPLAVLLPPGGPWPAAELGLVLALRPAGESPAGPALLVAALEGPDAGTEEQGPGPPQLLVSRALLRLLALGSGAWVRARAVRRPPALGWALLGTSLGPGLGPRVGPLLVRRGETLPVPGPRVLETRPALQGLLGPGTRLAVTELRGRARLCPESGDSSRPPPPPVVSSFAVSGTVRRLQGVLGGTGDSLGVSRSCLRGLGLFQGEWVWVAQARESSNTSQPHLARVQVLEPRWDLSDRLGPGSGPLGEPLADGLALVPATLAFNLGCDPLEMGELRIQRYLEGSIAPEDKGSCSLLPGPPFARELHIEIVSSPHYSTNGNYDGVLYRHFQIPRVVQEGDVLCVPTIGQVEILEGSPEKLPRWREMFFKVKKTVGEAPDGPASAYLADTTHTSLYMVGSTLSPVPWLPSEESTLWSSLSPPGLEALVSELCAVLKPRLQPGGALLTGTSSVLLRGPPGCGKTTVVAAACSHLGLHLLKVPCSSLCAESSGAVETKLQAIFSRARRCRPAVLLLTAVDLLGRDRDGLGEDARVMAVLRHLLLNEDPLNSCPPLMVVATTSRAQDLPADVQTAFPHELEVPALSEGQRLSILRALTAHLPLGQEVNLAQLARRCAGFVVGDLYALLTHSSRAACTRIKNSGLAGGLTEEDEGELCAAGFPLLAEDFGQALEQLQTAHSQAVGAPKIPSVSWHDVGGLQEVKKEILETIQLPLEHPELLSLGLRRSGLLLHGPPGTGKTLLAKAVATECSLTFLSVKGPELINMYVGQSEENVREVFARARAAAPCIIFFDELDSLAPSRGRSGDSGGVMDRVVSQLLAELDGLHSTQDVFVIGATNRPDLLDPALLRPGRFDKLVFVGANEDRASQLRVLSAITRKFKLEPSVSLVNVLDCCPPQLTGADLYSLCSDAMTAALKRRVHDLEEGLEQGSSALMLTMEDLLQAAARLQPSVSEQELLRYKRIQRKFAAC

SEQ ID NO: 863358 - protein, 952 aa, Homo sapiens
MALAVLRVLEPFPTETPPLAVLLPPGGPWPAAELGLVLALRPAGESPAGPALLVAALEGPDAGTEEQGPGPPQLLVSRALLRLLALGSGAWVRARAVRRPPALGWALLGTSLGPGLGPRVGPLLVRRGETLPVPGPRVLETRPALQGLLGPGTRLAVTELRGRARLCPESGDSSRPPPPPVVSSFAVSGTVRRLQGVLGGTGDSLGVSRSCLRGLGLFQGEWVWVAQARESSNTSQPHLARVQVLEPRWDLSDRLGPGSGPLGEPLADGLALVPATLAFNLGCDPLEMGELRIQRYLEGSIAPEDKGSCSLLPGPPFARELHIEIVSSPHYSTNGNYDGVLYRHFQIPRWREMFFKVKKTVGEAPDGPASAYLADTTHTSLYMVGSTLSPVPWLPSEESTLWSSLSPPGLEALVSELCAVLKPRLQPGGALLTGTSSVLLRGPPGCGKTTVVAAACSHLGLHLLKVPCSSLCAESSGAVETKLQAIFSRARRCRPAVLLLTAVDLLGRDRDGLGEDARVMAVLRHLLLNEDPLNSCPPLMVVATTSRAQDLPADVQTAFPHELEVPALSEGQRLSILRALTAHLPLGQEVNLAQLARRCAGFVVGDLYALLTHSSRAACTRIKNSGLAGGLTEEDEGELCAAGFPLLAEDFGQALEQLQTAHSQAVGAPKIPSVSWHDVGGLQEVKKEILETIQLPLEHPELLSLGLRRSGLLLHGPPGTGKTLLAKAVATECSLTFLSVKGPELINMYVGQSEENVREVFARARAAAPCIIFFDELDSLAPSRGRSGDSGGVMDRVVSQLLAELDGLHSTQDVFVIGATNRPDLLDPALLRPGRFDKLVFVGANEDRASQLRVLSAITRKFKLEPSVSLVNVLDCCPPQLTGADLYSLCSDAMTAALKRRVHDLEEGLEQGSSALMLTMEDLLQAAARLQPSVSEQELLRYKRIQRKFAAC

SEQ ID NO: 863359 - protein, 1065 aa, Homo sapiens
MALAVLRVLEPFPTETPPLAVLLPPGGPWPAAELGLVLALRPAGESPAGPALLVAALEGPDAGTEEQGPGPPQLLVSRALLRLLALGSGAWVRARAVRRPPALGWALLGTSLGPGLGPRVGPLLVRRGETLPVPGPRVLETRPALQGLLGPGTRLAVTELRGRARLCPESGDSSRPPPPPVVSSFAVSGTVRRLQGVLGGTGDSLGVSRSCLRGLGLFQGEWVWVAQARESSNTSQPHLARVQVLEPRWDLSDRLGPGSGPLGEPLADGLALVPATLAFNLGCDPLEMGELRIQRYLEGSIAPEDKGSCSLLPGPPFARELHIEIVSSPHYSTNGNYDGVLYRHFQIPRVVQEGDVLCVPTIGQVEILEGSPEKLPRWREMFFKVKKTVGEAPDGPASAYLADTTHTSLYMVGSTLSPVPWLPSEESTLWSSLSPPGLEALVSELCAVLKPRLQPGGALLTGTSSVLLRGPPGCGKTTVVAAACSHLGLHLLKVPCSSLCAESSGAVETKLQAIFSRARRCRPAVLLLTAVDLLGRDRDGLGEDARVMAVLRHLLLNEDPLNSCPPLMVVATTSRAQDLPADVQTAFPHELEVPALSEGQRLSILRALTAHLPLGQEVNLAQLARRCAGFVVGDLYALLTHSSRAACTRIKNSGLAGGLTEEDEGELCAAGFPLLAEDFGQALEQLQTAHSQAVGAPKIPSVSWHDVGGLQEVKKEILETIQLPLEHPELLSLGLRRSGLLLHGPPGTGKTLLAKAVATECSLTFLSVKGPELINMYVGQSEENVREGERAGRGRASHASQTPMAPKPPPTPRLLMIIPNPPFYKSGSCPAGSSTWDASAVLSGPSFPPCSHLTSTPHKPSFALLWAPLSSSVFARARAAAPCIIFFDELDSLAPSRGRSGDSGGVMDRVVSQLLAELDGLHSTQDVFVIGATNRPDLLDPALLRPGRFDKLVFVGANEDRASQLRVLSAITRKFKLEPSVSLVNVLDCCPPQLTGADLYSLCSDAMTAALKRRVHDLEEGLEQGSSALMLTMEDLLQAAARLQPSVSEQELLRYKRIQRKFAAC

SEQ ID NO: 863360 - protein, 1106 aa, Homo sapiens
MALAVLRVLEPFPTETPPLAVLLPPGGPWPAAELGLVLALRPAGESPAGPALLVAALEGPDAGTEEQGPGPPQLLVSRALLRLLALGSGAWVRARAVRRPPALGWALLGTSLGPGLGPRVGPLLVRRGETLPVPGPRVLETRPALQGLLGPGTRLAVTELRGRARLCPESGDSSRPPPPPVVSSFAVSGTVRRLQGVLGGTGDSLGVSRSCLRGLGLFQGEWVWVAQARESSNTSQPHLARVQVLEPRWDLSDRLGPGSGPLGEPLADGLALVPATLAFNLGCDPLEMGELRIQRYLEGSIAPEDKGSCSLLPGPPFARELHIEIVSSPHYSTNGNYDGVLYRHFQIPRVVQEGDVLCVPTIGQVEILEGSPEKLPRWREMFFKVKKTVGEAPDGPASAYLADTTHTSLYMVGSTLSPVPWLPSEESTLWSSLSPPGLEALVSELCAVLKPRLQPGGALLTGTSSVLLRGPPGCGKTTVVAAACSHLGLHLLKVRVSGEVEPQLLPLPSSCSPSLLLPLPSLLCLLTGPSTSAQWVRHIPMMLSYGEVLSRRRELQDIGGQSREWDEGKKEVGLGQGTFPVPALQRKRWPTSSTSSSPDSPALVMLSPVLTDPLGSPPQVPCSSLCAESSGAVETKLQAIFSRARRCRPAVLLLTAVDLLGRDRDGLGEDARVMAVLRHLLLNEDPLNSCPPLMVVATTSRAQDLPADVQTAFPHELEVPALSEGQRLSILRALTAHLPLGQEVNLAQLARRCAGFVVGDLYALLTHSSRAACTRIKNSGLAGGLTEEDEGELCAAGFPLLAEDFGQALEQLQTAHSQAVGAPKIPSVSWHDVGGLQEVKKEILETIQLPLEHPELLSLGLRRSGLLLHGPPGTGKTLLAKAVATECSLTFLSVKGPELINMYVGQSEENVREVFARARAAAPCIIFFDELDSLAPSRGRSGDSGGVMDRVVSQLLAELDGLHSTQDVFVIGATNRPDLLDPALLRPGRFDKLVFVGANEDRASQLRVLSAITRKFKLEPSVSLVNVLDCCPPQLTGADLYSLCSDAMTAALKRRVHDLEEGLEQGSSALMLTMEDLLQAAARLQPSVSEQELLRYKRIQRKFAAC

SEQ ID NO: 863361 - protein, 980 aa, Homo sapiens; identical to SEQ ID NO: 863357

SEQ ID NO: 863362 - protein, 654 aa, Homo sapiens
MALAVLRVLEPFPTETPPLAVLLPPGGPWPAAELGLVLALRPAGESPAGPALLVAALEGPDAGTEEQGPGPPQLLVSRALLRLLALGSGAWVRARAVRRPPALGWALLGTSLGPGLGPRVGPLLVRRGETLPVPGPRVLETRPALQGLLGPGTRLAVTELRGRARLCPESGDSSRPPPPPVVSSFAVSGTVRRLQGVLGGTGDSLGVSRSCLRGLGLFQGEWVWVAQARESSNTSQPHLARVQVLEPRWDLSDRLGPGSGPLGEPLADGLALVPATLAFNLGCDPLEMGELRIQRYLEGSIAPEDKGSCSLLPGPPFARELHIEIVSSPHYSTNGNYDGVLYRHFQIPRVVQEGDVLCVPTIGQVEILEGSPEKLPRWREMFFKVKKTVGEAPDGPASAYLADTTHTSLYMVGSTLSPVPWLPSEESTLWSSLSPPGLEALVSELCAVLKPRLQPGGALLTGTSSVLLRGPPGCGKTTVVAAACSHLGLHLLKVPCSSLCAESSGAVETKLQAIFSRARRCRPAVLLLTAVDLLGRDRDGLGEDARVMAVLRHLLLNEDPLNSCPPLMVVATTSRAQDLPADVQTAFPHELEVPALSEGQRLSILRALTAHLPLGQEVNLAQLARRCAVSIKGEYWPSLGGPWLLLQELSPVAL

SEQ ID NO: 863363 - protein, 97 aa, Homo sapiens
KATRPLLSVSQFPGSFPGITSVLQGWLWRKNLQQGHLFLRLPFPLGNSLAILHFTALALKDTTPHTSGPGVDADPHLSATTMSLNTIQTSHNVEVLL

SEQ ID NO: 863364 - protein, 980 aa, Homo sapiens; identical to SEQ ID NO: 863357

SEQ ID NO: 863365 - protein, 912 aa, Homo sapiens
MALAVLRVLEPFPTETPPLAVLLPPGGPWPAAELGLVLALRPAGESPAGPALLVAALEGPDAGTEEQGPGPPQLLVSRALLRLLALGSGAWVRARAVRRPPALGWALLGTSLGPGLGPRVGPLLVRRGETLPVPGPRVLETRPALQGLLGPGTRLAVTELRGRARLCPESGDSSRPPPPPVVSSFAVSGTVRRLQGVLGGTGDSLGVSRSCLRGLGLFQGEWVWVAQARESSNTSQPHLARVQVLEPRWDLSDRLGPGSGPLGEPLADGLALVPATLAFNLGCDPLEMGELRIQRYLEGSIAPEDKGSCSLLPGPPFARELHIEIVSSPHYSTNGNYDGVLYRHFQIPRVVQEGDVLCVPTIGQVEILEGSPEKLPRWREMFFKVKKTVGEAPDGPASAYLADTTHTSLYMVGSTLSPVPWLPSEESTLWSSLSPPGLEALVSELCAVLKPRLQPGGALLTGTSSVLLRGPPGCGKTTVVAAACSHLGLHLLKVPCSSLCAESSGAVETKLQAIFSRARRCRPAVLLLTAVDLLGRDRDGLGEDARVMAVLRHLLLNEDPLNSCPPLMVVATTSRAQDLPADVQTAFPHELEVPALSEGQRLSILRALTAHLPLGQEVNLAQLARRCAGFVVGDLYALLTHSSRAACTRIKNSGLAGGLTEEDEGELCAAGFPLLAEDFGQALEQLQTAHSQAVGAPKIPSVSWHDNMYVGQSEENVREVFARARAAAPCIIFFDELDSLAPSRGRSGDSGGVMDRVVSQLLAELDGLHSTQDVFVIGATNRPDLLDPALLRPGRFDKLVFVGANEDRASQLRVLSAITRKFKLEPSVSLVNVLDCCPPQLTGADLYSLCSDAMTAALKRRVHDLEEGLEQGSSALMLTMEDLLQAAARLQPSVSEQELLRYKRIQRKFAAC

SEQ ID NO: 863366 - protein, 262 aa, Homo sapiens
MAPKPPPTPRLLMIIPNPPFYKSGSCPAGSSTWDASAVIVRPQFPSLLSPNFNPPQAELCPPVGPSLSSVFARARAAAPCIIFFDELDSLAPSRGRSGDSGGVMDRVVSQLLAELDGLHSTQDVFVIGATNRPDLLDPALLRPGRFDKLVFVGANEDRASQLRVLSAITRKFKLEPSVSLVNVLDCCPPQLTGADLYSLCSDAMTAALKRRVHDLEEGLEQGSSALMLTMEDLLQAAARLQPSVSEQELLRYKRIQRKFAAC

SEQ ID NO: 863367 - protein, 980 aa, Homo sapiens; identical to SEQ ID NO: 863357

SEQ ID NO: 863368 - protein, 1462 aa, Homo sapiens
MALYYDHQIEAPDAAGSPSFISWHPVHPFLAVAYISTTSTGSVDIYLEQGECVPDTHVERPFRVASLCWHPTRLVLAVGWETGEVTVFNKQDKEQHTMPLTHTADITVLRWSPSGNCLLSGDRLGVLLLWRLDQRGRVQGTPLLKHEYGKHLTHCIFRLPPPGEDLVQLAKAAVSGDEKALDMFNWKKSSSGSLLKMGSHEGLLFFVSLMDGTVHYVDEKGKTTQVVSADSTIQMLFYMEKREALVVVTENLRLSLYTVPPEGKAEEVMKVKLSGKTGRRADIALIEGSLLVMAVGEAALRFWDIERGENYILSPDEKFGFEKGENMNCVCYCKVKGLLAAGTDRGRVAMWRKVPDFLGSPGAEGKDRWALQTPTELQGNITQIQWGSRKNLLAVNSVISVAILSERAMSSHFHQQVAAMQVSPSLLNVCFLSTGVAHSLRTDMHISGVFATKDAVAVWNGRQVAIFELSGAAIRSAGTFLCETPVLAMHEENVYTVESNRVQVRTWQGTVKQLLLFSETEGNPCFLDICGNFLVVGTDLAHFKSFDLSRREAKAHCSCRSLAELVPGVGGIASLRCSSSGSTISILPSKADNSPDSKICFYDVEMDTVTVFDFKTGQIDRRETLSFNEQETNKSHLFVDEGLKNYVPVNHFWDQSEPRLFVCEAVQETPRSQPQSANGQPQDGRAGPAADVLILSFFISEEHGFLLHESFPRPATSHSLLGMEVPYYYFTRKPEEADREDEVEPGCHHIPQMVSRRPLRDFVGLEDCDKATRDAMLHFSFFVTIGDMDEAFKSIKLIKSEAVWENMARMCVKTQRLDVAKVCLGNMGHARGARALREAEQEPELEARVAVLATQLGMLEDAEQLYRKCKRHDLLNKFYQAAGRWQEALQVAEHHDRVHLRSTYHRYAGHLEASADCSRALSYYEKSDTHRFEVPRMLSEDLPSLELYVNKMKDKTLWRWWAQYLESQGEMDAALHYYELARDHFSLVRIHCFQGNVQKAAQIANETGNLAASYHLARQYESQEEVGQAVHFYTRAQAFKNAIRLCKENGLDDQLMNLALLSSPEDMIEAARYYEEKGVQMDRAVMLYHKAGHFSKALELAFATQQFVALQLIAEDLDETSDPALLARCSDFFIEHSQYERAVELLLAARKYQEALQLCLGQNMSITEEMAEKMTVAKDSSDLPEESRRELLEQIADCCMRQGSYHLATKKYTQAGNKLKAMRALLKSGDTEKITFFASVSRQKEIYIMAANYLQSLDWRKEPEIMKNIIGFYTKGRALDLLAGFYDACAQVEIDEYQNYDKAHGALTEAYKCLAKAKAKSPLDQETRLAQLQSRMALVKRFIQARRTYTEDPKESIKQCELLLEEPDLDSTIRIGDVYGFLVEHYVRKEEYQTAYRFLEEMRRRLPLANMSYYVSPQAVDAVHRGLGLPLPRTVPEQVRHNSMEDARELDEEVVEEADDDP

SEQ ID NO: 863369 - protein, 824 aa, Homo sapiens
SCPRGEARDAGCGTDPSSRLLLLSLVAPGAWRLVLSDYCLPWGLHTPQPSSCPQDHRYPQDHRNHKPPPARVFQACPRHGNAALKRGADITGLLGRGETRVPGGSKFTQTCRARDLYLEDLGARDLYLEGLGARDLYLEDLGARDLYLEDLEARSFLGGKKGEAVWENMARMCVKTQRLDVAKVCLGNMGHARGARALREAEQEPELEARVAVLATQLGMLEDAEQLYRKCKRHDLLNKFYQAAGRWQEALQVAEHHDRVHLRSTYHRYAGHLEASADCSRALSYYEKSDTHRFEVPRMLSEDLPSLELYVNKMKDKTLWRWWAQYLESQGEMDAALHYYELARDHFSLVRIHCFQGNVQKAAQIANETGNLAASYHLARQYESQEEVGQAVHFYTRAQAFKNAIRLCKENGLDDQLMNLALLSSPEDMIEAARYYEEKGVQMDRAVMLYHKAGHFSKALELAFATQQFVALQLIAEDLDETSDPALLARCSDFFIEHSQYERAVELLLAARKYQEALQLCLGQNMSITEEMAEKMTVAKDSSDLPEESRRELLEQIADCCMRQGSYHLATKKYTQAGNKLKAMRALLKSGDTEKITFFASVSRQKEIYIMAANYLQSLDWRKEPEIMKNIIGFYTKGRALDLLAGFYDACAQVEIDEYQNYDKAHGALTEAYKCLAKAKAKSPLDQETRLAQLQSRMALVKRFIQARRTYTEDPKESIKQCELLLEEPDLDSTIRIGDVYGFLVEHYVRKEEYQTAYRFLEEMRRRLPLANMSYYVSPQAVDAVHRGLGLPLPRTVPEQVRHNSMEDARELDEEVVEEADDDP

SEQ ID NO: 863370 - protein, 599 aa, Homo sapiens
KGVQMDRAVMLYHKAGHFSKALELAFATQQFVALQLIAEDLDETSDPALLARCSDFFIEHSQYERAVELLLAVHGGRTSLRTDMHISGVFATKDAVAVWNGRQVAIFELSGAAIRSAGTFLCETPVLAMHEENVYTVESNRVQVRTWQGTVKQLLLFSETEGNPCFLDICGNFLVVGTDLAHFKSFDLSRREAKAHCSCRSLAELVPGVGGIASLRCSSSGSTISILPSKADNSPDSKICFYDVEMDTVTVFDFKTGQLGVLLLWRLDQRGRVQGTPLLKHEYGKHLTHCIFRLPPPGEDLVQLAKAAVSGDEKALDMFNWKKSSSGSLLKMGSHEGLLFFVSLMDGTVHYVDEKGKTTQVVSADSTIQMLFYMEKREALVVVTENLRLSLYTVPPEGKAEEVMKVKLSGKTGRRADIALIEGSLLVMAVGEAALRFWDIERGENYILSPDEKFGFEKGENMNCVCYCKVKGLLAAGTDRGRVAMWRKVPDSHCHAPSPSRSATTAWRTPGSWTRRWWKRQMTTPEGPGPQDQRAAAERHLLEFFRQLWQSQHFCWEKTCLCWNTRQSWARTQRPGPAEGVTRLHLALSHLPLGARQLH

SEQ ID NO: 863371 - protein, 125 aa, Homo sapiens
MALYYDHQIEAPDAAGSPSFISWHPVHPFLAVAYISTTSTGSVDIYLEQGECVPDTHVERPFRVASLCWHPTRLVLAVGWETGEVTVFNKQDKEQHTMPLTHTADITVLRWSPTLSTLVAPIALG

SEQ ID NO: 863372 - protein, 1102 aa, Homo sapiens
KGVQMDRAVMLYHKAGHFSKALELAFATQQFVALQLIAEDLDETSDPALLARCSDFFIEHSQYERAVELLLLSTGVAHSLRTDMHISGVFATKDAVAVWNGRQVAIFELSGAAIRSAGTFLCETPVLAMHEENVYTVESNRVQVRTWQGTVKQLLLFSETEGNPCFLDICGNFLVVGTDLAHFKSFDLSRREAKAHCSCRSLAELVPGVGGIASLRCSSSGSTISILPSKADNSPDSKICFYDVEMDTVTVFDFKTGQIDRRETLSFNEQETNKSHLFVDEGLKNYVPVNHFWDQSEPRLFVCEAVQETPRSQPQSANGQPQDGRAGPAADVLILSFFISEEHGFLLHESFPRPATSHSLLGMEVPYYYFTRKPEEADREDEVEPGCHHIPQMVSRRPLRDFVGLEDCDKATRDAMLHFSFFVTIGDMDEAFKSIKLIKSEAVWENMARMCVKTQRLDVAKVCLGNMGHARGARALREAEQEPELEARVAVLATQLGMLEDAEQLYRKCKRHDLLNKFYQAAGRWQEALQVAEHHDRVHLRSTYHRYAGHLEASADCSRALSYYEKSDTHRFEVPRMLSEDLPSLELYVNKMKDKTLWRWWAQYLESQGEMDAALHYYELARDHFSLVRIHCFQGNVQKAAQIANETGNLAASYHLARQYESQEEVGQAVHFYTRAQAFKNAIRLCKENGLDDQLMNLALLSSPEDMIEAARYYEEKGVQMDRAVMLYHKAGHFSKALELAFATQQFVALQLIAEDLDETSDPALLARCSDFFIEHSQYERAVELLLAARKYQEALQLCLGQNMSITEEMAEKMTVAKDSSDLPEESRRELLEQIADCCMRQGSYHLATKKYTQAGNKLKAMRALLKSGDTEKITFFASVSRQKEIYIMAANYLQSLDWRKEPEIMKNIIGFYTKGRALDLLAGFYDACAQVEIDEYQNYDKAHGALTEAYKCLAKAKAKSPLDQETRLAQLQSRMALVKRFIQARRTYTEDPKESIKQCELLLEEPDLDSTIRIGDVYGFLVEHYVRKEEYQTAYRFLEEMRRRLPLANMSYYVSPQAVDAVHRGLGLPLPRTVPEQVRHNSMEDARELDEEVVEEADDDP

SEQ ID NO: 863373 - protein, 1419 aa, Homo sapiens
MALYYDHQIEAPDAAGSPSFISWHPVHPFLAVAYISTTSTGSVDIYLEQGECVPDTHVERPFRVASLCWHPTRLVLAVGWETGEVTVFNKQDKEQHTMPLTHTADITVLRWSPSGNCLLSGDRLGVLLLWRLDQRGRVQGTPLLKHEYGKHLTHCIFRLPPPGEDLVQLAKAAVSGDEKALDMFNWKKSSSGSLLKMGSHEGLLFFVSLMDGTVHYVDEKGKTTQVVSADSTIQMLFYMEKREALVVVTENLRLSLYTVPPEGKAEEVMKVKLSGKTGRRADIALIEGSLLVMAVGEAALRFWDIERGENYILSPDEKFGFEKGENMNCVCYCKVKGLLAAGTDRGRVAMWRKVPDFLGSPGAEGKDRWALQTPTELQGNITQIQWGSRKNLLAVNSVISVAILSERAMSSHFHQQVAAMQVSPSLLNVCFLSTGVAHSLRTDMHISGVFATKDAVAVWNGRQVAIFELSGAAIRSAGTFLCETPVLAMHEENVYTVESNRVQVRTWQGTVKQLLLFSETEGNPCFLDICGNFLVVGTDLAHFKSFDLSRREAKAHCSCRSLAELVPGVGGIASLRCSSSGSTISILPSKADNSPDSKICFYDVEMDTVTVFDFKTGQIDRRETLSFNEQETNKSHLFVDEGLKNYVPVNHFWDQSEPRLFVCEAVQETPRSQPQSANGQPQDGRAGPAADVLILSFFISEEHGFLLHESFPRPATSHSLLGMEVPYYYFTRKPEEADREDEVEPGCHHIPQMVSRRPLRDFVGLEDCDKATRDAMLHFSFFVTIGDMDEAFKSIKLIKSEAVWENMARMCVKTQRLDVAKVCLGNMGHARGARALREAEQEPELEARVAVLATQLGMLEDAEQLYRKCKRHDLLNKFYQAAGRWQEALQVAEHHDRVHLRSTYHRYAGHLEASADCSRALSYYEKSDTHRFEVPRMLSEDLPSLELYVNKMKDKTLWRWWAQYLESQGEMDAALHYYELARDHFSLVRIHCFQGNVQKAAQIANETGNLAASYHLARQYESQEEVGQAVHFYTRAQAFKNAIRLCKENGLDDQLMNLALLSSPEDMIEAARYYEEKGVQMDRAVMLYHKAGHFSKALELAFATQQFVALQLIAEDLDETSDPALLARCSDFFIEHSQYERAVELLLAARKYQEALQLCLGQNMSITEEMAEKMTVAKDSSDLPEESRRELLEQIADCCMRQGSYHLATKKYTQAGNKLKAMRALLKSGDTEKITFFASVSRQKEIYIMAANYLQSLDWRKEPEIMKNIIGFYTKGRALDLLAGFYDACAQVEIDEYQNYDKAHGALTEAYKCLAKAKAKSPLDQETRLAQLQSRMALVKRFIQARRTYTEDPKESIKQCELLLEEPDLDSTIRIGDVYGFLVEHYVRKEEYQTVRPECCSLAASRHTRLLKRRLNGSN

SEQ ID NO: 863374 - protein, 1017 aa, Homo sapiens
MALYYDHQIEAPDAAGSPSFISWHPVHPFLAVAYISTTSTGSVDIYLEQGECVPDTHVERPFRVASLCWHPTRLVLAVGWETGEVTVFNKQDKEQHTMPLTHTADITVLRWSPSGNCLLSGDRLGVLLLWRLDQRGRVQGTPLLKHEYGKHLTHCIFRLPPPGEDLVQLAKAAVSGDEKALDMFNWKKSSSGSLLKMGSHEGLLFFVSLMDGTVHYVDEKGKTTQVVSADSTIQMLFYMEKREALVVVTENLRLSLYTVPPEGKAEEVMKVKLSGKTGRRADIALIEGSLLVMAVGEAALRFWDIERGENYILSPDEKFGFEKGENMNCVCYCKVKGLLAAGTDRGRVAMWRKVPDFLGSPGAEGKDRWALQTPTELQGNITQIQWGSRKNLLAVNSVISVAILSERAMSSHFHQQVAAMQVSPSLLNVCFLSTGVAHSLRTDMHISGVFATKDAVAVWNGRQVAIFELSGAAIRSAGTFLCETPVLAMHEENVYTVESNRVQVRTWQGTVKQLLLFSETEGNPCFLDICGNFLVVGTDLAHFKSFDLSRREAKAHCSCRSLAELVPGVGGIASLRCSSSGSTISILPSKADNSPDSKICFYDVEMDTVTVFDFKTGQIDRRETLSFNEQETNKSHLFVDEGLKNYVPVNHFWDQSEPRLFVCEAVQETPRSQPQSANGQPQDGRAGPAADVLILSFFISEEHGFLLHESFPRPATSHSLLGMEVPYYYFTRKPEEADREDEVEPGCHHIPQMVSRRPLRDFVGLEDCDKATRDAMLHFSFFVTIGDMDEAFKSIKLIKSEAVWENMARMCVKTQRLDVAKVCLGNMGHARGARALREAEQEPELEARVAVLATQLGMLEDAEQLYRKCKRHDLLNKFYQAAGRWQEALQVAEHHDRVHLRSTYHRYAGHLEASADCSRALSYYEKSDTHRFEVPRMLSEDLPSLELYVNKMKDKTPWAVLGPDLGSLGASFRVRQAAAASPGAPTWSRARSKAGRNSRDMKQCGGHNVSRQMNTRA

SEQ ID NO: 863375 - protein, 800 aa, Homo sapiens [sequence omitted]

SEQ ID NO: 863376 - protein, 96 aa, Homo sapiens
TVHYVDEKGKTTQVVSADSTIQMLFYMEKREALVVVTENLRLSLYTVPPEGKAEEVMKVSGSGLGGSRWGSWARFSLASLTALSLLDSKTEKKPIN

SEQ ID NO: 863377 - protein, 185 aa, Homo sapiens
LLVNICLSAEGFLPHKGAKSRGRGLGEGFSFTYELTNTWVLCHLARRSRQRRRGGAWVPPHPSDGVQETPARLCGAGGLRQGHPGRHAPLQLLCHHRRHGRSLQIHQAHQKVRIPTTGMLGDSACSRLFPFSLFAFLVRLLKYLTPHDCVMVYFMVFPLDEMLPSLQMPRGKLSASLVLGASRAV

SEQ ID NO: 863378 - protein, 1221 aa, Homo sapiens
MALYYDHQIEAPDAAGSPSFISWHPVHPFLAVAYISTTSTGSVDIYLEQGECVPDTHVERPFRVASLCWHPTRLVLAVGWETGEVTVFNKQDKEQHTMPLTHTADITVLRWSPSGNCLLSGDRLGVLLLWRLDQRGRVQGTPLLKHEYGKHLTHCIFRLPPPGEDLVQLAKAAVSGDEKALDMFNWKKSSSGSLLKMGSHEGLLFFVSLMDGTVHYVDEKGKTTQVVSADSTIQMLFYMEKREALVVVTENLRLSLYTVPPEGKAEEVMKVKLSGKTGRRADIALIEGSLLVMAVGEAALRFWDIERGENYILSPDEKFGFEKGENMNCVCYCKVKGLLAAGTDRGRVAMWRKVPDFLGSPGAEGKDRWALQTPTELQGNITQIQWGSRKNLLAVNSVISVAILSERAMSSHFHQQVAAMQVSPSLLNVCFLSTGVAHSLRTDMHISGVFATKDAVAVWNGRQVAIFELSGAAIRSAGTFLCETPVLAMHEENVYTVESNRVQVRTWQGTVKQLLLFSETEGNPCFLDICGNFLVVGTDLAHFKSFDLSRREAKAHCSCRSLAELVPGVGGIASLRCSSSGSTISILPSKADNSPDSKICFYDVEMDTVTVFDFKTGQIDRRETLSFNEQETNKSHLFVDEGLKNYVPVNHFWDQSEPRLFVCEAVQETPRSQPQSANGQPQDGRAGPAADVLILSFFISEEHGFLLHESFPRPATSHSLLGMEVPYYYFTRKPEEADREDEVEPGCHHIPQMVSRRPLRDFVGLEDCDKATRDAMLHFSFFVTIGDMDEAFKSIKLIKSEAVWENMARMCVKTQRLDVAKVCLGNMGHARGARALREAEQEPELEARVAVLATQLGMLEDAEQLYRKCKRHDLLNKFYQAAGRWQEALQVAEHHDRVHLRSTYHRYAGHYQEALQLCLGQNMSITEEMAEKMTVAKDSSDLPEESRRELLEQIADCCMRQGSYHLATKKYTQAGNKLKAMRALLKSGDTEKITFFASVSRQKEIYIMAANYLQSLDWRKEPEIMKNIIGFYTKGRALDLLAGFYDACAQVEIDEYQNYDKAHGALTEAYKCLAKAKAKSPLDQETRLAQLQSRMALVKRFIQARRTYTEDPKESIKQCELLLEEPDLDSTIRIGDVYGFLVEHYVRKEEYQTAYRFLEEMRRRLPLANMSYYVSPQAVDAVHRGLGLPLPRTVPEQVRHNSMEDARELDEEVVEEADDDP

SEQ ID NO: 863379 - protein, 618 aa, Homo sapiens
MARMCVKTQRLDVAKEDAEQLYRKCKRHDLLNKFYQAAGRWQEALQVAEHHDRVHLRSTYHRYAGHLEASADCSRALSYYEKSDTHRFEVPRMLSEDLPSLELYVNKMKDKTLWRWWAQYLESQGEMDAALHYYELARDHFSLVRIHCFQGNVQKAAQIANETGNLAASYHLARQYESQEEVGQAVHFYTRAQAFKNAIRLCKENGLDDQLMNLALLSSPEDMIEAARYYEEKGVQMDRAVMLYHKAGHFSKALELAFATQQFVALQLIAEDLDETSDPALLARCSDFFIEHSQYERAVELLLAARKYQEALQLCLGQNMSITEEMAEKMTVAKDSSDLPEESRRELLEQIADCCMRQGSYHLATKKYTQAGNKLKAMRALLKSGDTEKITFFASVSRQKEIYIMAANYLQSLDWRKEPEIMKNIIGFYTKGRALDLLAGFYDACAQVEIDEYQNYDKAHGALTEAYKCLAKAKAKSPLDQETRLAQLQSRMALVKRFIQARRTYTEDPKESIKQCELLLEEPDLDSTIRIGDVYGFLVEHYVRKEEYQTAYRFLEEMRRRLPLANMSYYVSPQAVDAVHRGLGLPLPRTVPEQVRHNSMEDARELDEEVVEEADDDP

SEQ ID NO: 863380 - protein, 1062 aa, Homo sapiens [sequence omitted]

SEQ ID NO: 863381 - protein, 740 aa, Homo sapiens
MALYYDHQIEAPDAAGSPSFISWHPVHPFLAVAYISTTSTGSVDIYLEQGECVPDTHVERPFRVASLCWHPTRLVLAVGWETGEVTVFNKQDKEQHTMPLTHTADITVLRWSPSGNCLLSGDRLGVLLLWRLDQRGRVQGTPLLKHEYGKHLTHCIFRLPPPGEDLVQLAKAAVSGDEKALDMFNWKKSSSGSLLKMGSHEGLLFFVSLMDGTVHYVDEKGKTTQVVSADSTIQMLFYMEKREALVVVTENLRLSLYTVPPEGKAEEVMKVKLSGKTGRRADIALIEGSLLVMAVGEAALRFWDIERGENYILSPDEKFGFEKGENMNCVCYCKVKGLLAAGTDRGRVAMWRKVPDFLGSPGAEGKDRWALQTPTELQGNITQIQWGSRKNLLAVNSVISVAILSERAMSSHFHQQVAAMQVSPSLLNVCFLSTGVAHSLRTDMHISGVFATKDAVAVWNGRQVAIFELSGAAIRSAGTFLCETPVLAMHEENVYTVESNRVQVRTWQGTVKQLLLFSETEGNPCFLDICGNFLVVGTDLAHFKSFDLSRREAKAHCSCRSLAELVPGVGGIASLRCSSSGSTISILPSKADNSPDSKICFYDVEMDTVTVFDFKTGQIDRRETLSFNEQETNKSHLFVDEGLKNYVPVNHFWDQSEPRLFVCEAVQETPRSQPQSANGQPQDGRAGPAADVLILSFFISEEHGFLLHESFPRPATSHSLLGMEVPYYYFTRKVRSHDIR

SEQ ID NO: 863382 - protein, 516 aa, Homo sapiens
MGDPSKQDILTIFKRLRSVPTNKVCFDCGAKNPSWASITYGVFLCIDCSGSHRSLGVHLSFIRSTELDSNWSWFQLRCMQVGGNASASSFFHQHGCSTNDTNAKYNSRAAQLYREKIKSLASQATRKHGTDLWLDSCVVPPLSPPPKEEDFFASHVSPEVSDTAWASAIAEPSSLTSRPVETTLENNEGGQEQGPSVEGLNVPTKATLEVSSIIKKKPNQAKKGLGAKKGSLGAQKLANTCFNEIEKQAQAADKMKEQEDLAKVVSKEESIVSSLRLAYKDLEIQMKKDEKMNISGKKNVDSDRLGMGFGNCRSVISHSVTSDMQTIEQESPIMAKPRKKYNDDSDDSYFTSSSRYFDEPVELRSSSFSSWDDSSDSYWKKETSKDTETVLKTTGYSDRPTARRKPDYEPVENTDEAQKKFGNVKAISSDMYFGRQSQADYETRARLERLSASSSISSADLFEEPRKQPAGNYSLSSVLPNAPDMAQFKQGVRSVAGKLSVFANGVVTSIQDRYGS

SEQ ID NO: 863383 - protein, 516 aa, Homo sapiens; identical to SEQ ID NO: 863382

SEQ ID NO: 863384 - protein, 516 aa, Homo sapiens; identical to SEQ ID NO: 863382

SEQ ID NO: 863385 - protein, 438 aa, Homo sapiens [sequence omitted]

SEQ ID NO: 863386 - protein, 528 aa, Homo sapiens
MGDPSKQDILTIFKRLRSVPTNKVCFDCGAKNPSWASITYGVFLCIDCSGSHRSLGVHLSFIRSTELDSNWSWFQLRCMQVGGNASASSFFHQHGCSTNDTNAKYNSRAAQLYREKIKSLASQATRKHGTDLWLDSCVVPPLSPPPKEEDFFASHVSPEVSDTAWASAIAEPSSLTSRPVETTLENNEGGQEQGPSVEGLNVPTKATLEVSSIIKKKPNQAKKGLGAKKGSLGAQKLANTCFNEIEKQAQAADKMKEQEDLAKVVSKEESIVSSLRLAYKDLEIQMKKDEKMNISGKKNVDSDRLGMGFGNCRSVISHSVTSDMQTIEQESPIMAKPRKKYNDDSDDSYFTSSSRYFDEPVELRSSSFSSWDDSSDSYWKKETSKDTETVLKTTGYSDRPTARRKPDYEPVENTDEAQKKFGNVKAISSDMYFGRQSQADYETRARLERLSASSSISSADLFEEPRKQPAGNYSLSSVLPNAPDMAQFKQGVRSVAGKLSVFANGVVTSIQVKELRHRRLGHFCKMTS

SEQ ID NO: 863387 - protein, 262 aa, Homo sapiens [sequence omitted]

SEQ ID NO: 863388 - protein, 208 aa, Homo sapiens
MRNCRSVISHSVTSDMQTIEQESPIMAKPRKKYNDDSDDSYFTSSSRYFDEPVELRSSSFSSWDDSSDSYWKKETSKDTETVLKTTGYSDRPTARRKPDYEPVENTDEAQKKFGNVKAISSDMYFGRQSQADYETRARLERLSASSSISSADLFEEPRKQPAGNYSLSSVLPNAPDMAQFKQGVRSVAGKLSVFANGVVTSIQDRYGS

SEQ ID NO: 863389 - protein, 528 aa, Homo sapiens
MGDPSKQDILTIFKRLRSVPTNKVCFDCGAKNPSWASITYGVFLCIDCSGSHRSLGVHLSFIRSTELDSNWSWFQLRCMQVGGNASASSFFHQHGCSTNDTNAKYNSRAAQLYREKIKSLASQATRKHGTDLWLDSCVVPPLSPPPKEEDFFASHVSPEVSDTAWASAIAEPSSLTSRPVETTLENNEGGQEQGPSVEGLNVPTKATLEVSSIIKKKPNQAKKGLGAKKGSLGAQKLANTCFNEIEKQAQAADKMKEQEDLAKVVSKEESIVSSLRLAYKDLEIQMKKDEKMNISGKKNVDSDRLGMGFGNCRSVISHSVTSDMQTIEQESPIMAKPRKKYNDDSDDSYFTSSSRYFDEPVELRSSSFSSWDDSSDSYWKKETSKDTETVLKTTGYSDRPTARRKPDYEPVENTDEAQKKFGNVKAISSDMYFGRQSQADYETRARLERLSASSSISSADLFEEPRKQPAGNYSLSSVLPNAPDMAQFKQGVRSVAGKLSVFANGVVTSIQVSGMGQCSLAMTVGSAV

SEQ ID NO: 863390 - protein, 104 aa, Homo sapiens
MRIPKRSGCECECFPVISVSRSFLSHPPLASLCISLLYFLGTFDFNTEGLETSAPPAPEPGGFMWGRRRGLHVTHGLRAARISGCWMGLQKQHSPHTLPSKDQK

SEQ ID NO: 863391 - protein, 196 aa, Homo sapiens
MGDPSKQDILTIFKRLRSVPTNKVCFDCGAKNPSWASITYGVFLCIDCSGSHRSLGVHLSFIRSTELDSNWSWFQLRCMQVGGNASASSFFHQHGCSTNDTNAKYNSRAAQLYREKIKSLASQATRKHGTDLWLDSCVVPPLSPPPKEEDFFASHVSPEVSDTAWASAIAEPSSLTSRPVETTLENNEGGVLRTVM

SEQ ID NO: 863392 - protein, 141 aa, Homo sapiens
MGDPSKQDILTIFKRLRSVPTNKVCFDCGAKNPSWASITYGVFLCIDCSGSHRSLGVHLSFIRSTELDSNWSWFQLRCMQVGGNASASSFFHQHGCSTNDTNAKYNSRAAQLYREKIKSLASQATRKHGTDVSHWRLDCFL

SEQ ID NO: 863393 - protein, 516 aa, Homo sapiens; identical to SEQ ID NO: 863382

SEQ ID NO: 863394 - protein, 516 aa, Homo sapiens; identical to SEQ ID NO: 863382

SEQ ID NO: 863395 - protein, 516 aa, Homo sapiens; identical to SEQ ID NO: 863382

SEQ ID NO: 863396 - protein, 504 aa, Homo sapiens
MGDPSKQDILTIFKRLRSVPTNKVCFDCGAKNPSWASITYGVFLCIDCSGSHRSLGVHLSFIRSTELDSNWSWFQLRCMQVGGNASASSFFHQHGCSTNDTNAKYNSRAAQLYREKIKSLWLDSCVVPPLSPPPKEEDFFASHVSPEVSDTAWASAIAEPSSLTSRPVETTLENNEGGQEQGPSVEGLNVPTKATLEVSSIIKKKPNQAKKGLGAKKGSLGAQKLANTCFNEIEKQAQAADKMKEQEDLAKVVSKEESIVSSLRLAYKDLEIQMKKDEKMNISGKKNVDSDRLGMGFGNCRSVISHSVTSDMQTIEQESPIMAKPRKKYNDDSDDSYFTSSSRYFDEPVELRSSSFSSWDDSSDSYWKKETSKDTETVLKTTGYSDRPTARRKPDYEPVENTDEAQKKFGNVKAISSDMYFGRQSQADYETRARLERLSASSSISSADLFEEPRKQPAGNYSLSSVLPNAPDMAQFKQGVRSVAGKLSVFANGVVTSIQDRYGS

SEQ ID NO: 863397 - protein, 453 aa, Homo sapiens
MGDPSKQDILTIFKRLRSVPTNKVCFDCGAKNPSWASITYGVFLCIDCSGSHRSLGVHLSFIRSTELDSNWSWFQLRCMQVGGNASASSFFHQHGCSTNDTNAKYNSRAAQLYREKIKSLASQATRKHGTDLWLDSCVVPPLSPPPKEEDFFASHVSPEVSDTAWASAIAEPSSLTSRPVETTLENNEGGQEQGPSVEGLNVPTKATLEVSSIIKKKPNQAKKGLGAKKGSLGAQKLANTCFNEIEKQAQAADKMKEQEDLAKVVSKEESIVSSLRLAYKDLEIQMKKDEKMNISGKKNVDSDRLGMGFGNCRSVISHSVTSDMQTIEQESPIMAKPRKKYNDDSDDSYFTSSSRYFDEPVELRSSSFSSWDDSSDSYWKKETSKDTETVLKTTGYSDRPTARRKPDYEPVENTDEAQKKFGNVKAISSDMYFGRQSQADYETRARLERYPLS

SEQ ID NO: 863398 - protein, 271 aa, Homo sapiens
MGDPSKQDILTIFKRLRSVPTNKVCFDCGAKNPSWASITYGVFLCIDCSGSHRSLGVHLSFIRSTELDSNWSWFQLRCMQVGGNASASSFFHQHGCSTNDTNAKYNSRAAQLYREKIKSLASQATRKHGTDLWLDSCVVPPLSPPPKEEDFFASHVSPEVSDTAWASAIAEPSSLTSRPVETTLENNEGGQEQGPSVEGLNVPTKATLEVSSIIKKKPNQAKKGLGAKKGSLGAQKLANTCFNEIEKQAQAADKMKEQEDLAKVVSKEESM

SEQ ID NO: 863399 - protein, 422 aa, Homo sapiens
SPLQLRLRLQRTRLLRLLLRSVAVRRVHPSQQSPGERGGQSARTSPRGTMPNDEAFSKPSTPSEAPHAPGVPPQGRAGGFGKASGALVGAASGSSAGGSSRGGGSGSGASDLGAGSKKSPRLPKCARCRNHGYASPLKGHKRFCMWRDCQCKKCNLIAERQRVMAAQVALRRQQAQEEELGISHPIPLPSAAELLVKRENNGSNPCLMTECSGTSQPPPASVPTTAASEGRMVIQDIPAVTSRGHVENTPDLVSDSTYYSSFYQPSLFPYYNNLYNCPQYSMALAADSASGEVGNPLGGSPVKNSLRGLPGPYVPGQTGNQWQMKNMENRHAMSSQYRMHSYYPPPSYLGQSVPQFFTFEDAPSYPEARASVFSPPSSQDSGLVSLSSSSPISNKSTKAVLECEPASEPSSFTVTPVIEEDE

SEQ ID NO: 863400 - protein, 68 aa, Homo sapiens
GEVGKYEEEKGEQPKGYVFSPPSSQDSGLVSLSSSSPISNKSTKAVLECEPASEPSSFTVTPVIEEDE

SEQ ID NO: 863401 - protein, 2028 aa, Homo sapiens
MCTMDNFAEGDFTVADYALLEDCPHVDDCVFAAEFMSNDYVRVTQLYCDGVGVQYKDYIQSERNLEFDICSIWCSKPISVLQDYCDAIKINIFWPLLFQHQNSSVISRLHPCVDANNSRASEINLKKLQHLELMEDIVDLAKKVANDSFLIGGLLRIGCKIENKILAMEEALNWIKYAGDVTILTKLGSIDNCWPMLSIFFTEYKYHITKIVMEDCNLLEELKTQSCMDCIEEGELMKMKGNEEFSKERFDIAIIYYTRAIEYRPENYLLYGNRALCFLRTGQFRNALGDGKRATILKNTWPKGHYRYCDALSMLGEYDWALQANIKAQKLCKNDPEGIKDLIQQHVKLQKQIEDLQGRTANKDPIKAFYENRAYTPRSLSAPIFTTSLNFVEKERDFRKINHEMANGGNQNLKVADEALKVDDCDCHPEFSPPSSQPPKHKGKQKSRNNESEKFSSSSPLTLPADLKNILEKQFSKSSRAAHQDFANIMKMLRSLIQDGYMALLEQRCRSAAQAFTELLNGLDPQKIKQLNLAMINYVLVVYGLAISLLGIGQPEELSEAENQFKRIIEHYPSEGLDCLAYCGIGKVYLKKNRFLEALNHFEKARTLIYRLPGVLTWPTSNVIIEESQPQKIKMLLEKFVEECKFPPVPDAICCYQKCHGYSKIQIYITDPDFKGFIRISCCQYCKIEFHMNCWKKLKTTTFNDKIDKDFLQGICLTPDCEGVISKIIIFSSGGEVKCEFEHKVIKEKVPPRPILKQKCSSLEKLRLKEDKKLKRKIQKKEAKKLAQERMEEDLRESNPPKNEEQKETVDNVQRCQFLDDRILQCIKQYADKIKSGIQNTAMLLKELLSWKVLSTEDYTTCFSSRNFLNEAVDYVIRHLIQENNRVKTRIFLHVLSELKEVEPKLAAWIQKLNSFGLDATGTFFSRYGASLKLLDFSIMTFLWNEKYGHKLDSIEGKQLDYFSEPASLKEARCLIWLLEEHRDKFPALHSALDEFFDIMDSRCTVLRKQDSGEAPFSSTKVKNKSKKKKPKDSKPMLVGSGTTSVTSNNEIITSSEDHSNRNSDSAGPFAVPDHLRQDVEEFEALYDQHSNEYVVRNKKLWDMNPKQKCSTLYDYFSQFLEEHGPLDMSNKMFSAEYEFFPEETRQILEKAGGLKPFLLGCPRFVVIDNCIALKKVASRLKKKRKKKNIKTKVEEISKAGEYVRVKLQLNPAAREFKPDVKSKPVSDSSSAPAFENVKPKPVSANSPKPACEDVKAKPVSDNSSRQVSEDGQPKGVSSNSPKPGSEDANYKRVSCNSPKPVLEDVKPTYWAQSHLVTGYCTYLPFQRFDITQTPPAYINVLPGLPQYTSIYTPLASLSPEYQLPRSVPVVPSFVANDRADKNAAAYFEGHHLNAENVAGHQIASETQILEGSLGISVKSHCSTGDAHTVLSESNRNDEHCGNSNNKCEVIPESTSAVTNIPHVQMVAIQVSWNIIHQEVNTEPYNPFEERQGEISRIEKEHQVLQDQLQEVYENYEQIKLKGLEETRDLEEKLKRHLEENKISKTELDWFLQDLEREIKKWQQEKKEIQERLKSLKKKIKKVSNASEMYTQKNDGKEKEHELHLDQSLEISNTLTNEKMKIEEYIKKGKEDYEESHQRAVAAEVSVLENWKESEVYKLQIMESQAEAFLKKLGLISRDPAAYPDMESDIRSWELFLSNVTKEIEKAKSQFEEQIKAIKNGSRLSELSKVQISELSFPACNTVHPELLPESSGHDGQGLVTSASDVTGNHAALHRDPSVFSAGDSPGEAPSALLPGPPPGQPEATQLTGPKRAGQAALSERSPVADRKQPVPPGRAARSSQSPKKPFNSIIEHLSVVFPCYNSTELAGFIKKVRSKNKNSLSGLSIDEIVQRVTEHILDEQKKKKPNPGKDKRTYEPSSATPVTRSSQGSPSVVVAPSPKTKGQKAEDVPVRIALGASSCEICHEVFKSKNVRVLKCGHKYHKGCFKQWLKGQSACPACQGRDLLTEESPSGRGWPSQNQELPSCSSR

SEQ ID NO: 863402 - protein, 1790 aa, Homo sapiens
MKGNEEFSKERFDIAIIYYTRAIEYRPENYLLYGNRALCFLRTGQFRNALGDGKRATILKNTWPKGHYRYCDALSMLGEYDWALQANIKAQKLCKNDPEGIKDLIQQHVKLQKQIEDLQGRTANKDPIKAFYENRAYTPRSLSAPIFTTSLNFVEKERDFRKINHEMANGGNQNLKVADEALKVDDCDCHPEFSPPSSQPPKHKGKQKSRNNESEKFSSSSPLTLPADLKNILEKQFSKSSRAAHQDFANIMKMLRSLIQDGYMALLEQRCRSAAQAFTELLNGLDPQKIKQLNLAMINYVLVVYGLAISLLGIGQPEELSEAENQFKRIIEHYPSEGLDCLAYCGIGKVYLKKNRFLEALNHFEKARTLIYRLPGVLTWPTSNVIIEESQPQKIKMLLEKFVEECKFPPVPDAICCYQKCHGYSKIQIYITDPDFKGFIRISCCQYCKIEFHMNCWKKLKTTTFNDKIDKDFLQGICLTPDCEGVISKIIIFSSGGEVKCEFEHKVIKEKVPPRPILKQKCSSLEKLRLKEDKKLKRKIQKKEAKKLAQERMEEDLRESNPPKNEEQKETVDNVQRCQFLDDRILQCIKQYADKIKSGIQNTAMLLKELLSWKVLSTEDYTTCFSSRNFLNEAVDYVIRHLIQENNRVKTRIFLHVLSELKEVEPKLAAWIQKLNSFGLDATGTFFSRYGASLKLLDFSIMTFLWNEKYGHKLDSIEGKQLDYFSEPASLKEARCLIWLLEEHRDKFPALHSALDEFFDIMDSRCTVLRKQDSGEAPFSSTKVKNKSKKKKPKDSKPMLVGSGTTSVTSNNEIITSSEDHSNRNSDSAGPFAVPDHLRQDVEEFEALYDQHSNEYVVRNKKLWDMNPKQKCSTLYDYFSQFLEEHGPLDMSNKMFSAEYEFFPEETRQILEKAGGLKPFLLGCPRFVVIDNCIALKKVASRLKKKRKKKNIKTKVEEISKAGEYVRVKLQLNPAAREFKPDVKSKPVSDSSSAPAFENVKPKPVSANSPKPACEDVKAKPVSDNSSRQVSEDGQPKGVSSNSPKPGSEDANYKRVSCNSPKPVLEDVKPTYWAQSHLVTGYCTYLPFQRFDITQTPPAYINVLPGLPQYTSIYTPLASLSPEYQLPRSVPVVPSFVANDRADKNAAAYFEGHHLNAENVAGHQIASETQILEGSLGISVKSHCSTGDAHTVLSESNRNDEHCGNSNNKCEVIPESTSAVTNIPHVQMVAIQVSWNIIHQEVNTEPYNPFEERQGEISRIEKEHQVLQDQLQEVYENYEQIKLKGLEETRDLEEKLKRHLEENKISKTELDWFLQDLEREIKKWQQEKKEIQERLKSLKKKIKKVSNASEMYTQKNDGKEKEHELHLDQSLEISNTLTNEKMKIEEYIKKGKEDYEESHQRAVAAEVSVLENWKESEVYKLQIMESQAEAFLKKLGLISRDPAAYPDMESDIRSWELFLSNVTKEIEKAKSQFEEQIKAIKNGSRLSELSKVQISELSFPACNTVHPELLPESSGHDGQGLVTSASDVTGNHAALHRDPSVFSAGDSPGEAPSALLPGPPPGQPEATQLTGPKRAGQAALSERSPVADRKQPVPPGRAARSSQSPKKPFNSIIEHLSVVFPCYNSTELAGFIKKVRSKNKNSLSGLSIDEIVQRVTEHILDEQKKKKPNPGKDKRTYEPSSATPVTRSSQGSPSVVVAPSPKTKGQKAEDVPVRIALGASSCEICHEVFKSKNVRVLKCGHKYHKGCFKQWLKGQSACPACQGRDLLTEESPSGRGWPSQNQELPSCSSR

SEQ ID NO: 863403 - protein, 2025 aa, Homo sapiens
MDNFAEGDFTVADYALLEDCPHVDDCVFAAEFMSNDYVRVTQLYCDGVGVQYKDYIQSERNLEFDICSIWCSKPISVLQDYCDAIKINIFWPLLFQHQNSSVISRLHPCVDANNSRASEINLKKLQHLELMEDIVDLAKKVANDSFLIGGLLRIGCKIENKILAMEEALNWIKYAGDVTILTKLGSIDNCWPMLSIFFTEYKYHITKIVMEDCNLLEELKTQSCMDCIEEGELMKMKGNEEFSKERFDIAIIYYTRAIEYRPENYLLYGNRALCFLRTGQFRNALGDGKRATILKNTWPKGHYRYCDALSMLGEYDWALQANIKAQKLCKNDPEGIKDLIQQHVKLQKQIEDLQGRTANKDPIKAFYENRAYTPRSLSAPIFTTSLNFVEKERDFRKINHEMANGGNQNLKVADEALKVDDCDCHPEFSPPSSQPPKHKGKQKSRNNESEKFSSSSPLTLPADLKNILEKQFSKSSRAAHQDFANIMKMLRSLIQDGYMALLEQRCRSAAQAFTELLNGLDPQKIKQLNLAMINYVLVVYGLAISLLGIGQPEELSEAENQFKRIIEHYPSEGLDCLAYCGIGKVYLKKNRFLEALNHFEKARTLIYRLPGVLTWPTSNVIIEESQPQKIKMLLEKFVEECKFPPVPDAICCYQKCHGYSKIQIYITDPDFKGFIRISCCQYCKIEFHMNCWKKLKTTTFNDKIDKDFLQGICLTPDCEGVISKIIIFSSGGEVKCEFEHKVIKEKVPPRPILKQKCSSLEKLRLKEDKKLKRKIQKKEAKKLAQERMEEDLRESNPPKNEEQKETVDNVQRCQFLDDRILQCIKQYADKIKSGIQNTAMLLKELLSWKVLSTEDYTTCFSSRNFLNEAVDYVIRHLIQENNRVKTRIFLHVLSELKEVEPKLAAWIQKLNSFGLDATGTFFSRYGASLKLLDFSIMTFLWNEKYGHKLDSIEGKQLDYFSEPASLKEARCLIWLLEEHRDKFPALHSALDEFFDIMDSRCTVLRKQDSGEAPFSSTKVKNKSKKKKPKDSKPMLVGSGTTSVTSNNEIITSSEDHSNRNSDSAGPFAVPDHLRQDVEEFEALYDQHSNEYVVRNKKLWDMNPKQKCSTLYDYFSQFLEEHGPLDMSNKMFSAEYEFFPEETRQILEKAGGLKPFLLGCPRFVVIDNCIALKKVASRLKKKRKKKNIKTKVEEISKAGEYVRVKLQLNPAAREFKPDVKSKPVSDSSSAPAFENVKPKPVSANSPKPACEDVKAKPVSDNSSRQVSEDGQPKGVSSNSPKPGSEDANYKRVSCNSPKPVLEDVKPTYWAQSHLVTGYCTYLPFQRFDITQTPPAYINVLPGLPQYTSIYTPLASLSPEYQLPRSVPVVPSFVANDRADKNAAAYFEGHHLNAENVAGHQIASETQILEGSLGISVKSHCSTGDAHTVLSESNRNDEHCGNSNNKCEVIPESTSAVTNIPHVQMVAIQVSWNIIHQEVNTEPYNPFEERQGEISRIEKEHQVLQDQLQEVYENYEQIKLKGLEETRDLEEKLKRHLEENKISKTELDWFLQDLEREIKKWQQEKKEIQERLKSLKKKIKKVSNASEMYTQKNDGKEKEHELHLDQSLEISNTLTNEKMKIEEYIKKGKEDYEESHQRAVAAEVSVLENWKESEVYKLQIMESQAEAFLKKLGLISRDPAAYPDMESDIRSWELFLSNVTKEIEKAKSQFEEQIKAIKNGSRLSELSKVQISELSFPACNTVHPELLPESSGHDGQGLVTSASDVTGNHAALHRDPSVFSAGDSPGEAPSALLPGPPPGQPEATQLTGPKRAGQAALSERSPVADRKQPVPPGRAARSSQSPKKPFNSIIEHLSVVFPCYNSTELAGFIKKVRSKNKNSLSGLSIDEIVQRVTEHILDEQKKKKPNPGKDKRTYEPSSATPVTRSSQGSPSVVVAPSPKTKGQKAEDVPVRIALGASSCEICHEVFKSKNVRVLKCGHKYHKGCFKQWLKGQSACPACQGRDLLTEESPSGRGWPSQNQELPSCSSR

SEQ ID NO: 863404 - protein, 2069 aa, Homo sapiens
PDIFSLTKRTYHKNIFTQIALNQKTSIHNVKNEKLANLLTTLCTMDNFAEGDFTVADYALLEDCPHVDDCVFAAEFMSNDYVRVTQLYCDGVGVQYKDYIQSERNLEFDICSIWCSKPISVLQDYCDAIKINIFWPLLFQHQNSSVISRLHPCVDANNSRASEINLKKLQHLELMEDIVDLAKKVANDSFLIGGLLRIGCKIENKILAMEEALNWIKYAGDVTILTKLGSIDNCWPMLSIFFTEYKYHITKIVMEDCNLLEELKTQSCMDCIEEGELMKMKGNEEFSKERFDIAIIYYTRAIEYRPENYLLYGNRALCFLRTGQFRNALGDGKRATILKNTWPKGHYRYCDALSMLGEYDWALQANIKAQKLCKNDPEGIKDLIQQHVKLQKQIEDLQGRTANKDPIKAFYENRAYTPRSLSAPIFTTSLNFVEKERDFRKINHEMANGGNQNLKVADEALKVDDCDCHPEFSPPSSQPPKHKGKQKSRNNESEKFSSSSPLTLPADLKNILEKQFSKSSRAAHQDFANIMKMLRSLIQDGYMALLEQRCRSAAQAFTELLNGLDPQKIKQLNLAMINYVLVVYGLAISLLGIGQPEELSEAENQFKRIIEHYPSEGLDCLAYCGIGKVYLKKNRFLEALNHFEKARTLIYRLPGVLTWPTSNVIIEESQPQKIKMLLEKFVEECKFPPVPDAICCYQKCHGYSKIQIYITDPDFKGFIRISCCQYCKIEFHMNCWKKLKTTTFNDKIDKDFLQGICLTPDCEGVISKIIIFSSGGEVKCEFEHKVIKEKVPPRPILKQKCSSLEKLRLKEDKKLKRKIQKKEAKKLAQERMEEDLRESNPPKNEEQKETVDNVQRCQFLDDRILQCIKQYADKIKSGIQNTAMLLKELLSWKVLSTEDYTTCFSSRNFLNEAVDYVIRHLIQENNRVKTRIFLHVLSELKEVEPKLAAWIQKLNSFGLDATGTFFSRYGASLKLLDFSIMTFLWNEKYGHKLDSIEGKQLDYFSEPASLKEARCLIWLLEEHRDKFPALHSALDEFFDIMDSRCTVLRKQDSGEAPFSSTKVKNKSKKKKPKDSKPMLVGSGTTSVTSNNEIITSSEDHSNRNSDSAGPFAVPDHLRQDVEEFEALYDQHSNEYVVRNKKLWDMNPKQKCSTLYDYFSQFLEEHGPLDMSNKMFSAEYEFFPEETRQILEKAGGLKPFLLGCPRFVVIDNCIALKKVASRLKKKRKKKNIKTKVEEISKAGEYVRVKLQLNPAAREFKPDVKSKPVSDSSSAPAFENVKPKPVSANSPKPACEDVKAKPVSDNSSRQVSEDGQPKGVSSNSPKPGSEDANYKRVSCNSPKPVLEDVKPTYWAQSHLVTGYCTYLPFQRFDITQTPPAYINVLPGLPQYTSIYTPLASLSPEYQLPRSVPVVPSFVANDRADKNAAAYFEGHHLNAENVAGHQIASETQILEGSLGISVKSHCSTGDAHTVLSESNRNDEHCGNSNNKCEVIPESTSAVTNIPHVQMVAIQVSWNIIHQEVNTEPYNPFEERQGEISRIEKEHQVLQDQLQEVYENYEQIKLKGLEETRDLEEKLKRHLEENKISKTELDWFLQDLEREIKKWQQEKKEIQERLKSLKKKIKKVSNASEMYTQKNDGKEKEHELHLDQSLEISNTLTNEKMKIEEYIKKGKEDYEESHQRAVAAEVSVLENWKESEVYKLQIMESQAEAFLKKLGLISRDPAAYPDMESDIRSWELFLSNVTKEIEKAKSQFEEQIKAIKNGSRLSELSKVQISELSFPACNTVHPELLPESSGHDGQGLVTSASDVTGNHAALHRDPSVFSAGDSPGEAPSALLPGPPPGQPEATQLTGPKRAGQAALSERSPVADRKQPVPPGRAARSSQSPKKPFNSIIEHLSVVFPCYNSTELAGFIKKVRSKNKNSLSGLSIDEIVQRVTEHILDEQKKKKPNPGKDKRTYEPSSATPVTRSSQGSPSVVVAPSPKTKGQKAEDVPVRIALGASSCEICHEVFKSKNVRVLKCGHKYHKGCFKQWLKGQSACPACQGRDLLTEESPSGRGWPSQNQELPSCSSR

SEQ ID NO: 863405 - protein, 1914 aa, Homo sapiens
MYNSRASEINLKKLQHLELMEDIVDLAKKVANDSFLIGGLLRIGCKIENKILAMEEALNWIKYAGDVTILTKLGSIDNCWPMLSIFFTEYKYHITKIVMEDCNLLEELKTQSCMDCIEEGELMKMKGNEEFSKERFDIAIIYYTRAIEYRPENYLLYGNRALCFLRTGQFRNALGDGKRATILKNTWPKGHYRYCDALSMLGEYDWALQANIKAQKLCKNDPEGIKDLIQQHVKLQKQIEDLQGRTANKDPIKAFYENRAYTPRSLSAPIFTTSLNFVEKERDFRKINHEMANGGNQNLKVADEALKVDDCDCHPEFSPPSSQPPKHKGKQKSRNNESEKFSSSSPLTLPADLKNILEKQFSKSSRAAHQDFANIMKMLRSLIQDGYMALLEQRCRSAAQAFTELLNGLDPQKIKQLNLAMINYVLVVYGLAISLLGIGQPEELSEAENQFKRIIEHYPSEGLDCLAYCGIGKVYLKKNRFLEALNHFEKARTLIYRLPGVLTWPTSNVIIEESQPQKIKMLLEKFVEECKFPPVPDAICCYQKCHGYSKIQIYITDPDFKGFIRISCCQYCKIEFHMNCWKKLKTTTFNDKIDKDFLQGICLTPDCEGVISKIIIFSSGGEVKCEFEHKVIKEKVPPRPILKQKCSSLEKLRLKEDKKLKRKIQKKEAKKLAQERMEEDLRESNPPKNEEQKETVDNVQRCQFLDDRILQCIKQYADKIKSGIQNTAMLLKELLSWKVLSTEDYTTCFSSRNFLNEAVDYVIRHLIQENNRVKTRIFLHVLSELKEVEPKLAAWIQKLNSFGLDATGTFFSRYGASLKLLDFSIMTFLWNEKYGHKLDSIEGKQLDYFSEPASLKEARCLIWLLEEHRDKFPALHSALDEFFDIMDSRCTVLRKQDSGEAPFSSTKVKNKSKKKKPKDSKPMLVGSGTTSVTSNNEIITSSEDHSNRNSDSAGPFAVPDHLRQDVEEFEALYDQHSNEYVVRNKKLWDMNPKQKCSTLYDYFSQFLEEHGPLDMSNKMFSAEYEFFPEETRQILEKAGGLKPFLLGCPRFVVIDNCIALKKVASRLKKKRKKKNIKTKVEEISKAGEYVRVKLQLNPAAREFKPDVKSKPVSDSSSAPAFENVKPKPVSANSPKPACEDVKAKPVSDNSSRQVSEDGQPKGVSSNSPKPGSEDANYKRVSCNSPKPVLEDVKPTYWAQSHLVTGYCTYLPFQRFDITQTPPAYINVLPGLPQYTSIYTPLASLSPEYQLPRSVPVVPSFVANDRADKNAAAYFEGHHLNAENVAGHQIASETQILEGSLGISVKSHCSTGDAHTVLSESNRNDEHCGNSNNKCEVIPESTSAVTNIPHVQMVAIQVSWNIIHQEVNTEPYNPFEERQGEISRIEKEHQVLQDQLQEVYENYEQIKLKGLEETRDLEEKLKRHLEENKISKTELDWFLQDLEREIKKWQQEKKEIQERLKSLKKKIKKVSNASEMYTQKNDGKEKEHELHLDQSLEISNTLTNEKMKIEEYIKKGKEDYEESHQRAVAAEVSVLENWKESEVYKLQIMESQAEAFLKKLGLISRDPAAYPDMESDIRSWELFLSNVTKEIEKAKSQFEEQIKAIKNGSRLSELSKVQISELSFPACNTVHPELLPESSGHDGQGLVTSASDVTGNHAALHRDPSVFSAGDSPGEAPSALLPGPPPGQPEATQLTGPKRAGQAALSERSPVADRKQPVPPGRAARSSQSPKKPFNSIIEHLSVVFPCYNSTELAGFIKKVRSKNKNSLSGLSIDEIVQRVTEHILDEQKKKKPNPGKDKRTYEPSSATPVTRSSQGSPSVVVAPSPKTKGQKAEDVPVRIALGASSCEICHEVFKSKNVRVLKCGHKYHKGCFKQWLKGQSACPACQGRDLLTEESPSGRGWPSQNQELPSCSSR

SEQ ID NO: 863406 - protein, 1715 aa, Homo sapiens
MLGEYDWALQANIKAQKLCKNDPEGIKDLIQQHVKLQKQIEDLQGRTANKDPIKAFYENRAYTPRSLSAPIFTTSLNFVEKERDFRKINHEMANGGNQNLKVADEALKVDDCDCHPEFSPPSSQPPKHKGKQKSRNNESEKFSSSSPLTLPADLKNILEKQFSKSSRAAHQDFANIMKMLRSLIQDGYMALLEQRCRSAAQAFTELLNGLDPQKIKQLNLAMINYVLVVYGLAISLLGIGQPEELSEAENQFKRIIEHYPSEGLDCLAYCGIGKVYLKKNRFLEALNHFEKARTLIYRLPGVLTWPTSNVIIEESQPQKIKMLLEKFVEECKFPPVPDAICCYQKCHGYSKIQIYITDPDFKGFIRISCCQYCKIEFHMNCWKKLKTTTFNDKIDKDFLQGICLTPDCEGVISKIIIFSSGGEVKCEFEHKVIKEKVPPRPILKQKCSSLEKLRLKEDKKLKRKIQKKEAKKLAQERMEEDLRESNPPKNEEQKETVDNVQRCQFLDDRILQCIKQYADKIKSGIQNTAMLLKELLSWKVLSTEDYTTCFSSRNFLNEAVDYVIRHLIQENNRVKTRIFLHVLSELKEVEPKLAAWIQKLNSFGLDATGTFFSRYGASLKLLDFSIMTFLWNEKYGHKLDSIEGKQLDYFSEPASLKEARCLIWLLEEHRDKFPALHSALDEFFDIMDSRCTVLRKQDSGEAPFSSTKVKNKSKKKKPKDSKPMLVGSGTTSVTSNNEIITSSEDHSNRNSDSAGPFAVPDHLRQDVEEFEALYDQHSNEYVVRNKKLWDMNPKQKCSTLYDYFSQFLEEHGPLDMSNKMFSAEYEFFPEETRQILEKAGGLKPFLLGCPRFVVIDNCIALKKVASRLKKKRKKKNIKTKVEEISKAGEYVRVKLQLNPAAREFKPDVKSKPVSDSSSAPAFENVKPKPVSANSPKPACEDVKAKPVSDNSSRQVSEDGQPKGVSSNSPKPGSEDANYKRVSCNSPKPVLEDVKPTYWAQSHLVTGYCTYLPFQRFDITQTPPAYINVLPGLPQYTSIYTPLASLSPEYQLPRSVPVVPSFVANDRADKNAAAYFEGHHLNAENVAGHQIASETQILEGSLGISVKSHCSTGDAHTVLSESNRNDEHCGNSNNKCEVIPESTSAVTNIPHVQMVAIQVSWNIIHQEVNTEPYNPFEERQGEISRIEKEHQVLQDQLQEVYENYEQIKLKGLEETRDLEEKLKRHLEENKISKTELDWFLQDLEREIKKWQQEKKEIQERLKSLKKKIKKVSNASEMYTQKNDGKEKEHELHLDQSLEISNTLTNEKMKIEEYIKKGKEDYEESHQRAVAAEVSVLENWKESEVYKLQIMESQAEAFLKKLGLISRDPAAYPDMESDIRSWELFLSNVTKEIEKAKSQFEEQIKAIKNGSRLSELSKVQISELSFPACNTVHPELLPESSGHDGQGLVTSASDVTGNHAALHRDPSVFSAGDSPGEAPSALLPGPPPGQPEATQLTGPKRAGQAALSERSPVADRKQPVPPGRAARSSQSPKKPFNSIIEHLSVVFPCYNSTELAGFIKKVRSKNKNSLSGLSIDEIVQRVTEHILDEQKKKKPNPGKDKRTYEPSSATPVTRSSQGSPSVVVAPSPKTKGQKAEDVPVRIALGASSCEICHEVFKSKNVRVLKCGHKYHKGCFKQWLKGQSACPACQGRDLLTEESPSGRGWPSQNQELPSCSSR

SEQ ID NO: 863407 - protein, 1681 aa, Homo sapiens
YVCVCVMTFIGRTANKDPIKAFYENRAYTPRSLSAPIFTTSLNFVEKERDFRKINHEMANGGNQNLKVADEALKVDDCDCHPEFSPPSSQPPKHKGKQKSRNNESEKFSSSSPLTLPADLKNILEKQFSKSSRAAHQDFANIMKMLRSLIQDGYMALLEQRCRSAAQAFTELLNGLDPQKIKQLNLAMINYVLVVYGLAISLLGIGQPEELSEAENQFKRIIEHYPSEGLDCLAYCGIGKVYLKKNRFLEALNHFEKARTLIYRLPGVLTWPTSNVIIEESQPQKIKMLLEKFVEECKFPPVPDAICCYQKCHGYSKIQIYITDPDFKGFIRISCCQYCKIEFHMNCWKKLKTTTFNDKIDKDFLQGICLTPDCEGVISKIIIFSSGGEVKCEFEHKVIKEKVPPRPILKQKCSSLEKLRLKEDKKLKRKIQKKEAKKLAQERMEEDLRESNPPKNEEQKETVDNVQRCQFLDDRILQCIKQYADKIKSGIQNTAMLLKELLSWKVLSTEDYTTCFSSRNFLNEAVDYVIRHLIQENNRVKTRIFLHVLSELKEVEPKLAAWIQKLNSFGLDATGTFFSRYGASLKLLDFSIMTFLWNEKYGHKLDSIEGKQLDYFSEPASLKEARCLIWLLEEHRDKFPALHSALDEFFDIMDSRCTVLRKQDSGEAPFSSTKVKNKSKKKKPKDSKPMLVGSGTTSVTSNNEIITSSEDHSNRNSDSAGPFAVPDHLRQDVEEFEALYDQHSNEYVVRNKKLWDMNPKQKCSTLYDYFSQFLEEHGPLDMSNKMFSAEYEFFPEETRQILEKAGGLKPFLLGCPRFVVIDNCIALKKVASRLKKKRKKKNIKTKVEEISKAGEYVRVKLQLNPAAREFKPDVKSKPVSDSSSAPAFENVKPKPVSANSPKPACEDVKAKPVSDNSSRQVSEDGQPKGVSSNSPKPGSEDANYKRVSCNSPKPVLEDVKPTYWAQSHLVTGYCTYLPFQRFDITQTPPAYINVLPGLPQYTSIYTPLASLSPEYQLPRSVPVVPSFVANDRADKNAAAYFEGHHLNAENVAGHQIASETQILEGSLGISVKSHCSTGDAHTVLSESNRNDEHCGNSNNKCEVIPESTSAVTNIPHVQMVAIQVSWNIIHQEVNTEPYNPFEERQGEISRIEKEHQVLQDQLQEVYENYEQIKLKGLEETRDLEEKLKRHLEENKISKTELDWFLQDLEREIKKWQQEKKEIQERLKSLKKKIKKVSNASEMYTQKNDGKEKEHELHLDQSLEISNTLTNEKMKIEEYIKKGKEDYEESHQRAVAAEVSVLENWKESEVYKLQIMESQAEAFLKKLGLISRDPAAYPDMESDIRSWELFLSNVTKEIEKAKSQFEEQIKAIKNGSRLSELSKVQISELSFPACNTVHPELLPESSGHDGQGLVTSASDVTGNHAALHRDPSVFSAGDSPGEAPSALLPGPPPGQPEATQLTGPKRAGQAALSERSPVADRKQPVPPGRAARSSQSPKKPFNSIIEHLSVVFPCYNSTELAGFIKKVRSKNKNSLSGLSIDEIVQRVTEHILDEQKKKKPNPGKDKRTYEPSSATPVTRSSQGSPSVVVAPSPKTKGQKAEDVPVRIALGASSCEICHEVFKSKNVRVLKCGHKYHKGCFKQWLKGQSACPACQGRDLLTEESPSGRGWPSQNQELPSCSSR

SEQ ID NO: 863408 - protein, 1494 aa, Homo sapiens
MINYVLVVYGLAISLLGIGQPEELSEAENQFKRIIEHYPSEGLDCLAYCGIGKVYLKKNRFLEALNHFEKARTLIYRLPGVLTWPTSNVIIEESQPQKIKMLLEKFVEECKFPPVPDAICCYQKCHGYSKIQIYITDPDFKGFIRISCCQYCKIEFHMNCWKKLKTTTFNDKIDKDFLQGICLTPDCEGVISKIIIFSSGGEVKCEFEHKVIKEKVPPRPILKQKCSSLEKLRLKEDKKLKRKIQKKEAKKLAQERMEEDLRESNPPKNEEQKETVDNVQRCQFLDDRILQCIKQYADKIKSGIQNTAMLLKELLSWKVLSTEDYTTCFSSRNFLNEAVDYVIRHLIQENNRVKTRIFLHVLSELKEVEPKLAAWIQKLNSFGLDATGTFFSRYGASLKLLDFSIMTFLWNEKYGHKLDSIEGKQLDYFSEPASLKEARCLIWLLEEHRDKFPALHSALDEFFDIMDSRCTVLRKQDSGEAPFSSTKVKNKSKKKKPKDSKPMLVGSGTTSVTSNNEIITSSEDHSNRNSDSAGPFAVPDHLRQDVEEFEALYDQHSNEYVVRNKKLWDMNPKQKCSTLYDYFSQFLEEHGPLDMSNKMFSAEYEFFPEETRQILEKAGGLKPFLLGCPRFVVIDNCIALKKVASRLKKKRKKKNIKTKVEEISKAGEYVRVKLQLNPAAREFKPDVKSKPVSDSSSAPAFENVKPKPVSANSPKPACEDVKAKPVSDNSSRQVSEDGQPKGVSSNSPKPGSEDANYKRVSCNSPKPVLEDVKPTYWAQSHLVTGYCTYLPFQRFDITQTPPAYINVLPGLPQYTSIYTPLASLSPEYQLPRSVPVVPSFVANDRADKNAAAYFEGHHLNAENVAGHQIASETQILEGSLGISVKSHCSTGDAHTVLSESNRNDEHCGNSNNKCEVIPESTSAVTNIPHVQMVAIQVSWNIIHQEVNTEPYNPFEERQGEISRIEKEHQVLQDQLQEVYENYEQIKLKGLEETRDLEEKLKRHLEENKISKTELDWFLQDLEREIKKWQQEKKEIQERLKSLKKKIKKVSNASEMYTQKNDGKEKEHELHLDQSLEISNTLTNEKMKIEEYIKKGKEDYEESHQRAVAAEVSVLENWKESEVYKLQIMESQAEAFLKKLGLISRDPAAYPDMESDIRSWELFLSNVTKEIEKAKSQFEEQIKAIKNGSRLSELSKVQISELSFPACNTVHPELLPESSGHDGQGLVTSASDVTGNHAALHRDPSVFSAGDSPGEAPSALLPGPPPGQPEATQLTGPKRAGQAALSERSPVADRKQPVPPGRAARSSQSPKKPFNSIIEHLSVVFPCYNSTELAGFIKKVRSKNKNSLSGLSIDEIVQRVTEHILDEQKKKKPNPGKDKRTYEPSSATPVTRSSQGSPSVVVAPSPKTKGQKAEDVPVRIALGASSCEICHEVFKSKNVRVLKCGHKYHKGCFKQWLKGQSACPACQGRDLLTEESPSGRGWPSQNQELPSCSSR

SEQ ID NO: 863409 - protein, 1394 aa, Homo sapiens
MLLEKFVEECKFPPVPDAICCYQKCHGYSKIQIYITDPDFKGFIRISCCQYCKIEFHMNCWKKLKTTTFNDKIDKDFLQGICLTPDCEGVISKIIIFSSGGEVKCEFEHKVIKEKVPPRPILKQKCSSLEKLRLKEDKKLKRKIQKKEAKKLAQERMEEDLRESNPPKNEEQKETVDNVQRCQFLDDRILQCIKQYADKIKSGIQNTAMLLKELLSWKVLSTEDYTTCFSSRNFLNEAVDYVIRHLIQENNRVKTRIFLHVLSELKEVEPKLAAWIQKLNSFGLDATGTFFSRYGASLKLLDFSIMTFLWNEKYGHKLDSIEGKQLDYFSEPASLKEARCLIWLLEEHRDKFPALHSALDEFFDIMDSRCTVLRKQDSGEAPFSSTKVKNKSKKKKPKDSKPMLVGSGTTSVTSNNEIITSSEDHSNRNSDSAGPFAVPDHLRQDVEEFEALYDQHSNEYVVRNKKLWDMNPKQKCSTLYDYFSQFLEEHGPLDMSNKMFSAEYEFFPEETRQILEKAGGLKPFLLGCPRFVVIDNCIALKKVASRLKKKRKKKNIKTKVEEISKAGEYVRVKLQLNPAAREFKPDVKSKPVSDSSSAPAFENVKPKPVSANSPKPACEDVKAKPVSDNSSRQVSEDGQPKGVSSNSPKPGSEDANYKRVSCNSPKPVLEDVKPTYWAQSHLVTGYCTYLPFQRFDITQTPPAYINVLPGLPQYTSIYTPLASLSPEYQLPRSVPVVPSFVANDRADKNAAAYFEGHHLNAENVAGHQIASETQILEGSLGISVKSHCSTGDAHTVLSESNRNDEHCGNSNNKCEVIPESTSAVTNIPHVQMVAIQVSWNIIHQEVNTEPYNPFEERQGEISRIEKEHQVLQDQLQEVYENYEQIKLKGLEETRDLEEKLKRHLEENKISKTELDWFLQDLEREIKKWQQEKKEIQERLKSLKKKIKKVSNASEMYTQKNDGKEKEHELHLDQSLEISNTLTNEKMKIEEYIKKGKEDYEESHQRAVAAEVSVLENWKESEVYKLQIMESQAEAFLKKLGLISRDPAAYPDMESDIRSWELFLSNVTKEIEKAKSQFEEQIKAIKNGSRLSELSKVQISELSFPACNTVHPELLPESSGHDGQGLVTSASDVTGNHAALHRDPSVFSAGDSPGEAPSALLPGPPPGQPEATQLTGPKRAGQAALSERSPVADRKQPVPPGRAARSSQSPKKPFNSIIEHLSVVFPCYNSTELAGFIKKVRSKNKNSLSGLSIDEIVQRVTEHILDEQKKKKPNPGKDKRTYEPSSATPVTRSSQGSPSVVVAPSPKTKGQKAEDVPVRIALGASSCEICHEVFKSKNVRVLKCGHKYHKGCFKQWLKGQSACPACQGRDLLTEESPSGRGWPSQNQELPSCSSR

SEQ ID NO: 863410 - protein, 1273 aa, Homo sapiens
MYNSRASEINLKKLQHLELMEDIVDLAKKVANDSFLIGGLLRIGCKIENKILAMEEALNWIKYAGDVTILTKLGSIDNCWPMLSIFFTEYKYHITKIVMEDCNLLEELKTQSCMDCIEEGELMKMKGNEEFSKERFDIAIIYYTRAIEYRPENYLLYGNRALCFLRTGQFRNALGDGKRATILKNTWPKGHYRYCDALSMLGEYDWALQANIKAQKLCKNDPEGIKDLIQQHVKLQKQIEDLQGRTANKDPIKAFYENRAYTPRSLSAPIFTTSLNFVEKERDFRKINHEMANGGNQNLKVADEALKVDDCDCHPEFSPPSSQPPKHKGKQKSRNNESEKFSSSSPLTLPADLKNILEKQFSKSSRAAHQDFANIMKMLRSLIQDGYMALLEQRCRSAAQAFTELLNGLDPQKIKQLNLAMINYVLVVYGLAISLLGIGQPEELSEAENQFKRIIEHYPSEGLDCLAYCGIGKVYLKKNRFLEALNHFEKARTLIYRLPGVLTWPTSNVIIEESQPQKIKMLLEKFVEECKFPPVPDAICCYQKCHGYSKIQIYITDPDFKGFIRISCCQYCKIEFHMNCWKKLKTTTFNDKIDKDFLQGICLTPDCEGVISKIIIFSSGGEVKCEFEHKVIKEKVPPRPILKQKCSSLEKLRLKEDKKLKRKIQKKEAKKLAQERMEEDLRESNPPKNEEQKETVDNVQRCQFLDDRILQCIKQYADKIKSGIQNTAMLLKELLSWKVLSTEDYTTCFSSRNFLNEAVDYVIRHLIQENNRVKTRIFLHVLSELKEVEPKLAAWIQKLNSFGLDATGTFFSRYGASLKLLDFSIMTFLWNEKYGHKLDSIEGKQLDYFSEPASLKEARCLIWLLEEHRDKFPALHSALDEFFDIMDSRCTVLRKQDSGEAPFSSTKVKNKSKKKKPKDSKPMLVGSGTTSVTSNNEIITSSEDHSNRNSDSAGPFAVPDHLRQDVEEFEALYDQHSNEYVVRNKKLWDMNPKQKCSTLYDYFSQFLEEHGPLDMSNKMFSAEYEFFPEETRQILEKAGGLKPFLLGCPRFVVIDNCIALKKVASRLKKKRKKKNIKTKVEEISKAGEYVRVKLQLNPAAREFKPDVKSKPVSDSSSAPAFENVKPKPVSANSPKPACEDVKAKPVSDNSSRQVSEDGQPKGVSSNSPKPGSEDANYKRVSCNSPKPVLEDVKPTYWAQSHLVTGYCTYLPFQRFDITQTPPAYINVLPGLPQYTSIYTPLASLSPEYQLPRSVPVVPSFVANDRADWSPDCL

SEQ ID NO: 863411 - protein, 992 aa, Homo sapiens
MLVGSGTTSVTSNNEIITSSEDHSNRNSDSAGPFAVPDHLRQDVEEFEALYDQHSNEYVVRNKKLWDMNPKQKCSTLYDYFSQFLEEHGPLDMSNKMFSAEYEFFPEETRQILEKAGGLKPFLLGCPRFVVIDNCIALKKVASRLKKKRKKKNIKTKVEEISKAGEYVRVKLQLNPAAREFKPDVKSKPVSDSSSAPAFENVKPKPVSANSPKPACEDVKAKPVSDNSSRQVSEDGQPKGVSSNSPKPGSEDANYKRVSCNSPKPVLEDVKPTYWAQSHLVTGYCTYLPFQRFDITQTPPAYINVLPGLPQYTSIYTPLASLSPEYQLPRSVPVVPSFVANDRADKNAAAYFEGHHLNAENVAGHQIASETQILEGSLGISVKSHCSTGDAHTVLSESNRNDEHCGNSNNKCEVIPESTSAVTNIPHVQMVAIQVSWNIIHQEVNTEPYNPFEERQGEISRIEKEHQVLQDQLQEVYENYEQIKLKGLEETRDLEEKLKRHLEENKISKTELDWFLQDLEREIKKWQQEKKEIQERLKSLKKKIKKVSNASEMYTQKNDGKEKEHELHLDQSLEISNTLTNEKMKIEEYIKKGKEDYEESHQRAVAAEVSVLENWKESEVYKLQIMESQAEAFLKKLGLISRDPAAYPDMESDIRSWELFLSNVTKEIEKAKSQFEEQIKAIKNGSRLSELSKVQISELSFPACNTVHPELLPESSGHDGQGLVTSASDVTGNHAALHRDPSVFSAGDSPGEAPSALLPGPPPGQPEATQLTGPKRAGQAALSERSPVADRKQPVPPGRAARSSQSPKKPFNSIIEHLSVVFPCYNSTELAGFIKKVRSKNKNSLSGLSIDEIVQRVTEHILDEQKKKKPNPGKDKRTYEPSSATPVTRSSQGSPSVVVAPSPKTKGQKAEDVPVRIALGASSCEICHEVFKSKNVRVLKCGHKYHKGCFKQWLKGQSACPACQGRDLLTEESPSGRGWPSQNQELPSCSSR

SEQ ID NO: 863412 - protein, 1916 aa, Homo sapiens
MYNSRASEINLKKLQHLELMEDIVDLAKKVANDSFLIGGLLRIGCKIENKILAMEEALNWIKYAGDVTILTKLGSIDNCWPMLSIFFTEYKYHITKIVMEDCNLLEELKTQSCMDCIEEGELMKMKGNEEFSKERFDIAIIYYTRAIEYRPENYLLYGNRALCFLRTGQFRNALGDGKRATILKNTWPKGHYRYCDALSMLGEYDWALQANIKAQKLCKNDPEGIKDLIQQHVKLQKQIEDLQGRTANKDPIKAFYENRAYTPRSLSAPIFTTSLNFVEKERDFRKINHEMANGGNQNLKVADEALKVDDCDCHPEFSPPSSQPPKHKGKQKSRNNESEKFSSSSPLTLPADLKNILEKQFSKSSRAAHQDFANIMKMLRSLIQDGYMALLEQRCRSAAQAFTELLNGLDPQKIKQLNLAMINYVLVVYGLAISLLGIGQPEELSEAENQFKRIIEHYPSEGLDCLAYCGIGKVYLKKNRFLEALNHFEKARTLIYRLPGVLTWPTSNVIIEESQPQKIKMLLEKFVEECKFPPVPDAICCYQKCHGYSKIQIYITDPDFKGFIRISCCQYCKIEFHMNCWKKLKTTTFNDKIDKDFLQGICLTPDCEGVISKIIIFSSGGEVKCEFEHKVIKEKVPPRPILKQKCSSLEKLRLKEDKKLKRKIQKKEAKKLAQERMEEDLRESNPPKNEEQKETVDNVQRCQFLDDRILQCIKQYADKIKSGIQNTAMLLKELLSWKVLSTEDYTTCFSSRNFLNEAVDYVIRHLIQENNRVKTRIFLHVLSELKEVEPKLAAWIQKLNSFGLDATGTFFSRYGASLKLLDFSIMTFLWNEKYGHKLDSIEGKQLDYFSEPASLKEARCLIWLLEEHRDKFPALHSALDEFFDIMDSRCTVLRKQDSGEAPFSSTKVKNKSKKKKPKDSKPMLVGSGTTSVTSNNEIITSSEDHSNRNSDSAGPFAVPDHLRQDVEEFEALYDQHSNEYVVRNKKLWDMNPKQKCSTLYDYFSQFLEEHGPLDMSNKMFSAEYEFFPEETRQILEKAGGLKPFLLGCPRFVVIDNCIALKKVASRLKKKRKKKNIKTKVEEISKAGEYVRVKLQLNPAAREFKPDVKSKPVSDSSSAPAFENVKPKPVSANSPKPACEDVKAKPVSDNSSRQVSEDGQPKGVSSNSPKPGSEDANYKRVSCNSPKPVLEDVKPTYWAQSHLVTGYCTYLPFQRFDITQTPPAYINVLPGLPQYTSIYTPLASLSPEYQLPRSVPVVPSFVANDRADKNAAAYFEGHHLNAENVAGHQIASETQILEGSLGISVKSHCSTGDAHTVLSESNRNDEHCGNSNNKCEVIPESTSAVTNIPHVQMVAIQVSWNIIHQEVNTEPYNPFEERQGEISRIEKEHQVLQDQLQEVYENYEQIKLKGLEETRDLEEKLKRHLEENKISKTELDWFLQDLEREIKKWQQEKKEIQERLKSLKKKIKKVSNASEMYTQKNDGKEKEHELHLDQSLEISNTLTNEKMKIEEYIKKGKEDYEESHQRAVAAEVSVLENWKESEVYKLQIMESQAEAFLKKLGLISRDPAAYPDMESDIRSWELFLSNVTKEIEKAKSQFEEQIKAIKNGSRLSELSKVQISELSFPACNTVHPELLPESSGHDGQGLVTSASDVTGNHAALHRDPSVFSAGDSPGEAPSALLPGPPPGQPEATQLTGPKRAGQAALSERSPVADRKQPVPPGRAARSSQSPKKPFNSIIEHLSVVFPCYNSTELAGFIKKVRSKNKNSLSGLSIDEIVQRVTEHILDEQKKKKPNPGKDKRTYEPSSATPVTRSSQGSPSVVVAPSPKTKGQKAEDVPVRIALGASSCEICHEVFKSKNVRVLKCGHKYHKGCFKQWLKGQSACPACQGRDLLTEESPSGRGWPSQNQELPSCSSSID

SEQ ID NO: 863413 - protein, 406 aa, Homo sapiens
ARVGTSSCRDYEESHQRAVAAEVSVLENWKESEVYKLQIMESQAEAFLKKLGLISRDPAAYPDMESDIRSWELFLSNVTKEIEKAKSQFEEQIKAIKNGSRLSELSKVQISELSFPACNTVHPELLPESSGHDGQGLVTSASDVTGNHAALHRDPSVFSAGDSPGEAPSALLPGPPPGQPEATQLTGPKRAGQAALSERSPVADRKQPVPPGRAARSSQSPKKPFNSIIEHLSVVFPCYNSTELAGFIKKVRSKNKNSLSGLSIDEIVQRVTEHILDEQKKKKPNPGKDKRTYEPSSATPVTRSSQGSPSVVVAPSPKTKGQKAEDVPVRIALGASSCEICHEVFKSKNVRVLKCGHKYHKGCFKQWLKGQSACPACQGRDLLTEESPSGRGWPSQNQELPSCSSR

SEQ ID NO: 863414 - protein, 367 aa, Homo sapiens
MESQAEAFLKKLGLISRDPAAYPDMESDIRSWELFLSNVTKEIEKAKSQFEEQIKAIKNGSRLSELSKVQISELSFPACNTVHPELLPESSGHDGQGLVTSASDVTGNHAALHRDPSVFSAGDSPGEAPSALLPGPPPGQPEATQLTGPKRAGQAALSERSPVADRKQPVPPGRAARSSQSPKKPFNSIIEHLSVVFPCYNSTELAGFIKKVRSKNKNSLSGLSIDEIVQRVTEHILDEQKKKKPNPGKDKRTYEPSSATPVTRSSQGSPSVVVAPSPKTKGQKAEDVPVRIALGASSCEICHEVFKSKNVRVLKCGHKYHKGCFKQWLKGQSACPACQGRDLLTEESPSGRGWPSQNQELPSCSSR

SEQ ID NO: 863415 - protein, 50 aa, Homo sapiens
  misc_feature (13)..(13): Xaa can be any naturally occurring amino acid
  misc_feature (28)..(28): Xaa can be any naturally occurring amino acid
  misc_feature (40)..(40): Xaa can be any naturally occurring amino acid
MKPALEVRRSDNXRRRPEMYLHNLTGTXYWPISLGVTIIXSFRITRIPSM

SEQ ID NO: 863416 - protein, 1750 aa, Homo sapiens
MYNSRASEINLKKLQHLELMEDIVDLAKKVANDSFLIGGLLRIGCKIENKILAMEEALNWIKYAGDVTILTKLGSIDNCWPMLSIFFTEYKYHITKIVMEDCNLLEELKTQSCMDCIEEGELMKMKGNEEFSKERFDIAIIYYTRAIEYRPENYLLYGNRALCFLRTGQFRNALGDGKRATILKNTWPKGHYRYCDALSMLGEYDWALQANIKAQKLCKNDPEGIKDLIQQHVKLQKQIEDLQGRTANKDPIKAFYENRAYTPRSLSAPIFTTSLNFVEKERDFRKINHEMANGGNQNLKVADEALKVDDCDCHPEFSPPSSQPPKHKGKQKSRNNESEKFSSSSPLTLPADLKNILEKQFSKSSRAAHQDFANIMKMLRSLIQDGYMALLEQRCRSAAQAFTELLNGLDPQKIKQLNLAMINYVLVVYGLAISLLGIGQPEELSEAENQFKRIIEHYPSEGLDCLAYCGIGKVYLKKNRFLEALNHFEKARTLIYRLPGVLTWPTSNVIIEESQPQKIKMLLEKFVEECKFPPVPDAICCYQKCHGYSKIQIYITDPDFKGFIRISCCQYCKIEFHMNCWKKLKTTTFNDKIDKDFLQGICLTPDCEGVISKIIIFSSGGEVKCEFEHKVIKEKVPPRPILKQKCSSLEKLRLKEDKKLKRKIQKKEAKKLAQERMEEDLRESNPPKNEEQKETVDNVQRCQFLDDRILQCIKQYADKIKSGIQNTAMLLKELLSWKVLSTEDYTTCFSSRNFLNEAVDYVIRHLIQENNRVKTRIFLHVLSELKEVEPKLAAWIQKLNSFGLDATGTFFSRYGASLKLLDFSIMTFLWNEKYGHKLDSIEGKQLDYFSEPASLKEARCLIWLLEEHRDKFPALHSALDEFFDIMDSRCTVLRKQDSGEAPFSSTKVKNKSKKKKPKDSKPMLVGSGTTSVTSNNEIITSSEDHSNRNSDSAGPFAVPDHLRQDVEEFEALYDQHSNEYVVRNKKLWDMNPKQKCSTLYDYFSQFLEEHGPLDMSNKMFSAEYEFFPEETRQILEKAGGLKPFLLGCPRFVVIDNCIALKKVASRLKKKRKKKNIKTKVEEISKAGEYVRVKLQLNPAAREFKPDVKSKPVSDSSSAPAFENVKPKPVSANSPKPACEDVKAKPVSDNSSRQVSEDGQPKGVSSNSPKPGSEDANYKRVSCNSPKPVLEDVKPTYWAQSHLVTGYCTYLPFQRFDITQTPPAYINVLPGLPQYTSIYTPLASLSPEYQLPRSVPVVPSFVANDRADKNAAAYFEGHHLNAENVAGHQIASETQILEGSLGISVKSHCSTGDAHTVLSESNRNDEHCGNSNNKCEVIPESTSAVTNIPHVQMVAIQVSWNIIHQEVNTEPYNPFEERQGEISRIEKEHQVLQDQLQEVYENYEQIKLKGLEETRDLEEKLKRHLEENKISKTELDWFLQDLEREIKKWQQEKKEIQERLKSLKKKIKKVSNASEMYTQKNDGKEKEHELHLDQSLEISNTLTNEKMKIEEYIKKGKEDYEESHQRAVAAEVSVLENWKESEVYKLQIMESQAEAFLKKLGLISRDPAAYPDMESDIRSWELFLSNVTKEIEKAKSQFEEQIKAIKNGSRLSELSKVQISELSFPACNTVHPELLPESSGHDGQGLVTSASDVTGNHAALHRDPSVFSAGDSPGEAPSALLPGPPPGQPEATQLTGPKRAGQAALSERSPVADRKQPVPPGRAARSSQSPKKPFNSIIEHLSVVFPCYNSH

SEQ ID NO: 863417 - protein, 1620 aa, Homo sapiens
MYNSRASEINLKKLQHLELMEDIVDLAKKVANDSFLIGGLLRIGCKIENKILAMEEALNWIKYAGDVTILTKLGSIDNCWPMLSIFFTEYKYHITKIVMEDCNLLEELKTQSCMDCIEEGELMKMKGNEEFSKERFDIAIIYYTRAIEYRPENYLLYGNRALCFLRTGQFRNALGDGKRATILKNTWPKGHYRYCDALSMLGEYDWALQANIKAQKLCKNDPEGIKDLIQQHVKLQKQIEDLQGRTANKDPIKAFYENRAYTPRSLSAPIFTTSLNFVEKERDFRKINHEMANGGNQNLKVADEALKVDDCDCHPEFSPPSSQPPKHKGKQKSRNNESEKFSSSSPLTLPADLKNILEKQFSKSSRAAHQDFANIMKMLRSLIQDGYMALLEQRCRSAAQAFTELLNGLDPQKIKQLNLAMINYVLVVYGLAISLLGIGQPEELSEAENQFKRIIEHYPSEGLDCLAYCGIGKVYLKKNRFLEALNHFEKARTLIYRLPGVLTWPTSNVIIEESQPQKIKMLLEKFVEECKFPPVPDAICCYQKCHGYSKIQIYITDPDFKGFIRISCCQYCKIEFHMNCWKKLKTTTFNDKIDKDFLQGICLTPDCEGVISKIIIFSSGGEVKCEFEHKVIKEKVPPRPILKQKCSSLEKLRLKEDKKLKRKIQKKEAKKLAQERMEEDLRESNPPKNEEQKETVDNVQRCQFLDDRILQCIKQYADKIKSGIQNTAMLLKELLSWKVLSTEDYTTCFSSRNFLNEAVDYVIRHLIQENNRVKTRIFLHVLSELKEVEPKLAAWIQKLNSFGLDATGTFFSRYGASLKLLDFSIMTFLWNEKYGHKLDSIEGKQLDYFSEPASLKEARCLIWLLEEHRDKFPALHSALDEFFDIMDSRCTVLRKQDSGEAPFSSTKVKNKSKKKKPKDSKPMLVGSGTTSVTSNNEIITSSEDHSNRNSDSAGPFAVPDHLRQDVEEFEALYDQHSNEYVVRNKKLWDMNPKQKCSTLYDYFSQFLEEHGPLDMSNKMFSAEYEFFPEETRQILEKAGGLKPFLLGCPRFVVIDNCIALKKVASRLKKKRKKKNIKTKVEEISKAGEYVRVKLQLNPAAREFKPDVKSKPVSDSSSAPAFENVKPKPVSANSPKPACEDVKAKPVSDNSSRQVSEDGQPKGVSSNSPKPGSEDANYKRVSCNSPKPVLEDVKPTYWAQSHLVTGYCTYLPFQRFDITQTPPAYINVLPGLPQYTSIYTPLASLSPEYQLPRSVPVVPSFVANDRADKNAAAYFEGHHLNAENVAGHQIASETQILEGSLGISVKSHCSTGDAHTVLSESNRNDEHCGNSNNKCEVIPESTSAVTNIPHVQMVAIQVSWNIIHQEVNTEPYNPFEERQGEISRIEKEHQVLQDQLQEVYENYEQIKLKGLEETRDLEEKLKRHLEENKISKTELDWFLQDLEREIKKWQQEKKEIQERLKSLKKKIKKVSNASEMYTQKNDGKEKEHELHLDQSLEISNTLTNEKMKIEEYIKKGKEDYEESHQRAVAAEVSVLENWKESEVYKLQIMESQAEAFLKKLGLISRDPAAYPDMESDIRSWELFLSNVTKEIEKAKSQFEEQIKAIKNGSRLRWCGVPSSNV

SEQ ID NO: 863418 - protein, 811 aa, Homo sapiens
MYNSRASEINLKKLQHLELMEDIVDLAKKVANDSFLIGGLLRIGCKIENKILAMEEALNWIKYAGDVTILTKLGSIDNCWPMLSIFFTEYKYHITKIVMEDCNLLEELKTQSCMDCIEEGELMKMKGNEEFSKERFDIAIIYYTRAIEYRPENYLLYGNRALCFLRTGQFRNALGDGKRATILKNTWPKGHYRYCDALSMLGEYDWALQANIKAQKLCKNDPEGIKDLIQQHVKLQKQIEDLQGRTANKDPIKAFYENRAYTPRSLSAPIFTTSLNFVEKERDFRKINHEMANGGNQNLKVADEALKVDDCDCHPEFSPPSSQPPKHKGKQKSRNNESEKFSSSSPLTLPADLKNILEKQFSKSSRAAHQDFANIMKMLRSLIQDGYMALLEQRCRSAAQAFTELLNGLDPQKIKQLNLAMINYVLVVYGLAISLLGIGQPEELSEAENQFKRIIEHYPSEGLDCLAYCGIGKVYLKKNRFLEALNHFEKARTLIYRLPGVLTWPTSNVIIEESQPQKIKMLLEKFVEECKFPPVPDAICCYQKCHGYSKIQIYITDPDFKGFIRISCCQYCKIEFHMNCWKKLKTTTFNDKIDKDFLQGICLTPDCEGVISKIIIFSSGGEVKCEFEHKVIKEKVPPRPILKQKCSSLEKLRLKEDKKLKRKIQKKEAKKLAQERMEEDLRESNPPKNEEQKETVDNVQRCQFLDDRILQCIKQYADKIKSGIQNTAMLLKELLSWKVLSTEDYTTCFSSRNFLNEAVDYVIRHLIQENNRVKTRIFLHVLSELKEVEPKLAAWIQKLNSFGMSLYIPEQ

SEQ ID NO: 863419 - protein, 566 aa, Homo sapiens
MDNFAEGDFTVADYALLEDCPHVDDCVFAAEFMSNDYVRVTQLYCDGVGVQYKDYIQSERNLEFDICSIWCSKPISVLQDYCDAIKINIFWPLLFQHQNSSVISRLHPCVDANNSRASEINLKKLQHLELMEDIVDLAKKVANDSFLIGGLLRIGCKIENKILAMEEALNWIKYAGDVTILTKLGSIDNCWPMLSIFFTEYKYHITKIVMEDCNLLEELKTQSCMDCIEEGELMKMKGNEEFSKERFDIAIIYYTRAIEYRPENYLLYGNRALCFLRTGQFRNALGDGKRATILKNTWPKGHYRYCDALSMLGEYDWALQANIKAQKLCKNDPEGIKDLIQQHVKLQKQIEDLQGRTANKDPIKAFYENRAYTPRSLSAPIFTTSLNFVEKERDFRKINHEMANGGNQNLKVADEALKVDDCDCHPEFSPPSSQLYNVGNHKSRTTDSQTVTSSSPIELNQQMRRHLADTGVENLQSCHRIANIRNARSYSEATWLLADRCRSCTASEVARDTQNQESRTSAPGDAGLPDDTASTTPSATARGSAAHQSARRTHNNHRGLIAERPP

SEQ ID NO: 863420 - protein, 388 aa, Homo sapiens
MDNFAEGDFTVADYALLEDCPHVDDCVFAAEFMSNDYVRVTQLYCDGVGVQYKDYIQSERNLEFDICSIWCSKPISVLQDYCDAIKINIFWPLLFQHQNSSVISRLHPCVDANNSRASEINLKKLQHLELMEDIVDLAKKVANDSFLIGGLLRIGCKIENKILAMEEALNWIKYAGDVTILTKLGSIDNCWPMLSIFFTEYKYHITKIVMEDCNLLEELKTQSCMDCIEEGELMKMKGNEEFSKERFDIAIIYYTRAIEYRPENYLLYGNRALCFLRTGQFRNALGDGKRATILKNTWPKGHYRYCDALSMLGEYDWALQANIKAQKLCKNDPEGIKDLIQQHVKLQKQIEDLQGISPKILLVTVLIPFQTLEGGFLGLTEDHKSILR

SEQ ID NO: 863421 - protein, 1790 aa, Homo sapiens; identical to SEQ ID NO: 863402

SEQ ID NO: 863422 - protein, 2025 aa, Homo sapiens; identical to SEQ ID NO: 863403

SEQ ID NO: 863423 - protein, 1790 aa, Homo sapiens; identical to SEQ ID NO: 863402

SEQ ID NO: 863424 - protein, 1715 aa, Homo sapiens; identical to SEQ ID NO: 863406

SEQ ID NO: 863425 - protein, 1880 aa, Homo sapiens
MYNSRASEINLKKLQHLELMEDIVDLAKKVANDSFLIGGLLRIGCKIENKILAMEEALNWIKYAGDVTILTKLGSIDNCWPMLSIFFTEYKYHITKIVMEDCNLLEELKTQSCMDCIEEGELMKMKGNEEFSKERFDIAIIYYTRAIEYRPENYLLYGNRALCFLRTGQFRNALGDGKRATILKNTWPKGHYRYCDALSMLGEYDWALQANIKAQKLCKNDPEGIKDLIQQHVKLQKQIEDLQGRTANKDPIKAFYENRAYTPRSLSAPIFTTSLNFVEKERDFRKINHEMANGGNQNLKVADEALKVDDCDCHPEFSPPSSQPPKHKGKQKSRNNESEKFSSSSPLTLPADLKNILEKQFSKSSRAAHQDFANIMKMLRSLIQDGYMALLEQRCRSAAQAFTELLNGLDPQKIKQLNLAMINYVLVVYGLAISLLGIGQPEELSEAENQFKRIIEHYPSEGLDCLAYCGIGKVYLKKNRFLEALNHFEKARTLIYRLPGVLTWPTSNVIIEESQPQKIKMLLEKFVEECKFPPVPDAICCYQKCHGYSKIQIYITDPDFKDFLQGICLTPDCEGVISKIIIFSSGGEVKCEFEHKVIKEKVPPRPILKQKCSSLEKLRLKEDKKLKRKIQKKEAKKLAQERMEEDLRESNPPKNEEQKETVDNVQRCQFLDDRILQCIKQYADKIKSGIQNTAMLLKELLSWKVLSTEDYTTCFSSRNFLNEAVDYVIRHLIQENNRVKTRIFLHVLSELKEVEPKLAAWIQKLNSFGLDATGTFFSRYGASLKLLDFSIMTFLWNEKYGHKLDSIEGKQLDYFSEPASLKEARCLIWLLEEHRDKFPALHSALDEFFDIMDSRCTVLRKQDSGEAPFSSTKVKNKSKKKKPKDSKPMLVGSGTTSVTSNNEIITSSEDHSNRNSDSAGPFAVPDHLRQDVEEFEALYDQHSNEYVVRNKKLWDMNPKQKCSTLYDYFSQFLEEHGPLDMSNKMFSAEYEFFPEETRQILEKAGGLKPFLLGCPRFVVIDNCIALKKVASRLKKKRKKKNIKTKVEEISKAGEYVRVKLQLNPAAREFKPDVKSKPVSDSSSAPAFENVKPKPVSANSPKPACEDVKAKPVSDNSSRQVSEDGQPKGVSSNSPKPGSEDANYKRVSCNSPKPVLEDVKPTYWAQSHLVTGYCTYLPFQRFDITQTPPAYINVLPGLPQYTSIYTPLASLSPEYQLPRSVPVVPSFVANDRADKNAAAYFEGHHLNAENVAGHQIASETQILEGSLGISVKSHCSTGDAHTVLSESNRNDEHCGNSNNKCEVIPESTSAVTNIPHVQMVAIQVSWNIIHQEVNTEPYNPFEERQGEISRIEKEHQVLQDQLQEVYENYEQIKLKGLEETRDLEEKLKRHLEENKISKTELDWFLQDLEREIKKWQQEKKEIQERLKSLKKKIKKVSNASEMYTQKNDGKEKEHELHLDQSLEISNTLTNEKMKIEEYIKKGKEDYEESHQRAVAAEVSVLENWKESEVYKLQIMESQAEAFLKKLGLISRDPAAYPDMESDIRSWELFLSNVTKEIEKAKSQFEEQIKAIKNGSRLSELSKVQISELSFPACNTVHPELLPESSGHDGQGLVTSASDVTGNHAALHRDPSVFSAGDSPGEAPSALLPGPPPGQPEATQLTGPKRAGQAALSERSPVADRKQPVPPGRAARSSQSPKKPFNSIIEHLSVVFPCYNSTELAGFIKKVRSKNKNSLSGLSIDEIVQRVTEHILDEQKKKKPNPGKDKRTYEPSSATPVTRSSQGSPSVVVAPSPKTKGQKAEDVPVRIALGASSCEICHEVFKSKNVRVLKCGHKYHKGCFKQWLKGQSACPACQGRDLLTEESPSGRGWPSQNQELPSCSSR

SEQ ID NO: 863426 - protein, 1303 aa, Homo sapiens
MIKLTRIFYKEYVLPLTVKVSFLRLSSSAVVVKLNVNLEKLRLKEDKKLKRKIQKKEAKKLAQERMEEDLRESNPPKNEEQKETVDNVQRCQFLDDRILQCIKQYADKIKSGIQNTAMLLKELLSWKVLSTEDYTTCFSSRNFLNEAVDYVIRHLIQENNRVKTRIFLHVLSELKEVEPKLAAWIQKLNSFGLDATGTFFSRYGASLKLLDFSIMTFLWNEKYGHKLDSIEGKQLDYFSEPASLKEARCLIWLLEEHRDKFPALHSALDEFFDIMDSRCTVLRKQDSGEAPFSSTKVKNKSKKKKPKDSKPMLVGSGTTSVTSNNEIITSSEDHSNRNSDSAGPFAVPDHLRQDVEEFEALYDQHSNEYVVRNKKLWDMNPKQKCSTLYDYFSQFLEEHGPLDMSNKMFSAEYEFFPEETRQILEKAGGLKPFLLGCPRFVVIDNCIALKKVASRLKKKRKKKNIKTKVEEISKAGEYVRVKLQLNPAAREFKPDVKSKPVSDSSSAPAFENVKPKPVSANSPKPACEDVKAKPVSDNSSRQVSEDGQPKGVSSNSPKPGSEDANYKRVSCNSPKPVLEDVKPTYWAQSHLVTGYCTYLPFQRFDITQTPPAYINVLPGLPQYTSIYTPLASLSPEYQLPRSVPVVPSFVANDRADKNAAAYFEGHHLNAENVAGHQIASETQILEGSLGISVKSHCSTGDAHTVLSESNRNDEHCGNSNNKCEVIPESTSAVTNIPHVQMVAIQVSWNIIHQEVNTEPYNPFEERQGEISRIEKEHQVLQDQLQEVYENYEQIKLKGLEETRDLEEKLKRHLEENKISKTELDWFLQDLEREIKKWQQEKKEIQERLKSLKKKIKKVSNASEMYTQKNDGKEKEHELHLDQSLEISNTLTNEKMKIEEYIKKGKEDYEESHQRAVAAEVSVLENWKESEVYKLQIMESQAEAFLKKLGLISRDPAAYPDMESDIRSWELFLSNVTKEIEKAKSQFEEQIKAIKNGSRLSELSKVQISELSFPACNTVHPELLPESSGHDGQGLVTSASDVTGNHAALHRDPSVFSAGDSPGEAPSALLPGPPPGQPEATQLTGPKRAGQAALSERSPVADRKQPVPPGRAARSSQSPKKPFNSIIEHLSVVFPCYNSTELAGFIKKVRSKNKNSLSGLSIDEIVQRVTEHILDEQKKKKPNPGKDKRTYEPSSATPVTRSSQGSPSVVVAPSPKTKGQKAEDVPVRIALGASSCEICHEVFKSKNVRVLKCGHKYHKGCFKQWLKGQSACPACQGRDLLTEESPSGRGWPSQNQELPSCSSR

SEQ ID NO: 863427 - protein, 1932 aa, Homo sapiens
MYNSRASEINLKKLQHLELMEDIVDLAKKVANDSFLIGGLLRIGCKIENKILAMEEALNWIKYAGDVTILTKLGSIDNCWPMLSIFFTEYKYHITKIVMEDCNLLEELKTQSCMDCIEEGELMKMKGNEEFSKERFDIAIIYYTRAIEYRPENYLLYGNRALCFLRTGQFRNALGDGKRATILKNTWPKGHYRYCDALSMLGEYDWALQANIKAQKLCKNDPEGIKDLIQQHVKLQKQIEDLQGRTANKDPIKAFYENRAYTPRSLSAPIFTTSLNFVEKERDFRKINHEMANGGNQNLKVADEALKVDDCDCHPEFSPPSSQPPKHKGKQKSRNNESEKFSSSSPLTLPADLKNILEKQFSKSSRAAHQDFANIMKMLRSLIQDGYMALLEQRCRSAAQAFTELLNGLDPQKIKQLNLAMINYVLVVYGLAISLLGIGQPEELSEAENQFKRIIEHYPSEGLDCLAYCGIGKVYLKKNRFLEALNHFEKARTLIYRLPGVLTWPTSNVIIEESQPQKIKMLLEKFVEECKFPPVPDAICCYQKCHGYSKIQIYITDPDFKGFIRISCCQYCKIEFHMNCWKKLKTTTFNDKIDKDFLQGICLTPDCEGVISKIIIFSSGGEVKCEFEHKVIKEKVPPRPILKQKCSSLEKLRLKEDKKLKRKIQKKEAKKLAQERMEEDLRESNPPKNEEQKETVDNVQRCQFLDDRILQCIKQYADKIKSGIQNTAMLLKELLSWKVLSTEDYTTCFSSRNFLNEAVDYVIRHLIQENNRVKTRIFLHVLSELKEVEPKLAAWIQKLNSFGLDATGTFFSRYGASLKLLDFSIMTFLWNEKYGHKLDSIEGKQLDYFSEPASLKEARCLIWLLEEHRDKFPALHSALDEFFDIMDIFTASWERLHVTLTESINSRCTVLRKQDSGEAPFSSTKVKNKSKKKKPKDSKPMLVGSGTTSVTSNNEIITSSEDHSNRNSDSAGPFAVPDHLRQDVEEFEALYDQHSNEYVVRNKKLWDMNPKQKCSTLYDYFSQFLEEHGPLDMSNKMFSAEYEFFPEETRQILEKAGGLKPFLLGCPRFVVIDNCIALKKVASRLKKKRKKKNIKTKVEEISKAGEYVRVKLQLNPAAREFKPDVKSKPVSDSSSAPAFENVKPKPVSANSPKPACEDVKAKPVSDNSSRQVSEDGQPKGVSSNSPKPGSEDANYKRVSCNSPKPVLEDVKPTYWAQSHLVTGYCTYLPFQRFDITQTPPAYINVLPGLPQYTSIYTPLASLSPEYQLPRSVPVVPSFVANDRADKNAAAYFEGHHLNAENVAGHQIASETQILEGSLGISVKSHCSTGDAHTVLSESNRNDEHCGNSNNKCEVIPESTSAVTNIPHVQMVAIQVSWNIIHQEVNTEPYNPFEERQGEISRIEKEHQVLQDQLQEVYENYEQIKLKGLEETRDLEEKLKRHLEENKISKTELDWFLQDLEREIKKWQQEKKEIQERLKSLKKKIKKVSNASEMYTQKNDGKEKEHELHLDQSLEISNTLTNEKMKIEEYIKKGKEDYEESHQRAVAAEVSVLENWKESEVYKLQIMESQAEAFLKKLGLISRDPAAYPDMESDIRSWELFLSNVTKEIEKAKSQFEEQIKAIKNGSRLSELSKVQISELSFPACNTVHPELLPESSGHDGQGLVTSASDVTGNHAALHRDPSVFSAGDSPGEAPSALLPGPPPGQPEATQLTGPKRAGQAALSERSPVADRKQPVPPGRAARSSQSPKKPFNSIIEHLSVVFPCYNSTELAGFIKKVRSKNKNSLSGLSIDEIVQRVTEHILDEQKKKKPNPGKDKRTYEPSSATPVTRSSQGSPSVVVAPSPKTKGQKAEDVPVRIALGASSCEICHEVFKSKNVRVLKCGHKYHKGCFKQWLKGQSACPACQGRDLLTEESPSGRGWPSQNQELPSCSSR

SEQ ID NO: 863428 - protein, 1785 aa, Homo sapiens
STPPPAPSRRRLTWRAGGGGGGGGGCCCCCCPRPRLAGGGPGNALGDGKRATILKNTWPKGHYRYCDALSMLGEYDWALQANIKAQKLCKNDPEGIKDLIQQHVKLQKQIEDLQGRTANKDPIKAFYENRAYTPRSLSAPIFTTSLNFVEKERDFRKINHEMANGGNQNLKVADEALKVDDCDCHPEFSPPSSQPPKHKGKQKSRNNESEKFSSSSPLTLPADLKNILEKQFSKSSRAAHQDFANIMKMLRSLIQDGYMALLEQRCRSAAQAFTELLNGLDPQKIKQLNLAMINYVLVVYGLAISLLGIGQPEELSEAENQFKRIIEHYPSEGLDCLAYCGIGKVYLKKNRFLEALNHFEKARTLIYRLPGVLTWPTSNVIIEESQPQKIKMLLEKFVEECKFPPVPDAICCYQKCHGYSKIQIYITDPDFKGFIRISCCQYCKIEFHMNCWKKLKTTTFNDKIDKDFLQGICLTPDCEGVISKIIIFSSGGEVKCEFEHKVIKEKVPPRPILKQKCSSLEKLRLKEDKKLKRKIQKKEAKKLAQERMEEDLRESNPPKNEEQKETVDNVQRCQFLDDRILQCIKQYADKIKSGIQNTAMLLKELLSWKVLSTEDYTTCFSSRNFLNEAVDYVIRHLIQENNRVKTRIFLHVLSELKEVEPKLAAWIQKLNSFGLDATGTFFSRYGASLKLLDFSIMTFLWNEKYGHKLDSIEGKQLDYFSEPASLKEARCLIWLLEEHRDKFPALHSALDEFFDIMDSRCTVLRKQDSGEAPFSSTKVKNKSKKKKPKDSKPMLVGSGTTSVTSNNEIITSSEDHSNRNSDSAGPFAVPDHLRQDVEEFEALYDQHSNEYVVRNKKLWDMNPKQKCSTLYDYFSQFLEEHGPLDMSNKMFSAEYEFFPEETRQILEKAGGLKPFLLGCPRFVVIDNCIALKKVASRLKKKRKKKNIKTKVEEISKAGEYVRVKLQLNPAAREFKPDVKSKPVSDSSSAPAFENVKPKPVSANSPKPACEDVKAKPVSDNSSRQVSEDGQPKGVSSNSPKPGSEDANYKRVSCNSPKPVLEDVKPTYWAQSHLVTGYCTYLPFQRFDITQTPPAYINVLPGLPQYTSIYTPLASLSPEYQLPRSVPVVPSFVANDRADKNAAAYFEGHHLNAENVAGHQIASETQILEGSLGISVKSHCSTGDAHTVLSESNRNDEHCGNSNNKCEVIPESTSAVTNIPHVQMVAIQVSWNIIHQEVNTEPYNPFEERQGEISRIEKEHQVLQDQLQEVYENYEQIKLKGLEETRDLEEKLKRHLEENKISKTELDWFLQDLEREIKKWQQEKKEIQERLKSLKKKIKKVSNASEMYTQKNDGKEKEHELHLDQSLEISNTLTNEKMKIEEYIKKGKEDYEESHQRAVAAEVSVLENWKESEVYKLQIMESQAEAFLKKLGLISRDPAAYPDMESDIRSWELFLSNVTKEIEKAKSQFEEQIKAIKNGSRLSELSKVQISELSFPACNTVHPELLPESSGHDGQGLVTSASDVTGNHAALHRDPSVFSAGDSPGEAPSALLPGPPPGQPEATQLTGPKRAGQAALSERSPVADRKQPVPPGRAARSSQSPKKPFNSIIEHLSVVFPCYNSTELAGFIKKVRSKNKNSLSGLSIDEIVQRVTEHILDEQKKKKPNPGKDKRTYEPSSATPVTRSSQGSPSVVVAPSPKTKGQKAEDVPVRIALGASSCEICHEVFKSKNVRVLKCGHKYHKGCFKQWLKGQSACPACQGRDLLTEESPSGRGWPSQNQELPSCSSR

SEQ ID NO: 863429 - protein, 1715 aa, Homo sapiens; identical to SEQ ID NO: 863406

SEQ ID NO: 863430 - protein, 1539 aa, Homo sapiens
MKMLRSLIQDGYMALLEQRCRSAAQAFTELLNGLDPQKIKQLNLAMINYVLVVYGLAISLLGIGQPEELSEAENQFKRIIEHYPSEGLDCLAYCGIGKVYLKKNRFLEALNHFEKARTLIYRLPGVLTWPTSNVIIEESQPQKIKMLLEKFVEECKFPPVPDAICCYQKCHGYSKIQIYITDPDFKGFIRISCCQYCKIEFHMNCWKKLKTTTFNDKIDKDFLQGICLTPDCEGVISKIIIFSSGGEVKCEFEHKVIKEKVPPRPILKQKCSSLEKLRLKEDKKLKRKIQKKEAKKLAQERMEEDLRESNPPKNEEQKETVDNVQRCQFLDDRILQCIKQYADKIKSGIQNTAMLLKELLSWKVLSTEDYTTCFSSRNFLNEAVDYVIRHLIQENNRVKTRIFLHVLSELKEVEPKLAAWIQKLNSFGLDATGTFFSRYGASLKLLDFSIMTFLWNEKYGHKLDSIEGKQLDYFSEPASLKEARCLIWLLEEHRDKFPALHSALDEFFDIMDSRCTVLRKQDSGEAPFSSTKVKNKSKKKKPKDSKPMLVGSGTTSVTSNNEIITSSEDHSNRNSDSAGPFAVPDHLRQDVEEFEALYDQHSNEYVVRNKKLWDMNPKQKCSTLYDYFSQFLEEHGPLDMSNKMFSAEYEFFPEETRQILEKAGGLKPFLLGCPRFVVIDNCIALKKVASRLKKKRKKKNIKTKVEEISKAGEYVRVKLQLNPAAREFKPDVKSKPVSDSSSAPAFENVKPKPVSANSPKPACEDVKAKPVSDNSSRQVSEDGQPKGVSSNSPKPGSEDANYKRVSCNSPKPVLEDVKPTYWAQSHLVTGYCTYLPFQRFDITQTPPAYINVLPGLPQYTSIYTPLASLSPEYQLPRSVPVVPSFVANDRADKNAAAYFEGHHLNAENVAGHQIASETQILEGSLGISVKSHCSTGDAHTVLSESNRNDEHCGNSNNKCEVIPESTSAVTNIPHVQMVAIQVSWNIIHQEVNTEPYNPFEERQGEISRIEKEHQVLQDQLQEVYENYEQIKLKGLEETRDLEEKLKRHLEENKISKTELDWFLQDLEREIKKWQQEKKEIQERLKSLKKKIKKVSNASEMYTQKNDGKEKEHELHLDQSLEISNTLTNEKMKIEEYIKKGKEDYEESHQRAVAAEVSVLENWKESEVYKLQIMESQAEAFLKKLGLISRDPAAYPDMESDIRSWELFLSNVTKEIEKAKSQFEEQIKAIKNGSRLSELSKVQISELSFPACNTVHPELLPESSGHDGQGLVTSASDVTGNHAALHRDPSVFSAGDSPGEAPSALLPGPPPGQPEATQLTGPKRAGQAALSERSPVADRKQPVPPGRAARSSQSPKKPFNSIIEHLSVVFPCYNSTELAGFIKKVRSKNKNSLSGLSIDEIVQRVTEHILDEQKKKKPNPGKDKRTYEPSSATPVTRSSQGSPSVVVAPSPKTKGQKAEDVPVRIALGASSCEICHEVFKSKNVRVLKCGHKYHKGCFKQWLKGQSACPACQGRDLLTEESPSGRGWPSQNQELPSCSSR

SEQ ID NO: 863431 - protein, 1270 aa, Homo sapiens
MFISLEKLRLKEDKKLKRKIQKKEAKKLAQERMEEDLRESNPPKNEEQKETVDNVQRCQFLDDRILQCIKQYADKIKSGIQNTAMLLKELLSWKVLSTEDYTTCFSSRNFLNEAVDYVIRHLIQENNRVKTRIFLHVLSELKEVEPKLAAWIQKLNSFGLDATGTFFSRYGASLKLLDFSIMTFLWNEKYGHKLDSIEGKQLDYFSEPASLKEARCLIWLLEEHRDKFPALHSALDEFFDIMDSRCTVLRKQDSGEAPFSSTKVKNKSKKKKPKDSKPMLVGSGTTSVTSNNEIITSSEDHSNRNSDSAGPFAVPDHLRQDVEEFEALYDQHSNEYVVRNKKLWDMNPKQKCSTLYDYFSQFLEEHGPLDMSNKMFSAEYEFFPEETRQILEKAGGLKPFLLGCPRFVVIDNCIALKKVASRLKKKRKKKNIKTKVEEISKAGEYVRVKLQLNPAAREFKPDVKSKPVSDSSSAPAFENVKPKPVSANSPKPACEDVKAKPVSDNSSRQVSEDGQPKGVSSNSPKPGSEDANYKRVSCNSPKPVLEDVKPTYWAQSHLVTGYCTYLPFQRFDITQTPPAYINVLPGLPQYTSIYTPLASLSPEYQLPRSVPVVPSFVANDRADKNAAAYFEGHHLNAENVAGHQIASETQILEGSLGISVKSHCSTGDAHTVLSESNRNDEHCGNSNNKCEVIPESTSAVTNIPHVQMVAIQVSWNIIHQEVNTEPYNPFEERQGEISRIEKEHQVLQDQLQEVYENYEQIKLKGLEETRDLEEKLKRHLEENKISKTELDWFLQDLEREIKKWQQEKKEIQERLKSLKKKIKKVSNASEMYTQKNDGKEKEHELHLDQSLEISNTLTNEKMKIEEYIKKGKEDYEESHQRAVAAEVSVLENWKESEVYKLQIMESQAEAFLKKLGLISRDPAAYPDMESDIRSWELFLSNVTKEIEKAKSQFEEQIKAIKNGSRLSELSKVQISELSFPACNTVHPELLPESSGHDGQGLVTSASDVTGNHAALHRDPSVFSAGDSPGEAPSALLPGPPPGQPEATQLTGPKRAGQAALSERSPVADRKQPVPPGRAARSSQSPKKPFNSIIEHLSVVFPCYNSTELAGFIKKVRSKNKNSLSGLSIDEIVQRVTEHILDEQKKKKPNPGKDKRTYEPSSATPVTRSSQGSPSVVVAPSPKTKGQKAEDVPVRIALGASSCEICHEVFKSKNVRVLKCGHKYHKGCFKQWLKGQSACPACQGRDLLTEESPSGRGWPSQNQELPSCSSR

SEQ ID NO: 863432 - protein, 1914 aa, Homo sapiens; identical to SEQ ID NO: 863405

SEQ ID NO: 863433 - protein, 1914 aa, Homo sapiens; identical to SEQ ID NO: 863405

SEQ ID NO: 863434 - protein, 1914 aa, Homo sapiens; identical to SEQ ID NO: 863405

SEQ ID NO: 863435 - protein, 440 aa, Homo sapiens [sequence omitted]

SEQ ID NO: 863436 - protein, 343 aa, Homo sapiens
MESDIRSWELFLSNVTKEIEKAKSQFEEQIKAIKNGSRLSELSKVQISELSFPACNTVHPELLPESSGHDGQGLVTSASDVTGNHAALHRDPSVFSAGDSPGEAPSALLPGPPPGQPEATQLTGPKRAGQAALSERSPVADRKQPVPPGRAARSSQSPKKPFNSIIEHLSVVFPCYNSTELAGFIKKVRSKNKNSLSGLSIDEIVQRVTEHILDEQKKKKPNPGKDKRTYEPSSATPVTRSSQGSPSVVVAPSPKTKGQKAEDVPVRIALGASSCEICHEVFKSKNVRVLKCGHKYHKGCFKQWLKGQSACPACQGRDLLTEESPSGRGWPSQNQELPSCSSR

SEQ ID NO: 863437 - protein, 304 aa, Homo sapiens
MCHAAQETRPHVSTWELRVHPELLPESSGHDGQGLVTSASDVTGNHAALHRDPSVFSAGDSPGEAPSALLPGPPPGQPEATQLTGPKRAGQAALSERSPVADRKQPVPPGRAARSSQSPKKPFNSIIEHLSVVFPCYNSTELAGFIKKVRSKNKNSLSGLSIDEIVQRVTEHILDEQKKKKPNPGKDKRTYEPSSATPVTRSSQGSPSVVVAPSPKTKGQKAEDVPVRIALGASSCEICHEVFKSKNVRVLKCGHKYHKGCFKQWLKGQSACPACQGRDLLTEESPSGRGWPSQNQELPSCSSR

SEQ ID NO: 863438 - protein, 1509 aa, Homo sapiens
MYNSRASEINLKKLQHLELMEDIVDLAKKVANDSFLIGGLLRIGCKIENKILAMEEALNWIKYAGDVTILTKLGSIDNCWPMLSIFFTEYKYHITKIVMEDCNLLEELKTQSCMDCIEEGELMKMKGNEEFSKERFDIAIIYYTRAIEYRPENYLLYGNRALCFLRTGQFRNALGDGKRATILKNTWPKGHYRYCDALSMLGEYDWALQANIKAQKLCKNDPEGIKDLIQQHVKLQKQIEDLQGRTANKDPIKAFYENRAYTPRSLSAPIFTTSLNFVEKERDFRKINHEMANGGNQNLKVADEALKVDDCDCHPEFSPPSSQPPKHKGKQKSRNNESEKFSSSSPLTLPADLKNILEKQFSKSSRAAHQDFANIMKMLRSLIQDGYMALLEQRCRSAAQAFTELLNGLDPQKIKQLNLAMINYVLVVYGLAISLLGIGQPEELSEAENQFKRIIEHYPSEGLDCLAYCGIGKVYLKKNRFLEALNHFEKARTLIYRLPGVLTWPTSNVIIEESQPQKIKMLLEKFVEECKFPPVPDAICCYQKCHGYSKIQIYITDPDFKGFIRISCCQYCKIEFHMNCWKKLKTTTFNDKIDKDFLQGICLTPDCEGVISKIIIFSSGGEVKCEFEHKVIKEKVPPRPILKQKCSSLEKLRLKEDKKLKRKIQKKEAKKLAQERMEEDLRESNPPKNEEQKETVDNVQRCQFLDDRILQCIKQYADKIKSGIQNTAMLLKELLSWKVLSTEDYTTCFSSRNFLNEAVDYVIRHLIQENNRVKTRIFLHVLSELKEVEPKLAAWIQKLNSFGLDATGTFFSRYGASLKLLDFSIMTFLWNEKYGHKLDSIEGKQLDYFSEPASLKEARCLIWLLEEHRDKFPALHSALDEFFDIMDSRCTVLRKQDSGEAPFSSTKVKNKSKKKKPKDSKPMLVGSGTTSVTSNNEIITSSEDHSNRNSDSAGPFAVPDHLRQDVEEFEALYDQHSNEYVVRNKKLWDMNPKQKCSTLYDYFSQFLEEHGPLDMSNKMFSAEYEFFPEETRQILEKAGGLKPFLLGCPRFVVIDNCIALKKVASRLKKKRKKKNIKTKVEEISKAGEYVRVKLQLNPAAREFKPDVKSKPVSDSSSAPAFENVKPKPVSANSPKPACEDVKAKPVSDNSSRQVSEDGQPKGVSSNSPKPGSEDANYKRVSCNSPKPVLEDVKPTYWAQSHLVTGYCTYLPFQRFDITQTPPAYINVLPGLPQYTSIYTPLASLSPEYQLPRSVPVVPSFVANDRADKNAAAYFEGHHLNAENVAGHQIASETQILEGSLGISVKSHCSTGDAHTVLSESNRNDEHCGNSNNKCEVIPESTSAVTNIPHVQMVAIQVSWNIIHQEVNTEPYNPFEERQGEISRIEKEHQVLQDQLQEVYENYEQIKLKGLEETRDLEEKLKRHLEENKISKTELDWFLQDLEREIKKWQQEKKEIQERLKSLKKKIKKVSNASEMYTQKNDGKEKEHELHLDQSLEIRQIKLKFIFNIF

SEQ ID NO: 863439 - protein, 732 aa, Homo sapiens
MYNSRASEINLKKLQHLELMEDIVDLAKKVANDSFLIGGLLRIGCKIENKILAMEEALNWIKYAGDVTILTKLGSIDNCWPMLSIFFTEYKYHITKIVMEDCNLLEELKTQSCMDCIEEGELMKMKGNEEFSKERFDIAIIYYTRAIEYRPENYLLYGNRALCFLRTGQFRNALGDGKRATILKNTWPKGHYRYCDALSMLGEYDWALQANIKAQKLCKNDPEGIKDLIQQHVKLQKQIEDLQGRTANKDPIKAFYENRAYTPRSLSAPIFTTSLNFVEKERDFRKINHEMANGGNQNLKVADEALKVDDCDCHPEFSPPSSQPPKHKGKQKSRNNESEKFSSSSPLTLPADLKNILEKQFSKSSRAAHQDFANIMKMLRSLIQDGYMALLEQRCRSAAQAFTELLNGLDPQKIKQLNLAMINYVLVVYGLAISLLGIGQPEELSEAENQFKRIIEHYPSEGLDCLAYCGIGKVYLKKNRFLEALNHFEKARTLIYRLPGVLTWPTSNVIIEESQPQKIKMLLEKFVEECKFPPVPDAICCYQKCHGYSKIQIYITDPDFKDFLQGICLTPDCEGVISKIIIFSSGGEVKCEFEHKVIKEKVPPRPILKQKCSSLEKLRLKEDKKLKRKIQKKEAKKLAQERMEEDLRESNPPKNEEQKETVDNVQRCQFLDDRILQCIKQYADKIKSGIQNTAMLLKELLSWKLARDYHRFQANSYGGLFACSNSVTICGG

SEQ ID NO: 863440 - protein, 300 aa, Homo sapiens
MDNFAEGDFTVADYALLEDCPHVDDCVFAAEFMSNDYVRVTQLYCDGVGVQYKDYIQSERNLEFDICSIWCSKPISVLQDYCDAIKINIFWPLLFQHQNSSVISRLHPCVDANNSRASEINLKKLQHLELMEDIVDLAKKVANDSFLIGGLLRIGCKIENKILAMEEALNWIKYAGDVTILTKLGSIDNCWPMLSIFFTEYKYHITKIVMEDCNLLEELKTQSCMDCIEEGELMKMKGNEEFSKERFDIAIIYYTRAIEYRPENYLLYGNRALCFLRTGQFRTHSHGRKFGKYKSLKRRK

SEQ ID NO: 863441 - protein, 261 aa, Homo sapiens [sequence omitted]

SEQ ID NO: 863442 - protein, 102 aa, Homo sapiens
MKRQLVTNSFLHHLLIGQKRPRNAPRKPKKKKRKRKEEEEEEEEEEEEEEEEEEEEEEEEEEEKKKKKKRKKKKNAAVGCLQIGHESWQESLKTGPAAHVLP

SEQ ID NO: 863443 - protein, 533 aa, Homo sapiens
MKLWVSALLMAWFGVLSCVQAEFFTSIGHMTDLIYAEKELVQSLKEYILVEEAKLSKIKSWANKMEALTSKSAADAEGYLAHPVNAYKLVKRLNTDWPALEDLVLQDSAAGFIANLSVQRQFFPTDEDEIGAAKALMRLQDTYRLDPGTISRGELPGTKYQAMLSVDDCFGMGRSAYNEGDYYHTVLWMEQVLKQLDAGEEATTTKSQVLDYLSYAVFQLGDLHRALELTRRLLSLDPSHERAGGNLRYFEQLLEEEREKTLTNQTEAELATPEGIYERPVDYLPERDVYESLCRGEGVKLTPRRQKRLFCRYHHGNRAPQLLIAPFKEEDEWDSPHIVRYYDVMSDEEIERIKEIAKPKLARATVRDPKTGVLTVASYRVSKSSWLEEDDDPVVARVNRRMQHITGLTVKTAELLQVANYGVGGQYEPHFDFSRRPFDSGLKTEGNRLATFLNYMSDVEAGGATVFPDLGAAIWPKKGTAVFWYNLLRSGEGDYRTRHAACPVLVGCKWVSNKWFHERGQEFLRPCGSTEVD

SEQ ID NO: 863444 - protein, 535 aa, Homo sapiens
MKLWVSALLMAWFGVLSCVQAEFFTSIGHMTDLIYAEKELVQSLKEYILVEEAKLSKIKSWANKMEALTSKSAADAEGYLAHPVNAYKLVKRLNTDWPALEDLVLQDSAAGFIANLSVQRQFFPTDEDEIGAAKALMRLQDTYRLDPGTISRGELPGTKYQAMLSVDDCFGMGRSAYNEGDYYHTVLWMEQVLKQLDAGEEATTTKSQVLDYLSYAVFQLGDLHRALELTRRLLSLDPSHERAGGNLRYFEQLLEEEREKTLTNQTEAELATPEGIYERPVDYLPERDVYESLCRGEGVKLTPRRQKRLFCRYHHGNRAPQLLIAPFKEEDEWDSPHIVRYYDVMSDEEIERIKEIAKPKLARATVRDPKTGVLTVASYRVSKSSWLEEDDDPVVARVNRRMQHITGLTVKTAELLQVANYGVGGQYEPHFDFSRNDERDTFKHLGTGNRVATFLNYMSDVEAGGATVFPDLGAAIWPKKGTAVFWYNLLRSGEGDYRTRHAACPVLVGCKWVSNKWFHERGQEFLRPCGSTEVD

SEQ ID NO: 863445 - protein, 551 aa, Homo sapiens
ASCRIGTRASVQTLPSVTMKLWVSALLMAWFGVLSCVQAEFFTSIGHMTDLIYAEKELVQSLKEYILVEEAKLSKIKSWANKMEALTSKSAADAEGYLAHPVNAYKLVKRLNTDWPALEDLVLQDSAAGFIANLSVQRQFFPTDEDEIGAAKALMRLQDTYRLDPGTISRGELPGTKYQAMLSVDDCFGMGRSAYNEGDYYHTVLWMEQVLKQLDAGEEATTTKSQVLDYLSYAVFQLGDLHRALELTRRLLSLDPSHERAGGNLRYFEQLLEEEREKTLTNQTEAELATPEGIYERPVDYLPERDVYESLCRGEGVKLTPRRQKRLFCRYHHGNRAPQLLIAPFKEEDEWDSPHIVRYYDVMSDEEIERIKEIAKPKLARATVRDPKTGVLTVASYRVSKSSWLEEDDDPVVARVNRRMQHITGLTVKTAELLQVANYGVGGQYEPHFDFSRRPFDSGLKTEGNRLATFLNYMSDVEAGGATVFPDLGAAIWPKKGTAVFWYNLLRSGEGDYRTRHAACPVLVGCKWVSNKWFHERGQEFLRPCGSTEVD

SEQ ID NO: 863446 - protein, 533 aa, Homo sapiens; identical to SEQ ID NO: 863443

SEQ ID NO: 863447 - protein, 565 aa, Homo sapiens
MKRQLVTNSFLHHLLIGQKRPRNAPRTLPSVTMKLWVSALLMAWFGVLSCVQAEFFTSIGHMTDLIYAEKELVQSLKEYILVEEAKLSKIKSWANKMEALTSKSAADAEGYLAHPVNAYKLVKRLNTDWPALEDLVLQDSAAGFIANLSVQRQFFPTDEDEIGAAKALMRLQDTYRLDPGTISRGELPGTKYQAMLSVDDCFGMGRSAYNEGDYYHTVLWMEQVLKQLDAGEEATTTKSQVLDYLSYAVFQLGDLHRALELTRRLLSLDPSHERAGGNLRYFEQLLEEEREKTLTNQTEAELATPEGIYERPVDYLPERDVYESLCRGEGVKLTPRRQKRLFCRYHHGNRAPQLLIAPFKEEDEWDSPHIVRYYDVMSDEEIERIKEIAKPKLARATVRDPKTGVLTVASYRVSKSSWLEEDDDPVVARVNRRMQHITGLTVKTAELLQVANYGVGGQYEPHFDFSRRPFDSGLKTEGNRLATFLNYMSDVEAGGATVFPDLGAAIWPKKGTAVFWYNLLRSGEGDYRTRHAACPVLVGCKWVSNKWFHERGQEFLRPCGSTEVD

SEQ ID NO: 863448 - protein, 374 aa, Homo sapiens
VHLAFCWSLSRTPDCTRNNEGDYYHTVLWMEQVLKQLDAGEEATTTKSQVLDYLSYAVFQLGDLHRALELTRRLLSLDPSHERAGGNLRYFEQLLEEEREKTLTNQTEAELATPEGIYERPVDYLPERDVYESLCRGEGVKLTPRRQKRLFCRYHHGNRAPQLLIAPFKEEDEWDSPHIVRYYDVMSDEEIERIKEIAKPKLARATVRDPKTGVLTVASYRVSKSSWLEEDDDPVVARVNRRMQHITGLTVKTAELLQVANYGVGGQYEPHFDFSRRPFDSGLKTEGNRLATFLNYMSDVEAGGATVFPDLGAAIWPKKGTAVFWYNLLRSGEGDYRTRHAACPVLVGCKWVSNKWFHERGQEFLRPCGSTEVD

SEQ ID NO: 863449 - protein, 122 aa, Homo sapiens
MEQTPSSVTHAERRAIYIPCHVLCGSIALRALGRRVKLYVLYFQMSDVEAGGATVFPDLGAAIWPKKGTAVFWYNLLRSGEGDYRTRHAACPVLVGCKWVSNKWFHERGQEFLRPCGSTEVD

SEQ ID NO: 863450 - protein, 134 aa, Homo sapiens
GRSAYNEGDYYHTVLWMEQVLKQLDAGEEATTTKSQVLDYLSYAVFQLGDLHRALELTRRLLSLGKEILGEGKMGMESGRGTALCWHLPDPSPGTESVYPVTWPVTNALLTLGPVQLLTSSLPTSILALGLRSR

SEQ ID NO: 863451 - protein, 563 aa, Homo sapiens
GRRRRADRATPREVLETPGAASVQTLPSVTMKLWVSALLMAWFGVLSCVQAEFFTSIGHMTDLIYAEKELVQSLKEYILVEEAKLSKIKSWANKMEALTSKSAADAEGYLAHPVNAYKLVKRLNTDWPALEDLVLQDSAAGFIANLSVQRQFFPTDEDEIGAAKALMRLQDTYRLDPGTISRGELPGTKYQAMLSVDDCFGMGRSAYNEGDYYHTVLWMEQVLKQLDAGEEATTTKSQVLDYLSYAVFQLGDLHRALELTRRLLSLDPSHERAGGNLRYFEQLLEEEREKTLTNQTEAELATPEGIYERPVDYLPERDVYESLCRGEGVKLTPRRQKRLFCRYHHGNRAPQLLIAPFKEEDEWDSPHIVRYYDVMSDEEIERIKEIAKPKLARATVRDPKTGVLTVASYRVSKSSWLEEDDDPVVARVNRRMQHITGLTVKTAELLQVANYGVGGQYEPHFDFSRRPFDSGLKTEGNRLATFLNYMSDVEAGGATVFPDLGAAIWPKKGTAVFWYNLLRSGEGDYRTRHAACPVLVGCKWVSNKWFHERGQEFLRPCGSTEVD

SEQ ID NO: 863452 - protein, 563 aa, Homo sapiens; identical to SEQ ID NO: 863451

SEQ ID NO: 863453 - protein, 488 aa, Homo sapiens
MWVDALVFLFLWFHSWANKMEALTSKSAADAEGYLAHPVNAYKLVKRLNTDWPALEDLVLQDSAAGFIANLSVQRQFFPTDEDEIGAAKALMRLQDTYRLDPGTISRGELPGTKYQAMLSVDDCFGMGRSAYNEGDYYHTVLWMEQVLKQLDAGEEATTTKSQVLDYLSYAVFQLGDLHRALELTRRLLSLDPSHERAGGNLRYFEQLLEEEREKTLTNQTEAELATPEGIYERPVDYLPERDVYESLCRGEGVKLTPRRQKRLFCRYHHGNRAPQLLIAPFKEEDEWDSPHIVRYYDVMSDEEIERIKEIAKPKLARATVRDPKTGVLTVASYRVSKSSWLEEDDDPVVARVNRRMQHITGLTVKTAELLQVANYGVGGQYEPHFDFSRRPFDSGLKTEGNRLATFLNYMSDVEAGGATVFPDLGAAIWPKKGTAVFWYNLLRSGEGDYRTRHAACPVLVGCKWVSNKWFHERGQEFLRPCGSTEVD

SEQ ID NO: 863454 - protein, 598 aa, Homo sapiens
LERGSRYVAQWSRVLARKSEDGTSCTCFTLRACYIKDTFWKAGWCEDSVLQPLETSLLFTLPSVTMKLWVSALLMAWFGVLSCVQAEFFTSIGHMTDLIYAEKELVQSLKEYILVEEAKLSKIKSWANKMEALTSKSAADAEGYLAHPVNAYKLVKRLNTDWPALEDLVLQDSAAGFIANLSVQRQFFPTDEDEIGAAKALMRLQDTYRLDPGTISRGELPGTKYQAMLSVDDCFGMGRSAYNEGDYYHTVLWMEQVLKQLDAGEEATTTKSQVLDYLSYAVFQLGDLHRALELTRRLLSLDPSHERAGGNLRYFEQLLEEEREKTLTNQTEAELATPEGIYERPVDYLPERDVYESLCRGEGVKLTPRRQKRLFCRYHHGNRAPQLLIAPFKEEDEWDSPHIVRYYDVMSDEEIERIKEIAKPKLARATVRDPKTGVLTVASYRVSKSSWLEEDDDPVVARVNRRMQHITGLTVKTAELLQVANYGVGGQYEPHFDFSRRPFDSGLKTEGNRLATFLNYMSDVEAGGATVFPDLGAAIWPKKGTAVFWYNLLRSGEGDYRTRHAACPVLVGCKWVSNKWFHERGQEFLRPCGSTEVD

SEQ ID NO: 863455 - protein, 298 aa, Homo sapiens
MYPSHERAGGNLRYFEQLLEEEREKTLTNQTEAELATPEGIYERPVDYLPERDVYESLCRGEGVKLTPRRQKRLFCRYHHGNRAPQLLIAPFKEEDEWDSPHIVRYYDVMSDEEIERIKEIAKPKLARATVRDPKTGVLTVASYRVSKSSWLEEDDDPVVARVNRRMQHITGLTVKTAELLQVANYGVGGQYEPHFDFSRRPFDSGLKTEGNRLATFLNYMSDVEAGGATVFPDLGAAIWPKKGTAVFWYNLLRSGEGDYRTRHAACPVLVGCKWVSNKWFHERGQEFLRPCGSTEVD

SEQ ID NO: 863456 - protein, 509 aa, Homo sapiens
GRRRRADRATPREVLETPGAASVQTLPSVTMKLWVSALLMAWFGVLSCVQAEFFTSIGHMTDLIYAEKELVQSLKEYILVEEAKLSKIKSWANKMEALTSKSAADAEGYLAHPVNAYKLVKRLNTDWPALEDLVLQDSAAGFIANLSVQRQFFPTDEDEIGAAKALMRLQDTYRLDPGTISRGELPGTKYQAMLSVDDCFGMGRSAYNEGDYYHTVLWMEQVLKQLDAGEEATTTKSQVLDYLSYAVFQLGDLHRALELTRRLLSLDPSHERAGGNLRYFEQLLEEEREKTLTNQTEAELATPEGIYERPVDYLPERDVYESLCRGEGVKLTPRRQKRLFCRYHHGNRAPQLLIAPFKEEDEWDSPHIVRYYDVMSDEEIERIKEIAKPKLARATVRDPKTGVLTVASYRVSKSSWLEEDDDPVVARVNRRMQHITGLTVKTAELLQVANYGVGGQYEPHFDFSRRPFDSGLKTEGNRLATFLNYMSDVEAGGATVFPEVSTWGSSESG

SEQ ID NO: 863457 - protein, 326 aa, Homo sapiens
MVDYYEVLGVQRHASPEDIKKAYRKLALKWHPDKNPENKEEAERKFKQVAEAYEVLSDAKKRDIYDKYGKEGLNGGGGGGSHFDSPFEFGFTFRNPDDVFREFFGGRDPFSFDFFEDPFEDFFGNRRGPRGSRSRGTGSFFSAFSGFPSFGSGFSSFDTGFTSFGSLGHGGLTSFSSTSFGGSGMGNFKSISTSTKMVNGRKITTKRIVENGQERVEVEEDGQLKSLTINGVADDDALAEERMRRGQNALPAQPAGLRPPKPPRPASLLRHAPHCLSEEEGEQDRPRAPGPWDPLASAAGLKEGGKRKKQKQREESKKKKSTKGNH

SEQ ID NO: 863458 - protein, 241 aa, Homo sapiens
MVDYYEVLGVQRHASPEDIKKAYRKLALKWHPDKNPENKEEAERKFKQVAEAYEVLSDAKKRDIYDKYGKEGLNGGGGGGSHFDSPFEFGFTFRNPDDVFREFFGGRDPFSFDFFEDPFEDFFGNRRGPRGSRSRGTGSFFSAFSGFPSFGSGFSSFDTGFTSFGSLGHGGLTSFSSTSFGGSGMGNFKSISTSTKMVNGRKITTKRIVENGQERVEVEEDGQLKSLTINGKEQLLRLDNK

SEQ ID NO: 863459 - protein, 241 aa, Homo sapiens; identical to SEQ ID NO: 863458

SEQ ID NO: 863460 - protein, 241 aa, Homo sapiens; identical to SEQ ID NO: 863458

SEQ ID NO: 863461 - protein, 241 aa, Homo sapiens; identical to SEQ ID NO: 863458

SEQ ID NO: 863462 - protein, 218 aa, Homo sapiens
MVDYYEVLGVQRHASPEDIKKAYRKLALKWHPDKNPENKEEAERKFKQVAEAYEVLSDAKKRDIYDKYGKEGLNGGGGGGSHFDSPFEFGFTFRNPDDVFREFFGGRDPFSFDFFEDPFEDFFGNRRGPRGSRSRGTGSFFSAFSGFPSFGSGFSSFDTGFTSFGSLGHGGLTSFSSTSFGGSGMGNFKSISTSTKMVNGRKITTKRRWPVKVLNNKW

SEQ ID NO: 863463 - protein, 282 aa, Homo sapiens
MVDYYEVLGVQRHASPEDIKKAYRKLALKWHPDKNPENKEEAERKFKQVAEAYEVLSDAKKRDIYDKYGKEGLNGGGGGGSHFDSPFEFGFTFRNPDDVFREFFGGRDPFSFDFFGFTSFGSLGHGGLTSFSSTSFGGSGMGNFKSISTSTKMVNGRKITTKRIVENGQERVEVEEDGQLKSLTINGVADDDALAEERMRRGQNALPAQPAGLRPPKPPRPASLLRHAPHCLSEEEGEQDRPRAPGPWDPLASAAGLKEGGKRKKQKQREESKKKKSTKGNH

SEQ ID NO: 863464 - protein, 284 aa, Homo sapiens
  misc_feature (284)..(284): Xaa can be any naturally occurring amino acid
MVDYYEVLGVQRHASPEDIKKAYRKLALKWHPDKNPENKEEAERKFKQVAEAYEVLSDAKKRDIYDKYGKEGLNGGGGGGSHFDSPFEFGFTFRNPDDVFREFFGGRDPFSFDFFEDPFEDFFGNRRGPRGSRSRGTGSFFSAFSGFPSFGSGFSSFDTGFTSFGSLGHGGLTSFSSTSFGGSGMGNFKSISTSTKMVNGRKITTKRIVENGQERVEVEEDGQLKSLTINGGGPTNDGLSEDAPSGEGQKTAQAKWTEIERQNKTGNTSGDQRSTGSADEGRKX

SEQ ID NO: 863465 - protein, 136 aa, Homo sapiens
MYVVTEQPADEDPFEDFFGNRRGPRGSRSRGTGSFFSAFSGFPSFGSGFSSFDTGFTSFGSLGHGGLTSFSSTSFGGSGMGNFKSISTSTKMVNGRKITTKRIVENGQERVEVEEDGQLKSLTINGKEQLLRLDNK

SEQ ID NO: 863466 - protein, 187 aa, Homo sapiens
GSLIKLIPSSGRKERKESARSRRHHQRSSSWSCEEIRAVTLPPLRPATGRFCPRSTKMVNGRKITTKRIVENGQERVEVEEDGQLKSLTINGVADDDALAEERMRRGQNALPAQPAGLRPPKPPRPASLLRHAPHCLSEEEGEQDRPRAPGPWDPLASAAGLKEGGKRKKQKQREESKKKKSTKGNH

SEQ ID NO: 863467 - protein, 98 aa, Homo sapiens
GSLIKLIPSSGRKERKESARSRRHHQRSSSWSCEEIRAVTLPPLRPATGRFCPRSGTRALGPPRVRSRIERRWQEEEAEAERGVEEEEVDQRQSLDRT

SEQ ID NO: 863468 - protein, 241 aa, Homo sapiens; identical to SEQ ID NO: 863458

SEQ ID NO: 863469 - protein, 217 aa, Homo sapiens
MVDYYEVLGVQRHASPEDIKKAYRKLALKWHPDKNPENKEEAERKFKQVAEAYEVLSDAKKRDIYDKYGKEGLNGGGGGGSHFDSPFEFGFTFRNPDDVFREFFGGRDPFSFDFFEDPFEDFFGNRRGPRGSRSRGTGSFFSAFSGFPSFGSGFSSFDTGFTSFGSLGHGGLTSFSSTSFGGSGMGNFKSISTSTKMVNGRKITTKRGTVVFCILYF

SEQ ID NO: 863470 - protein, 241 aa, Homo sapiens; identical to SEQ ID NO: 863458

SEQ ID NO: 863471 - protein, 129 aa, Homo sapiens [sequence omitted]

SEQ ID NO: 863472 - protein, 226 aa, Homo sapiens
MVDYYEVLGVQRHASPEDIKKAYRKLALKWHPDKNPENKEEAETKKRDIYDKYGKEGLNGGGGGGSHFDSPFEFGFTFRNPDDVFREFFGGRDPFSFDFFEDPFEDFFGNRRGPRGSRSRGTGSFFSAFSGFPSFGSGFSSFDTGFTSFGSLGHGGLTSFSSTSFGGSGMGNFKSISTSTKMVNGRKITTKRIVENGQERVEVEEDGQLKSLTINGKEQLLRLDNK

SEQ ID NO: 863473 - protein, 142 aa, Homo sapiens [sequence omitted]

SEQ ID NO: 863474 - protein, 127 aa, Homo sapiens
MVDYYEVLGVQRHASPEDIKKAYRKLALKWHPDKNPENKEEAERKFKQVAEAYEVLSDAKKRDIYDKYGKEGLNGGGGGWKSLSLSIRIRLLMEEAGGSPQGIDGRQGPIDKLQLGDPIEGYAGEYV

SEQ ID NO: 863475 - protein, 119 aa, Homo sapiens
MNKYDYVLTGYTRDKSFLAMVVDIVQELKQQNPRLVYVCDPVLGDKWDGEGSMSKTPSQKTKEKSRNHLTHELCSNSSSCSPQTWTSDQVDGEQIHCDQSRSLEFRGGRNPKVILPVGF

SEQ ID NO: 863476 - protein, 381 aa, Homo sapiens
GAARNSRVRSRPLRSEGGVCADRVRRAPEPESQPRGAGAGARARAEPEPERAAETVPPPRPRAAAARPGMEEECRVLSIQSHVIRGYVGNRAATFPLQVLGFEIDAVNSVQFSNHTGYAHWKGQVLNSDELQELYEGLRLNNMNKYDYVLTGYTRDKSFLAMVVDIVQELKQQNPRLVYVCDPVLGDKWDGEGSMYVPEDLLPVYKEKVVPLADIITPNQFEAELLSGRKIHSQEEALRVMDMLHSMGPDTVVITSSDLPSPQGSNYLIVLGSQRRRNPAGSVVMERIRMDIRKVDAVFVGTGDLFAAMLLAWTHKHPNNLKVACEKTVSTLHHVLQRTIQCAKAQAGEGVRPSPMQLELRMVQSKRDIEDPEIVVQATVL

SEQ ID NO: 863477 - protein, 239 aa, Homo sapiens
MNKYDYVLTGYTRDKSFLAMVVDIVQELKQQNPRLVYVCDPVLGDKWDGEGSMYVPEDLLPVYKEKVVPLADIITPNQFEAELLSGRKIHSQEEALRVMDMLHSMGPDTVVITSSDLPSPQGSNYLIVLGSQRRRNPAGSVVMERIRMDIRKVDAVFVGTGDLFAAMLLAWTHKHPNNLKVACEKTVSTLHHVLQRTIQCAKAQAGEGVRPSPMQLELRMVQSKRDIEDPEIVVQATVL

SEQ ID NO: 863478 - protein, 272 aa, Homo sapiens
MGRSRPPGYAHWKGQVLNSDELQELYEGLRLNNMNKYDYVLTGYTRDKSFLAMVVDIVQELKQQNPRLVYVCDPVLGDKWDGEGSMYVPEDLLPVYKEKVVPLADIITPNQFEAELLSGRKIHSQEEALRVMDMLHSMGPDTVVITSSDLPSPQGSNYLIVLGSQRRRNPAGSVVMERIRMDIRKVDAVFVGTGDLFAAMLLAWTHKHPNNLKVACEKTVSTLHHVLQRTIQCAKAQAGEGVRPSPMQLELRMVQSKRDIEDPEIVVQATVL

SEQ ID NO: 863479 - protein, 439 aa, Homo sapiens
QAQGTPIARELPLIPCECSTDLLRLDHLHVWASELFSPAVFCQVLSEAATLPGQSISFTFLVPPGGAWEGATAVQRCQFQRHGPAQSAGFQLKDMCNSRRYLSLGSQAPVLDLGTPPPVHCRLLSLALSGTGSWMGRLWKRPDQLAMLMNEADFDGVLGFEIDAVNSVQFSNHTGYAHWKGQVLNSDELQELYEGLRLNNMNKYDYVLTGYTRDKSFLAMVVDIVQELKQQNPRLVYVCDPVLGDKWDGEGSMYVPEDLLPVYKEKVVPLADIITPNQFEAELLSGRKIHSQEEALRVMDMLHSMGPDTVVITSSDLPSPQGSNYLIVLGSQRRRNPAGSVVMERIRMDIRKVDAVFVGTGDLFAAMLLAWTHKHPNNLKVACEKTVSTLHHVLQRTIQCAKAQAGEGVRPSPMQLELRMVQSKRDIEDPEIVVQATVL

SEQ ID NO: 863480 - protein, 303 aa, Homo sapiens
VQIPFIHRGYRGQRGTFPLQVLGFEIDAVNSVQFSNHTGYAHWKGQVLNSDELQELYEGLRLNNMNKYDYVLTGYTRDKSFLAMVVDIVQELKQQNPRLVYVCDPVLGDKWDGEGSMYVPEDLLPVYKEKVVPLADIITPNQFEAELLSGRKIHSQEEALRVMDMLHSMGPDTVVITSSDLPSPQGSNYLIVLGSQRRRNPAGSVVMERIRMDIRKVDAVFVGTGDLFAAMLLAWTHKHPNNLKVACEKTVSTLHHVLQRTIQCAKAQAGEGVRPSPMQLELRMVQSKRDIEDPEIVVQATVL

SEQ ID NO: 863481 - protein, 272 aa, Homo sapiens
GSNAAVSGYAHWKGQVLNSDELQELYEGLRLNNMNKYDYVLTGYTRDKSFLAMVVDIVQELKQQNPRLVYVCDPVLGDKWDGEGSMYVPEDLLPVYKEKVVPLADIITPNQFEAELLSGRKIHSQEEALRVMDMLHSMGPDTVVITSSDLPSPQGSNYLIVLGSQRRRNPAGSVVMERIRMDIRKVDAVFVGTGDLFAAMLLAWTHKHPNNLKVACEKTVSTLHHVLQRTIQCAKAQAGEGVRPSPMQLELRMVQSKRDIEDPEIVVQATVL

SEQ ID NO: 863482 - protein, 254 aa, Homo sapiens
MTTCSQLIVVSLLFSEGDLDSPPKGYTRDKSFLAMVVDIVQELKQQNPRLVYVCDPVLGDKWDGEGSMYVPEDLLPVYKEKVVPLADIITPNQFEAELLSGRKIHSQEEALRVMDMLHSMGPDTVVITSSDLPSPQGSNYLIVLGSQRRRNPAGSVVMERIRMDIRKVDAVFVGTGDLFAAMLLAWTHKHPNNLKVACEKTVSTLHHVLQRTIQCAKAQAGEGVRPSPMQLELRMVQSKRDIEDPEIVVQATVL

SEQ ID NO: 863483 - protein, 199 aa, Homo sapiens
MYRLSSEDPRMQKYVPEDLLPVYKEKVVPLADIITPNQFEAELLSGRKIHSQEEALRVMDMLHSMGPDTVVITSSDLPSPQGSNYLIVLGSQRRRNPAGSVVMERIRMDIRKVDAVFVGTGDLFAAMLLAWTHKHPNNLKVACEKTVSTLHHVLQRTIQCAKAQAGEGVRPSPMQLELRMVQSKRDIEDPEIVVQATVL

SEQ ID NO: 863484 - protein, 355 aa, Homo sapiens
GAARNSRVRSRPLRSEGGVCADRVRRAPEPESQPRGAGAGARARAEPEPERAAETVPPPRPRAAAARPGMEEECRVLSIQSHVIRGYVGNRAATFPLQVLGFEIDAVNSVQFSNHTGYAHWKGQVLNSDELQELYEGLRLNNMNKYDYVLTGYTRDKSFLAMVVDIVQELKQQNPRLVYVCDPVLGDKWDGEGSMYVPEDLLPVYKEKVVPLADIITPNQFEAELLSGRKIHSQEEALRNYLIVLGSQRRRNPAGSVVMERIRMDIRKVDAVFVGTGDLFAAMLLAWTHKHPNNLKVACEKTVSTLHHVLQRTIQCAKAQAGEGVRPSPMQLELRMVQSKRDIEDPEIVVQATVL

SEQ ID NO: 863485 - protein, 351 aa, Homo sapiens
MGHKARLPAGTRVFHTSCVVGSLTPFRLGGGKADPPSACRAHLAQASPPRGCCSHFCPFPRPGPRSLRPYHKVRSFFHTVSWAWQSLHLVASIPSGPFERISWSSLSELPGLRALGRSLRSWRSAGGRVALSWLSECRARGDGTGALLLGLVVPAAGKGQLVEHKELRGWRRPGPGACRRTPARGQAGPGACRRTPARGQAGPDSLAGWDLTGAPGSLGRPRNRLFACAFSSVNGMSWTQDPSALPCWRRFLWALGPSHIPQWAGGHQEVQDHALCFDRKLGLRGAWGLCLRPGQVLDVSPSSWLLWLNYVPPNSHVAALTPAPQCGTGFGDGAPTEVSRLKEAIRALGGP

SEQ ID NO: 863486 - protein, 295 aa, Homo sapiens
GAARNSRVRSRPLRSEGGVCADRVRRAPEPESQPRGAGAGARARAEPEPERAAETVPPPRPRAAAARPGMEEECRVLSIQSHVIRGYVGNRAATFPLQVLGFEIDAVNSVQFSNHTGYAHWKGQVLNSDELQELYEGLRLNNMNKYDYVLTGYTRDKSFLAMVVDIVQELKQQNPRLVYVCDPVLGDKWDGEGSMYVPEDLLPVYKEKVVPLADIITPNQFEAELLSGRKIHSQEEALRWTPSLWALGTCLLPCSWRGHTSTPITSRWPVRRPCLPCTTFCRGPSSVQKPRPGKE

SEQ ID NO: 863487 - protein, 278 aa, Homo sapiens
GAARNSRVRSRPLRSEGGVCADRVRRAPEPESQPRGAGAGARARAEPEPERAAETVPPPRPRAAAARPGMEEECRVLSIQSHVIRGYVGNRAATFPLQVLGFEIDAVNSVQFSNHTGYAHWKGQVLNSDELQELYEGLRLNNMNKYDYVLTGYTRDKSFLAMVVDIVQELKQQNPRLVYVCDPVLGDKWDGEGSMYVPEDLLPVYKEKVVPLADIITPNQFEAELLSGRKIHSQEEALRPGHGAVRAPPLARDTQRVGVSVFVPVKTCNVCLRAMTET

SEQ ID NO: 863488 - protein, 81 aa, Homo sapiens
EQVAGTGHLLSPPGSPWWAVRSVACEKTVSTLHHVLQRTIQCAKAQAGEGVRPSPMQLELRMVQSKRDIEDPEIVVQATVL

SEQ ID NO: 863489 - protein, 351 aa, Homo sapiens; identical to SEQ ID NO: 863485

SEQ ID NO: 863490 - protein, 214 aa, Homo sapiens
GAARNSRVRSRPLRSEGGVCADRVRRAPEPESQPRGAGAGARARAEPEPERAAETVPPPRPRAAAARPGMEEECRVLSIQSHVIRGYVGNRAATFPLQVLGFEIDAVNSVQFSNHTGYAHWKGQVLNSDELQELYEGLRLNNMNKYDYVLTGYTRDKSFLAMVVDIVQELKQQNPRLVYVCDPVLGDKWDGEGSMYVPEDLLPVYKEKVAALEP

SEQ ID NO: 863491 - protein, 246 aa, Homo sapiens
GAARNSRVRSRPLRSEGGVCADRVRRAPEPESQPRGAGAGARARAEPEPERAAETVPPPRPRAAAARPGMEEECRVLSIQSHVIRGYVGNRAATFPLQVLGFEIDAVNSVQFSNHTGYAHWKGQVLNSDELQELYEGLRLNNMNKYDYVLTGYTRDKSFLAMVVDIVQELKQQNPRLVYVCDPVLGDKWDGEGSMYVPEDLLSGLQRTRYLELSRDSTGQGGKPLSVGWTWLDCYGPPTPVVIQVR

SEQ ID NO: 863492 - protein, 381 aa, Homo sapiens; identical to SEQ ID NO: 863476

SEQ ID NO: 863493 - protein, 239 aa, Homo sapiens; identical to SEQ ID NO: 863477

SEQ ID NO: 863494 - protein, 239 aa, Homo sapiens; identical to SEQ ID NO: 863477

SEQ ID NO: 863495 - protein, 239 aa, Homo sapiens; identical to SEQ ID NO: 863477

SEQ ID NO: 863496 - protein, 353 aa, Homo sapiens
GAARNSRVRSRPLRSEGGVCADRVRRAPEPESQPRGAGAGARARAEPEPERAAETVPPPRPRAAAARPGMEEECRVLSIQSHVIRGYVGNRAATFPLQVLGFEIDAVNSVQFSNHTGYAHWKGQVLNSDELQELYEGLRLNNMNKYDYVLTVCDPVLGDKWDGEGSMYVPEDLLPVYKEKVVPLADIITPNQFEAELLSGRKIHSQEEALRVMDMLHSMGPDTVVITSSDLPSPQGSNYLIVLGSQRRRNPAGSVVMERIRMDIRKVDAVFVGTGDLFAAMLLAWTHKHPNNLKVACEKTVSTLHHVLQRTIQCAKAQAGEGVRPSPMQLELRMVQSKRDIEDPEIVVQATVL

SEQ ID NO: 863497 - protein, 399 aa, Homo sapiens
GAARNSRVRSRPLRSEGGVCADRVRRAPEPESQPRGAGAGARARAEPEPERAAETVPPPRPRAAAARPGMEEECRVLSIQSHVIRGYVGNRAATFPLQVLGFEIDAVNSVQFSNHTGYAHWKGQVLNSDELQELYEGLRLNNMNKYDYVLTVIVVSLLFSEGDLDSPPKGYTRDKSFLAMVVDIVQELKQQNPRLVYVCDPVLGDKWDGEGSMYVPEDLLPVYKEKVVPLADIITPNQFEAELLSGRKIHSQEEALRVMDMLHSMGPDTVVITSSDLPSPQGSNYLIVLGSQRRRNPAGSVVMERIRMDIRKVDAVFVGTGDLFAAMLLAWTHKHPNNLKVACEKTVSTLHHVLQRTIQCAKAQAGEGVRPSPMQLELRMVQSKRDIEDPEIVVQATVL

SEQ ID NO: 863498 - protein, 212 aa, Homo sapiens
MNKYDYVLTGYTRDKSFLAMVVDIVQELKQQNPRLVYVCDPVLGDKWDGEGSMYVPEDLLPVYKEKVVPLADIITPNQFEADVVITSSDLPSPQGSNYLIVLGSQRRRNPAGSVVMERIRMDIRKVDAVFVGTGDLFAAMLLAWTHKHPNNLKVACEKTVSTLHHVLQRTIQCAKAQAGEGVRPSPMQLELRMVQSKRDIEDPEIVVQATVL

SEQ ID NO: 863499 - protein, 228 aa, Homo sapiens
MTTCSQLIVVSLLFSEGDLDSPPKGYTRDKSFLAMVVDIVQELKQQNPRLVYVCDPVLGDKWDGEGSMYVPEDLLPVYKEKVVPLADIITPNQFEAELLSGRKIHSQEEALRNYLIVLGSQRRRNPAGSVVMERIRMDIRKVDAVFVGTGDLFAAMLLAWTHKHPNNLKVACEKTVSTLHHVLQRTIQCAKAQAGEGVRPSPMQLELRMVQSKRDIEDPEIVVQATVL

SEQ ID NO: 863500 - protein, 128 aa, Homo sapiens
ARVGLPCAPRSMGYSRTTRRMRRRNPAGSVVMERIRMDIRKVDAVFVGTGDLFAAMLLAWTHKHPNNLKVACEKTVSTLHHVLQRTIQCAKAQAGEGVRPSPMQLELRMVQSKRDIEDPEIVVQATVL

SEQ ID NO: 863501 - protein, 230 aa, Homo sapiens
GAARNSRVRSRPLRSEGGVCADRVRRAPEPESQPRGAGAGARARAEPEPERAAETVPPPRPRAAAARPGMEEECRVLSIQSHVIRGYVGNRAATFPLQVLGFEIDAVNSVQFSNHTGYAHWKGQVLNSDELQELYEGLRLNNMNKYDYVLTGYTRDKSFLAWTHKHPNNLKVACEKTVSTLHHVLQRTIQCAKAQAGEGVRPSPMQLELRMVQSKRDIEDPEIVVQATVL

SEQ ID NO: 863502 - protein, 134 aa, Homo sapiens
MTTCSQLIVVSLLFSEGDLDSPPKGYTRDKSFLAMVVDIVQELKQQNPRLVYVCDPVLGDKWDGEGSMSKTPSQKTKEKSRNHLTHELCSNSSSCSPQTWTSDQVDGEQIHCDQSRSLEFRGGRNPKVILPVGF

SEQ ID NO: 863503 - protein, 234 aa, Homo sapiens
GAARNSRVRSRPLRSEGGVCADRVRRAPEPESQPRGAGAGARARAEPEPERAAETVPPPRPRAAAARPGMEEECRVLSIQSHVIRGYVGNRAATFPLQVLGFEIDAVNSVQFSNHTGYAHWKGQVLNSDELQELYVCDPVLGDKWDGEGSMYVPEDLLPVYKEKVVPLADIITPNQFEAELLSGRKIHSQEEALRPGHGAVRAPPLARDTQRVGVSVFVPVKTCNVCLRAMTET

SEQ ID NO: 863504 - protein, 120 aa, Homo sapiens
MGRLWKRPDQLAMLMNKLILMGCVKRRCQPRGSACSCSHLKAENSDFILGYVCQPQRINYLHTQKQWSRIFWQDFQDLCHRCLISVSSQSVRILKDLKYCKLSVYRGCGFGLVHLQSAHF

SEQ ID NO: 863505 - protein, 192 aa, Homo sapiens
MASNKTTLQKMGKKQNGKSKKVEEAEPEEFVVEKVLDRRVVNGKVEYFLKWKGFTDADNTWEPEENLDCPELIEAFLNSQKAGKEKDGTKRKSLSDSESDDSKSKKKRDAADKPRGFARGLDPERIIGATDSSGELMFLMKWKDSDEADLVLAKEANMKCPQIVIAFYEERLTWHSCPEDEAQYLINGKHGF

SEQ ID NO: 863506 - protein, 183 aa, Homo sapiens
MASNKTTLQKMGKKQNGKSKKVEEAEPEEFVVEKVLDRRVVNGKVEYFLKWKGFTDADNTWEPEENLDCPELIEAFLNSQKAGKEKDGTKRKSLSDSESDDSKSKKKRDAADKPRGFARGLDPERIIGATDSSGELMFLMKWKDSDEADLVLAKEANMKCPQIVIAFYEERLTWHSCPEDEAQ

SEQ ID NO: 863507 - protein, 183 aa, Homo sapiens; identical to SEQ ID NO: 863506

SEQ ID NO: 863508 - protein, 183 aa, Homo sapiens; identical to SEQ ID NO: 863506

SEQ ID NO: 863509 - protein, 183 aa, Homo sapiens; identical to SEQ ID NO: 863506

SEQ ID NO: 863510 - protein, 183 aa, Homo sapiens; identical to SEQ ID NO: 863506

SEQ ID NO: 863511 - protein, 183 aa, Homo sapiens; identical to SEQ ID NO: 863506

SEQ ID NO: 863512 - protein, 183 aa, Homo sapiens; identical to SEQ ID NO: 863506

SEQ ID NO: 863513 - protein, 183 aa, Homo sapiens; identical to SEQ ID NO: 863506

SEQ ID NO: 863514 - protein, 183 aa, Homo sapiens; identical to SEQ ID NO: 863506

SEQ ID NO: 863515 - protein, 183 aa, Homo sapiens; identical to SEQ ID NO: 863506

SEQ ID NO: 863516 - protein, 173 aa, Homo sapiens
MGKKQNGKSKKVEEAEPEEFVVEKVLDRRVVNGKVEYFLKWKGFTDADNTWEPEENLDCPELIEAFLNSQKAGKEKDGTKRKSLSDSESDDSKSKKKRDAADKPRGFARGLDPERIIGATDSSGELMFLMKWKDSDEADLVLAKEANMKCPQIVIAFYEERLTWHSCPEDEAQ

SEQ ID NO: 863517 - protein, 195 aa, Homo sapiens
MEHPMDKSYECGNREMGNTNQEMDKSKKVGRGGQQTARNSESVRVKYWIDEKWNWRRNGIFPVRGRDVADNTWEPEENLDCPELIEAFLNSQKAGKEKDGTKRKSLSDSESDDSKSKKKRDAADKPRGFARGLDPERIIGATDSSGELMFLMKWKDSDEADLVLAKEANMKCPQIVIAFYEERLTWHSCPEDEAQ

SEQ ID NO: 863518 - protein, 183 aa, Homo sapiens; identical to SEQ ID NO: 863506

SEQ ID NO: 863519 - protein, 183 aa, Homo sapiens; identical to SEQ ID NO: 863506

SEQ ID NO: 863520 - protein, 183 aa, Homo sapiens; identical to SEQ ID NO: 863506

SEQ ID NO: 863521 - protein, 77 aa, Homo sapiens
RRGGRRVRCGAVPLSPRAAAFVSPRGCADHEARAPGWGRAPALRHVWTPGFSGGGRERVFARGDSFFKVSRNGVEAS

SEQ ID NO: 863522 - protein, 105 aa, Homo sapiens
MGKKQNGKSKKVEEAEPEEFVVEKVLDRRVVNGKVEYFLKWKGFTDADNTWEPEENLDCPELIEAFLNSQKAGKEKDGTKRKSLSDSESDDSKSKKKRDAMRKRD

SEQ ID NO: 863523 - protein, 113 aa, Homo sapiens
MTKTNEVQGNSTKKEKYTRQQRGSRENDDVNKPPKGPPEAIDTPRKRGESAQQVANQPMADKESEKCPRNKEPRRDEIEQQQDEEKSYEESTTEPAERRDKKKQRRHNKHTEE

SEQ ID NO: 863524 - protein, 183 aa, Homo sapiens; identical to SEQ ID NO: 863506

SEQ ID NO: 863525 - protein, 183 aa, Homo sapiens; identical to SEQ ID NO: 863506

SEQ ID NO: 863526 - protein, 183 aa, Homo sapiens; identical to SEQ ID NO: 863506

SEQ ID NO: 863527 - protein, 183 aa, Homo sapiens; identical to SEQ ID NO: 863506

SEQ ID NO: 863528 - protein, 183 aa, Homo sapiens; identical to SEQ ID NO: 863506

SEQ ID NO: 863529 - protein, 183 aa, Homo sapiens; identical to SEQ ID NO: 863506

SEQ ID NO: 863530 - protein, 183 aa, Homo sapiens; identical to SEQ ID NO: 863506

SEQ ID NO: 863531 - protein, 183 aa, Homo sapiens; identical to SEQ ID NO: 863506

SEQ ID NO: 863532 - protein, 131 aa, Homo sapiens
MASNKTTLQKMGKKQNGKSKKVEEAEPEEFVVEKVLDRRVVNGKVEYFLKWKGFTDADNTWEPEENLDCPELIEAFLNSQKAGKEKDGTKRKSLSDSESDDSKSKKKRDANNWCHRQQWRIDVSHEMERFR

SEQ ID NO: 863533 - protein, 111 aa, Homo sapiens
MASNKTTLQKMGKKQNGKSKKVEEAEPEEFVVEKVLDRRVVNGKVEYFLKWKGFTDADNTWEPEENLDCPELIEAFLNSQKAGKEKDGTKRKSLSDSESDDSKSKKKRDAV

SEQ ID NO: 863534 - protein, 142 aa, Homo sapiens
MASNKTTLQKMGKKQNGKSKKVEEAEPEEFVVEKVLDRRVVNGKVEYFLKWKGFTDADNTWEPEENLDCPELIEAFLNSQKAGKEKDGTNKAAQDLVLAAGSWSTCGSAVGVSWGPSTSTLFLSTSRCILISMSLLAASWST

SEQ ID NO: 863535 - protein, 77 aa, Homo sapiens; identical to SEQ ID NO: 863521

SEQ ID NO: 863536 - protein, 577 aa, Homo sapiens
RRERERERTSLGGPKGKKKNGRNRGGKANNPPYLPPEAEDGNIEYKLKLVNPSQYRFEHLVTQMKWRLQEGRGEAVYQIGVEDNGLLVGLAEEEMRASLKTLHRMAEKVGADITVLREREVDYDSDMPRKITEVLVRKVPDNQQFLDLRVAVLGNVDSGKSTLLGVLTQGELDNGRGRARLNLFRHLHEIQSGRTSSISFEILGFNSKGEVVNYSDSRTAEEICESSSKMITFIDLAGHHKYLHTTIFGLTSYCPDCALLLVSANTGIAGTTREHLGLALALKVPFFIVVSKIDLCAKTTVERTVRQLERVLKQPGCHKVPMLVTSEDDAVTAAQQFAQSPNVTPIFTLSSVSGESLDLLKVFLNILPPLTNSKEQEELMQQLTEFQVDEIYTVPEVGTVVGGTLSSGICREGDQLVVGPTDDGCFLELRVCSIQRNRSACRVLRAGQAATLALGDFDRALLRKGMVMVSPEMNPTICSVFEAEIVLLFHATTFRRGFQVTVHVGNVRQTAVVEKIHAKDKLRTGEKAVVRFRFLKHPEYLKVGAKLLFREGVTKGIGHVTDVQAITAGEAQANMGF

SEQ ID NO: 863537 - protein, 210 aa, Homo sapiens
MITFIDLAGHHKYLHTTIFGLTSYCPDCALLLVSANTGIAGTTREHLGLALALKVPFFIVVSKIDLCAKTTVERTVRQLERVLKQPGCHKVPMLVTSEDDAVTAAQQFAQSPNVTPIFTLSSVSGESLDLLKVFLNILPPLTNSKEQEELMQQLTEFQVDEIYTVPEVGTVVGGTLSRLGFHYQKSWRTVVCWLWREETVLLPIGESPGP

SEQ ID NO: 863538 - protein, 429 aa, Homo sapiens
QGGGAREENTSFRSRDPREEGQRLDSQAEDGNIEYKLKLVNPSQYRFEHLVTQMKWRLQEGRGEAVYQIGVEDNGLLVGLAEEEMRASLKTLHRMAEKVGADITVLREREVDYDSDMPRKITEVLVRKVPDNQQFLDLRVAVLGNVDSGKSTLLGVLTQGELDNGRGRARLNLFRHLHEIQSGRTSSISFEILGFNSKGEVVNYSDSRTAEEICESSSKMITFIDLAGHHKYLHTTIFGLTSYCPDCALLLVSANTGIAGTTREHLGLALALKVPFFIVVSKIDLCAKTTVERTVRQLERVLKQPGCHKVPMLVTSEDDAVTAAQQFAQSPNVTPIFTLSSVSGESLDLLKVFLNILPPLTNSKEQEELMQQLTEFQVDEIYTVPEVGTVVGGTLSRLGFHYQKSWRTVVCWLWREETVLLPIGESPGP

SEQ ID NO: 863539 - protein, 277 aa, Homo sapiens
SGSKGGGDGGGGRGRGRAGGWRQRRMDSRVSELFGGCCRPGGGPAVGGTLKARGAGSSSGCGGPKGKKKNGRNRGGKANNPPYLPPEAEDGNIEYKLKLVNPSQYRFEHLVTQMKWRLQEGRGEAVYQIGVEDNGLLVGLAEEEMRASLKTLHRMAEKVGADITVLREREVDYDSDMPRKITEVLVRKVPDNQQFLDLRVAVLGNVDSGKSTLLGVLTQGELDNGRGRARLNLFRHLHEIQSGRTSSISFEILGFNSKGEVHGINGTQWGQTLRMGW

SEQ ID NO: 863540 - protein, 481 aa, Homo sapiens
SGSKGGGDGGGGRGRGRAGGWRQRRMDSRVSELFGGCCRPGGGPAVGGTLKARGAGSSSGCGGPKGKKKNGRNRGGKANNPPYLPPEAEDGNIEYKYRFEHLVTQMKWRLQEGRGEAVYQIGVEDNGLLVGLAEEEMRASLKTLHRMAEKVGADITVLREREVDYDSDMPRKITEVLVRKVPDNQQFLDLRVAVLGNVDSGKSTLLGVLTQGELDNGRGRARLNLFRHLHEIQSGRTSSISFEILGFNSKGEVVNYSDSRTAEEICESSSKMITFIDLAGHHKYLHTTIFGLTSYCPDCALLLVSANTGIAGTTREHLGLALALKVPFFIVVSKIDLCAKTTVERTVRQLERVLKQPGCHKVPMLVTSEDDAVTAAQQFAQSPNVTPIFTLSSVSGESLDLLKVFLNILPPLTNSKEQEELMQQLTEFQVDEIYTVPEVGTVVGGTLSRLGFHYQKSWRTVVCWLWREETVLLPIGESPGP

SEQ ID NO: 863541 - protein, 302 aa, Homo sapiens
RITHPSLRSPTAACPKPSHCHKSTIPNPLRDIPTVRSQKPGCHKVPMLVTSEDDAVTAAQQFAQSPNVTPIFTLSSVSGESLDLLKVFLNILPPLTNSKEQEELMQQLTEFQVDEIYTVPEVGTVVGGTLSSGICREGDQLVVGPTDDGCFLELRVCSIQRNRSACRVLRAGQAATLALGDFDRALLRKGMVMVSPEMNPTICSVFEAEIVLLFHATTFRRGFQVTVHVGNVRQTAVVEKIHAKDKLRTGEKAVVRFRFLKHPEYLKVGAKLLFREGVTKGIGHVTDVQAITAGEAQANMGF

SEQ ID NO: 863542 - protein, 108 aa, Homo sapiens
RVQEIEEFNSDQDVDVGYENSLLPTSKLPANRIKVGNVRQTAVVEKIHAKDKLRTGEKAVVRFRFLKHPEYLKVGAKLLFREGVTKGIGHVTDVQAITAGEAQANMGF

SEQ ID NO: 863543 - protein, 118 aa, Homo sapiens
VRKEGGLPQTGRELLDPNNGNKTPLRVGSGLIGLWRVESHGWQRMGQKALARGVTTYLLQDKLRTGEKAVVRFRFLKHPEYLKVGAKLLFREGVTKGIGHVTDVQAITAGEAQANMGF

SEQ ID NO: 863544 - protein, 627 aa, Homo sapiens
SGSKGGGDGGGGRGRGRAGGWRQRRMDSRVSELFGGCCRPGGGPAVGGTLKARGAGSSSGCGGPKGKKKNGRNRGGKANNPPYLPPEAEDGNIEYKLKLVNPSQYRFEHLVTQMKWRLQEGRGEAVYQIGVEDNGLLVGLAEEEMRASLKTLHRMAEKVGADITVLREREVDYDSDMPRKITEVLVRKVPDNQQFLDLRVAVLGNVDSGKSTLLGVLTQGELDNGRGRARLNLFRHLHEIQSGRTSSISFEILGFNSKGEVVNYSDSRTAEEICESSSKMITFIDLAGHHKYLHTTIFGLTSYCPDCALLLVSANTGIAGTTREHLGLALALKVPFFIVVSKIDLCAKTTVERTVRQLERVLKQPGCHKVPMLVTSEDDAVTAAQQFAQSPNVTPIFTLSSVSGESLDLLKVFLNILPPLTNSKEQEELMQQLTEFQVDEIYTVPEVGTVVGGTLSSGICREGDQLVVGPTDDGCFLELRVCSIQRNRSACRVLRAGQAATLALGDFDRALLRKGMVMVSPEMNPTICSVFEAEIVLLFHATTFRRGFQVTVHVGNVRQTAVVEKIHAKDKLRTGEKAVVRFRFLKHPEYLKVGAKLLFREGVTKGIGHVTDVQAITAGEAQANMGF

SEQ ID NO: 863545 - protein, 210 aa, Homo sapiens; identical to SEQ ID NO: 863537

SEQ ID NO: 863546 - protein, 210 aa, Homo sapiens; identical to SEQ ID NO: 863537

SEQ ID NO: 863547 - protein, 340 aa, Homo sapiens
MITFIDLAGHHKYLHTTIFGLTSYCPDCALLLVSANTGIAGTTREHLGLALALKVPFFIVVSKIDLCAKTTVERTVRQLERVLKQPGCHKVPMLVTSEDDAVTAAQQFAQSPNVTPIFTLSSVSGESLDLLKVFLNILPPLTNSKEQEELMQQLTEFQVDEIYTVPEVGTVVGGTLSSGICREGDQLVVGPTDDGCFLELRVCSIQRNRSACRVLRAGQAATLALGDFDRALLRKGMVMVSPEMNPTICSVFEAEIVLLFHATTFRRGFQVTVHVGNVRQTAVVEKIHAKDKLRTGEKAVVRFRFLKHPEYLKVQSSSIVTKYCGLFSVVQVSRILRPFT

SEQ ID NO: 863548 - protein, 116 aa, Homo sapiens
GRESLMLELPFLGLGSVPPQGMVMVSPEMNPTICSVFEAEIVLLFHATTFRRGFQVTVHVGNVRQTAVVEKIHAKVRGTWPSISPEVRKEGGLPQTGRELLDPTMGIKPHLGWVAA

SEQ ID NO: 863549 - protein, 283 aa, Homo sapiens
RGDIDFWEKQAEDGNIEYKLKLVNPSQYRFEHLVTQMKWRLQEGRGEAFTPIFTLSSVSGESLDLLKVFLNILPPLTNSKEQEELMQQLTEFQVDEIYTVPEVGTVVGGTLSSGICREGDQLVVGPTDDGCFLELRVCSIQRNRSACRVLRAGQAATLALGDFDRALLRKGMVMVSPEMNPTICSVFEAEIVLLFHATTFRRGFQVTVHVGNVRQTAVVEKIHAKDKLRTGEKAVVRFRFLKHPEYLKVGAKLLFREGVTKGIGHVTDVQAITAGEAQANMGF

SEQ ID NO: 863550 - protein, 577 aa, Homo sapiens; identical to SEQ ID NO: 863536

SEQ ID NO: 863551 - protein, 489 aa, Homo sapiens
SGSKGGGDGGGGRGRGRAGGWRQRRMDSRVSELFGGCCRPGGGPAVGGTLKARGAGSSSGCGGPKGKKKNGRNRGGKANNPPYLPPEAEDGNIEYKLKLVNPSQYRFEHLVTQMKWRLQEGRGEAVYQIGVEDNGLLVGLAEEEMRASLKTLHRMAEKVGADITVLREREVDYDSDMPRKITEVLVRKVPDNQQFLDLRVAVLGNVDSGKSTLLGVLTQGELDNGRGRARLNLFRHLHEIQSGRTSSISFEILGFNSKGEVVNYSDSRTAEEICESSSKMITFIDLAGHHKYLHTTIFGLTSYCPDCALLLVSANTGIAGTTREHLGLALALKVPFFIVVSKIDLCAKTTVERTVRQLERVLKQPGCHKVPMLVTSEDDAVTAAQQFAQSPNVTPIFTLSSVSGESLDLLKVFLNILPPLTNSKEQEELMQQLTEFQVDEIYTVPEVGTVVGGTLSRLGFHYQKSWRTVVCWLWREETVLLPIGESPGP

SEQ ID NO: 863552 - protein, 376 aa, Homo sapiens
MKWRLQEGRGEAVYQIGVEDNGLLVGLAEEEMRASLKTLHRMAEKVGADITVLREREVDYDSDMPRKITEVLVRKVPDNQQFLDLRVAVLGNVDSGKSTLLGVLTQGELDNGRGRARLNLFRHLHEIQSGRTSSISFEILGFNSKGEVVNYSDSRTAEEICESSSKMITFIDLAGHHKYLHTTIFGLTSYCPDCALLLVSANTGIAGTTREHLGLALALKVPFFIVVSKIDLCAKTTVERTVRQLERVLKQPGCHKVPMLVTSEDDAVTAAQQFAQSPNVTPIFTLSSVSGESLDLLKVFLNILPPLTNSKEQEELMQQLTEFQVDEIYTVPEVGTVVGGTLSRLGFHYQKSWRTVVCWLWREETVLLPIGESPGP

SEQ ID NO: 863553 - protein, 210 aa, Homo sapiens; identical to SEQ ID NO: 863537

SEQ ID NO: 863554 - protein, 83 aa, Homo sapiens
GDLEDPFDVVGNVRQTAVVEKIHAKDKLRTGEKAVVRFRFLKHPEYLKVGAKLLFREGVTKGIGHVTDVQAITAGEAQANMGF

SEQ ID NO: 863555 - protein, 125 aa, Homo sapiens
GSLRLGALRGGEQRISYPTSTSGQIELFNLLHSKLVKIVKRCISCPPIESMVGNVRQTAVVEKIHAKDKLRTGEKAVVRFRFLKHPEYLKVGAKLLFREGVTKGIGHVTDVQAITAGEAQANMGF

SEQ ID NO: 863556 - protein, 210 aa, Homo sapiens; identical to SEQ ID NO: 863537

SEQ ID NO: 863557 - protein, 210 aa, Homo sapiens; identical to SEQ ID NO: 863537

SEQ ID NO: 863558 - protein, 106 aa, Homo sapiens
PLTQSSVRGGERLEFLSLAIHPQFLDLRVAVLGNVDSGKSTLLGVLTQGELDNGRGRARLNLFRHLHEIQSGRTSSISFEILGFNSKGEVHGINGTQWGQTLRMGW

SEQ ID NO: 863559 - protein, 382 aa, Homo sapiens
MRSGGRGRPRLRLGERGLMEPLLPPKRRLLPRVRLLPLLLALAVGSAFYTIWSGWHRRTEELPLGRELRVPLIGSLPEARLRRVVGQLDPQRLWSTYLRPLLVVRTPGSPGNLQVRKFLEATLRSLTAGWHVELDPFTASTPLGPVDFGNVVATLDPRAARHLTLACHYDSKLFPPGSTPFVGATDSAVPCALLLELAQALDLELSRAKKQAAPVTLQLLFLDGEEALKEWGPKDSLYGSRHLAQLMESIPHSPGPTRIQAIELFMLLDLLGAPNPTFYSHFPRTVRWFHRLRSIEKRLHRLNLLQSHPQEVMYFQPGEPFGSVEDDHIPFLRRGVPVLHLISTPFPAVWHTPADTEVNLHPPTVHNLCRILAVFLAEYLGL

SEQ ID NO: 863560 - protein, 382 aa, Homo sapiens; identical to SEQ ID NO: 863559

SEQ ID NO: 863561 - protein, 75 aa, Homo sapiens
KVTWRLGLGSWVVVGCSGPDKVSSVTSGVPVLHLISTPFPAVWHTPADTEVNLHPPTVHNLCRILAVFLAEYLGL

SEQ ID NO: 863562 - protein, 288 aa, Homo sapiens
MRSGGRGRPRLRLGERGLMEPLLPPKRRLLPRVRLLPLLLALAVGSAFYTIWSGWHRRTEELPLGRELRVPLIGSLPEARLRRVVGQLDPQRLWSTYLRPLLVVRTPGSPGNLQVRKAAPVTLQLLFLDGEEALKEWGPKDSLYGSRHLAQLMESIPHSPGPTRIQAIELFMLLDLLGAPNPTFYSHFPRTVRWFHRLRSIEKRLHRLNLLQSHPQEVMYFQPGEPFGSVEDDHIPFLRRGVPVLHLISTPFPAVWHTPADTEVNLHPPTVHNLCRILAVFLAEYLGL

SEQ ID NO: 863563 - protein, 117 aa, Homo sapiens [sequence omitted]

SEQ ID NO: 863564 - protein, 1209 aa, Homo sapiens
MPRGEAPGPGRRGAKDEALGEESGERWSPEFHLQRKLADSSHSEQQDRNRVSEELIMVVQEMKKYFPSERRNKPSTLDALNYALRCVHSVQANSEFFQILSQNGAPQADVSMYSLEELATIASEHTSKNTDTFVAVFSFLSGRLVHISEQAALILNRKKDVLASSHFVDLLAPQDMRVFYAHTARAQLPFWNNWTQRAAARYECAPVKPFFCRIRGGEDRKQEKCHSPFRIIPYLIHVHHPAQPELESEPCCLTVVEKIHSGYEAPRIPVNKRIFTTTHTPGCVFLEVDEKAVPLLGYLPQDLIGTSILSYLHPEDRSLMVAIHQKVLKYAGHPPFEHSPIRFCTQNGDYIILDSSWSSFVNPWSRKISFIIGRHKVRTSPLNEDVFATKIKKMNDNDKDITELQEQIYKLLLQPVHVSVSSGYGSLGSSGSQEQLVSIASSSEASGHRVEETKAEQMTLQQVYASVNKIKNLGQQLYIESMTKSSFKPVTGTRTEPNGGGESANGGGECKTFTSFHQTLKNNSVYTEPCEDLRNDEHSPSYQQINCIDSVIRYLKSYNIPALKRKCISCTNTTSSSSEEDKQNHKADDVQALQAGLQIPAIPKSEMPTNGRSIDTGGGAPQILSTAMLSLGSGISQCGYSSTIVHVPPPETARDATLFCEPWTLNMQPAPLTSEEFKHVGLTAAVLSAHTQKEEQNYVDKFREKILSSPYSSYLQQESRSKAKYSYFQGDSTSKQTRSAGCRKGKHKRKKLPEPPDSSSSNTGSGPRRGAHQNAQPCCPSAASSPHTSSPTFPPAAMVPSQAPYLVPAFPLPAATSPGREYAAPGTAPEGLHGPPLSEGLQPYPAFPFPYLDTFMTVFLPDPPVCPLLSPSFLPCPFLGATASSAISPSMSSAMSPTLDPPPSVTSQRREEEKWEAQSEGHPFITSRSSSPLQLNLLQEEMPRPSESPDQMRRNTCPQTEYCVTGNNGSESSPATTGALSTGSPPRENPSHPTASALSTGSPPMKNPSHPTASALSTGSPPMKNPSHPTASTLSMGLPPSRTPSHPTATVLSTGSPPSESPSRTGSAASGSSDSSIYLTSSVYSSKISQNGQQSQDVQKKETFPNVAEEPIWRMIRQTPERILMTYQVPERVKEVVLKEDLEKLESMRQQQPQFSHGQKEELAKVYNWIQSQTVTQEIDIQACVTCENEDSADGAATSCGQVLVEDSC

SEQ ID NO: 863565 - protein, 1184 aa, Homo sapiens [sequence omitted]

SEQ ID NO: 863566 - protein, 716 aa, Homo sapiens
MLGTFNCTSLYSVSGECKTFTSFHQTLKNNSVYTEPCEDLRNDEHSPSYQQINCIDSVIRYLKSYNIPALKRKCISCTNTTSSSSEEDKQNHKADDVQALQAGLQIPAIPKSEMPTNGRSIDTGGGAPQILSTAMLSLGSGISQCGYSSTIVHVPPPETARDATLFCEPWTLNMQPAPLTSEEFKHVGLTAAVLSAHTQKEEQNYVDKFREKILSSPYSSYLQQESRSKAKYSYFQGDSTSKQTRSAGCRKGKHKRKKLPEPPDSSSSNTGSGPRRGAHQNAQPCCPSAASSPHTSSPTFPPAAMVPSQAPYLVPAFPLPAATSPGREYAAPGTAPEGLHGPPLSEGLQPYPAFPFPYLDTFMTVFLPDPPVCPLLSPSFLPCPFLGATASSAISPSMSSAMSPTLDPPPSVTSQRREEEKWEAQSEGHPFITSRSSSPLQLNLLQEEMPRPSESPDQMRRNTCPQTEYCVTGNNGSESSPATTGALSTGSPPRENPSHPTASALSTGSPPMKNPSHPTASALSTGSPPMKNPSHPTASTLSMGLPPSRTPSHPTATVLSTGSPPSESPSRTGSAASGSSDSSIYLTSSVYSSKISQNGQQSQDVQKKETFPNVAEEPIWRMIRQTPERILMTYQVPERVKEVVLKEDLEKLESMRQQQPQFSHGQKEELAKVYNWIQSQTVTQEIDIQACVTCENEDSADGAATSCGQVLVEDSC

SEQ ID NO: 863567 - protein, 1202 aa, Homo sapiens
MPRGEAPGPGRRGAKDEALGEESGERWSPEFHLQRKLADSSHSEQQDRNRVSEELIMVVQEMKKYFPSERRNKPSTLDALNYALRCVHSVQANSEFFQILSQNGAPQADVSMYSLEELATIASEHTSKNTDTFVAVFSFLSGRLVHISEQAALILNRKKDVLASSHFVDLLAPQDMRVFYAHTARAQLPFWNNWTQRAAARYECAPVKPFFCRIRGGEDRKQEKCHSPFRIIPYLIHVHHPAQPELESEPCCLTVVEKIHSGYEAPRIPVNKRIFTTTHTPGCVFLEVDEKAVPLLGYLPQDLIGTSILSYLHPEDRSLMVAIHQKVLKYAGHPPFEHSPIRFCTQNGDYIILDSSWSSFVNPWSRKISFIIGRHKVRTSPLNEDVFATKIKKMNDNDKDITELQEQIYKLLLQPVHVSVSSGYGSLGSSGSQEQLVSIASSSEASGHRVEETKAEQMTLQQVYASVNKIKNLGQQLYIESMTKSSFKPVTGTRTEPNGGGECKTFTSFHQTLKNNSVYTEPCEDLRNDEHSPSYQQINCIDSVIRYLKSYNIPALKRKCISCTNTTSSSSEEDKQNHKADDVQALQAGLQIPAIPKSEMPTNGRSIDTGGGAPQILSTAMLSLGSGISQCGYSSTIVHVPPPETARDATLFCEPWTLNMQPAPLTSEEFKHVGLTAAVLSAHTQKEEQNYVDKFREKILSSPYSSYLQQESRSKAKYSYFQGDSTSKQTRSAGCRKGKHKRKKLPEPPDSSSSNTGSGPRRGAHQNAQPCCPSAASSPHTSSPTFPPAAMVPSQAPYLVPAFPLPAATSPGREYAAPGTAPEGLHGPPLSEGLQPYPAFPFPYLDTFMTVFLPDPPVCPLLSPSFLPCPFLGATASSAISPSMSSAMSPTLDPPPSVTSQRREEEKWEAQSEGHPFITSRSSSPLQLNLLQEEMPRPSESPDQMRRNTCPQTEYCVTGNNGSESSPATTGALSTGSPPRENPSHPTASALSTGSPPMKNPSHPTASALSTGSPPMKNPSHPTASTLSMGLPPSRTPSHPTATVLSTGSPPSESPSRTGSAASGSSDSSIYLTSSVYSSKISQNGQQSQDVQKKETFPNVAEEPIWRMIRQTPERILMTYQVPERVKEVVLKEDLEKLESMRQQQPQFSHGQKEELAKVYNWIQSQTVTQEIDIQACVTCENEDSADGAATSCGQVLVEDSC

SEQ ID NO: 863568 - protein, 270 aa, Homo sapiens
MPRGEAPGPGRRGAKDEALGEESGERWSPEFHLQRKLADSSHSEQQDRNRVSEELIMVVQEMKKYFPSERRNKPSTLDALNYALRCVHSVQANSEFFQILSQNGAPQADVSMYSLEELATIASEHTSKNTDTFVAVFSFLSGRLVHISEQAALILNRKKDVLASSHFVDLLAPQDMRVFYAHTARAQLPFWNNWTQRGNRTNVQMSIFPHQDQFHSYRNSTEINILFRTCTLSGFSYSCYRKSRDENSILKASDNILNTFVSILSHLFHR

SEQ ID NO: 863569 - protein, 85 aa, Homo sapiens
GGEDRKQEKCHSPFRIIPYLIHVHHPAQPELESEPCCLTVVEKIHSGYEGKSVDKMQKCQQSDRNMGKSVYVSHRTTKRALGSPI

SEQ ID NO: 863570 - protein, 1202 aa, Homo sapiens; identical to SEQ ID NO: 863567

SEQ ID NO: 863571 - protein, 1123 aa, Homo sapiens
SVELYYLPEDLTGTSILSYLHPEDRSLMVAIHQKVLKYAGHPPFEHSPIRFCTQNGDYIILEFQLVQHKNQAALILNRKKDVLASSHFVDLLAPQDMRVFYAHTARAQLPFWNNWTQRAAARYECAPVKPFFCRIRGGEDRKQEKCHSPFRIIPYLIHVHHPAQPELESEPCCLTVVEKIHSGYEAPRIPVNKRIFTTTHTPGCVFLEVDEKAVPLLGYLPQDLIGTSILSYLHPEDRSLMVAIHQKVLKYAGHPPFEHSPIRFCTQNGDYIILDSSWSSFVNPWSRKISFIIGRHKVRTSPLNEDVFATKIKKMNDNDKDITELQEQIYKLLLQPVHVSVSSGYGSLGSSGSQEQLVSIASSSEASGHRVEETKAEQMTLQQVYASVNKIKNLGQQLYIESMTKSSFKPVTGTRTEPNGGGECKTFTSFHQTLKNNSVYTEPCEDLRNDEHSPSYQQINCIDSVIRYLKSYNIPALKRKCISCTNTTSSSSEEDKQNHKADDVQALQAGLQIPAIPKSEMPTNGRSIDTGGGAPQILSTAMLSLGSGISQCGYSSTIVHVPPPETARDATLFCEPWTLNMQPAPLTSEEFKHVGLTAAVLSAHTQKEEQNYVDKFREKILSSPYSSYLQQESRSKAKYSYFQGDSTSKQTRSAGCRKGKHKRKKLPEPPDSSSSNTGSGPRRGAHQNAQPCCPSAASSPHTSSPTFPPAAMVPSQAPYLVPAFPLPAATSPGREYAAPGTAPEGLHGPPLSEGLQPYPAFPFPYLDTFMTVFLPDPPVCPLLSPSFLPCPFLGATASSAISPSMSSAMSPTLDPPPSVTSQRREEEKWEAQSEGHPFITSRSSSPLQLNLLQEEMPRPSESPDQMRRNTCPQTEYCVTGNNGSESSPATTGALSTGSPPRENPSHPTASALSTGSPPMKNPSHPTASALSTGSPPMKNPSHPTASTLSMGLPPSRTPSHPTATVLSTGSPPSESPSRTGSAASGSSDSSIYLTSSVYSSKISQNGQQSQDVQKKETFPNVAEEPIWRMIRQTPERILMTYQVPERVKEVVLKEDLEKLESMRQQQPQFSHGQKEELAKVYNWIQSQTVTQEIDIQACVTCENEDSADGAATSCGQVLVEDSC

SEQ ID NO: 863572 - protein, 1035 aa, Homo sapiens
MPRGEAPGPGRRGAKDEALGEESGERWSPEFHLQRKLADSSHSEQQDRNRVSEELIMVVQEMKKYFPSERRNKPSTLDALNYALRCVHSVQANSEFFQILSQNGAPQADVSMYSLEELATIASEHTSKNTDTFVAVFSFLSGRLVHISEQAALILNRKKDVLASSHFVDLLAPQDMRVFYAHTARAQLPFWNNWTQRAAARYECAPVKPFFCRIRGGEDRKQEKCHSPFRIIPYLIHVHHPAQPELESEPCCLTVVEKIHSGYEAPRIPVNKRIFTTTHTPGCVFLEVDEKAVPLLGYLPQDLIGTSILSYLHPEDRSLMVAIHQKVLKYAGHPPFEHSPIRFCTQNGDYIILDSSWSSFVNPWSRKISFIIGRHKVRTSPLNEDVFATKIKKMNDNDKDITELQEQIYKLLLQPVHVSVSSGYGSLGSSGSQEQLVSIASSSEASGHRVEETKAEQMTLQQVYASVNKIKNLGQQLYIESMTKSSFKPVTGTRTEPNGGGECKTFTSFHQTLKNNSVYTEPCEDLRNDEHSPSYQQINCIDSVIRYLKSYNIPALKRKCISCTNTTSSSSEEDKQNHKADDVQALQAGLQIPAIPKSEMPTNGRSIDTGGGAPQILSTAMLSLGSGISQCGYSSTIVHVPPPETARDATLFCEPWTLNMQPAPLTSEEFKHVGLTAAVLSAHTQKEEQNYVDKFREKILSSPYSSYLQQESRSKAKYSYFQGDSTSKQTRSAGCRKGKHKRKKLPEPPDSSSSNTGSGPRRGAHQNAQPCCPSAASSPHTSSPTFPPAAMVPSQAPYLVPAFPLPAATSPGREYAAPGTAPEGLHGPPLSEGLQPYPAFPFPYLDTFMTVFLPDPPVCPLLSPSFLPCPFLGATASSAISPSMSSAMSPTLDPPPSVTSQRREEEKWEAQSEGHPFITSRSSSPLQLNLLQEEMPRPSESPDQMRRNTCPQTEYCVTGNNGSESSPATTVFCPRGHLPANPHPELVQQHQEAATAVYTLLVVFILLKSPKMGSNLRTYRKKKHFLMSPKSPSGE

SEQ ID NO: 863573 - protein, 575 aa, Homo sapiens
MPRGEAPGPGRRGAKDEALGEESGERWSPEFHLQRKLADSSHSEQQDRNRVSEELIMVVQEMKKYFPSERRNKPSTLDALNYALRCVHSVQANSEFFQILSQNGAPQADVSMYSLEELATIASEHTSKNTDTFVAVFSFLSGRLVHISEQAALILNRKKDVLASSHFVDLLAPQDMRVFYAHTARAQLPFWNNWTQRAAARYECAPVKPFFCRIRGGEDRKQEKCHSPFRIIPYLIHVHHPAQPELESEPCCLTVVEKIHSGYEAPRIPVNKRIFTTTHTPGCVFLEVDEKAVPLLGYLPQDLIGTSILSYLHPEDRSLMVAIHQKVLKYAGHPPFEHSPIRFCTQNGDYIILDSSWSSFVNPWSRKISFIIGRHKVRTSPLNEDVFATKIKKMNDNDKDITELQEQIYKLLLQPVHVSVSSGYGSLGSSGSQEQLVSIASSSEASGHRVEETKAEQMTLQQVYASVNKIKNLGQQLYIESMTKSSFKPVTGTRTEPNGGGESANGGGESAGSPKDLLPWAVTLCIDVMYVIREHKVMTLCCCFSYFLICLDSNSNSNSSNNNGSNKYCSERKWY

SEQ ID NO: 863574 - protein, 164 aa, Homo sapiens
MPRGEAPGPGRRGAKDEALGEESGERWSPEFHLQRKLADSSHSEQQDRNRVSEELIMVVQEMKKYFPSERRNKPSTLDALNYALRCVHSVQANSEFFQILSQNGAPQADVSMYSLEELATIASEHTSKNTFQYLLLQVVTTGCYRTGYLCGSIFISVWKVSAHF

SEQ ID NO: 863575 - protein, 428 aa, Homo sapiens
MKRGGRDSDRNSSEEGTAEKSKKLRTTNEHSQTCDWGNLLQDIILQVFKYLPLLDRAHASQVCRNWNQVFHMPDLWRCFEFELNQPATSYLKATHPELIKQIIKRHSNHLQYVSFKVDSSKESAEAACDILSQLVNCSLKTLGLISTARPSFMDLPKSHFISALTVVFVNSKSLSSLKIDDTPVDDPSLKVLVANNSDTLKLLKMSSCPHVSPAGILCVADQCHGLRELALNYHLLSDELLLALSSEKHVRLEHLRIDVVSENPGQTHFHTIQKSSWDAFIRHSPKVNLVMYFFLYEEEFDPFFRYEIPATHLYFGRSVSKDVLGRVGMTCPRLVELVVCANGLRPLDEELIRIAERCKNLSAIGLGECEVSCSAFVEFVKMCGGRLSQLSIMEEVLIPDQKYSLEQIHWEVSKHLGRVWFPDMMPTW

SEQ ID NO: 863576 - protein, 380 aa, Homo sapiens
MKRGGRDSDRNSSEEGTAEKSKKLRTTNEHSQTCDWGNLLQDIILQVFKYLPLLDRAHASQVCRNWNQVDSSKESAEAACDILSQLVNCSLKTLGLISTARPSFMDLPKSHFISALTVVFVNSKSLSSLKIDDTPVDDPSLKVLVANNSDTLKLLKMSSCPHVSPAGILCVADQCHGLRELALNYHLLSDELLLALSSEKHVRLEHLRIDVVSENPGQTHFHTIQKSSWDAFIRHSPKVNLVMYFFLYEEEFDPFFRYEIPATHLYFGRSVSKDVLGRVGMTCPRLVELVVCANGLRPLDEELIRIAERCKNLSAIGLGECEVSCSAFVEFVKMCGGRLSQLSIMEEVLIPDQKYSLEQIHWEVSKHLGRVWFPDMMPTW

SEQ ID NO: 863577 - protein, 276 aa, Homo sapiens
MDLPKSHFISALTVVFVNSKSLSSLKIDDTPVDDPSLKVLVANNSDTLKLLKMSSCPHVSPAGILCVADQCHGLRELALNYHLLSDELLLALSSEKHVRLEHLRIDVVSENPGQTHFHTIQKSSWDAFIRHSPKVNLVMYFFLYEEEFDPFFRYEIPATHLYFGRSVSKDVLGRVGMTCPRLVELVVCANGLRPLDEELIRIAERCKNLSAIGLGECEVSCSAFVEFVKMCGGRLSQLSIMEEVLIPDQKYSLEQIHWEVSKHLGRVWFPDMMPTW

SEQ ID NO: 863578 - protein, 428 aa, Homo sapiens; identical to SEQ ID NO: 863575

SEQ ID NO: 863579 - protein, 227 aa, Homo sapiens
MKRGGRDSDRNSSEEGTAEKSKKLRTTNEHSQTCDWGNLLQDIILQVFKYLPLLDRAHASQVCRNWNQVFHMPDLWRCFEFELNQPATSYLKATHPELIKQIIKRHSNHLQYVSFKVDSSKESAEAACDILSQLVNCSLKTLGLISTARPSFMDLPKSHFISALTVVFVNSKSLSSLKIDDTPVDDPSLKVLVANNSDTLKLLKMSSCPHVSPAETCSVDHQILKGP

SEQ ID NO: 863580 - protein, 428 aa, Homo sapiens; identical to SEQ ID NO: 863575

SEQ ID NO: 863581 - protein, 428 aa, Homo sapiens; identical to SEQ ID NO: 863575

SEQ ID NO: 863582 - protein, 250 aa, Homo sapiens
MKRGGRDSDRNSSEEGTAEKSKKLRTTNEHSQTCDWGNLLQDIILQVFKYLPLLDRAHASQVCRNWNQVFHMPDLWRCFEFELNQPATSYLKATHPELIKQIIKRHSNHLQYVSFKVDSSKESAEAACDILSQLVNCSLKTLGLISTARPSFMDLPKSHFISALTVVFVNSKSLSSLKIDDTPVDDPSLKVLVANNSDTLKLLKMSSCPHVSPAAISDRRRLCLLCQRLESTSQVCGLCPRLRTGVLPPG

SEQ ID NO: 863583 - protein, 130 aa, Homo sapiens [sequence omitted]

SEQ ID NO: 863584 - protein, 130 aa, Homo sapiens [sequence omitted]

SEQ ID NO: 863585 - protein, 130 aa, Homo sapiens [sequence omitted]

SEQ ID NO: 863586 - protein, 118 aa, Homo sapiens
MAGEQSGPRASELRPRHVPPSPPLAGAGAPRRETFRTQAGRRGAVAPSRSFLVSAMFFFFLRRSFALFAQAGGQWRRLGSLQPPPPGLKGLSGLRPRCSCKLEPAYAPSAGLAAAERG

SEQ ID NO: 863587 - protein, 130 aa, Homo sapiens [sequence omitted]

SEQ ID NO: 863588 - protein, 130 aa, Homo sapiens [sequence omitted]

SEQ ID NO: 863589 - protein, 270 aa, Homo sapiens
VTPRTGREPGGVRSRQAAWLMAVCGLGSRLGLGSRLGLRGCFGAARLLYPRFQSRGPQGVEDGDRPQPSSKTPRIPKIYTKTGDKGFSSTFTGERRPKDDQVFEAVGTTDELSSAIGFALELVTEKGHTFAEELQKIQCTLQDVGSALATPCSSAREAHLKYTTFKAGPILELEQWIDKYTSQLPPLTAFILPSGGKISSALHFCRAVCRRAERRVVPLVQMGETDANVAKFLNRLSDYLFTLARYAAMKEGNQEKIYKKNDPSAESEGL

SEQ ID NO: 863590 - protein, 82 aa, Homo sapiens
SSSAAYGVIDCGIFIGENGIFIGRGRCRFRPSLRDSEITESGSLEDPSMAMAVERGACPSGVLVPEELTQRGSKQPFVPAQL

SEQ ID NO: 863591 - protein, 175 aa, Homo sapiens
VTPRTGREPGGVRSRQAAWLMAVCGLGSRLGLGSRLGLRGCFGAARLLYPRFQSRGPQGVEDGDRPQPSSKTPRIPKIYTKTGDKGFSSTFTGERRPKDDQVFEAVGTTDELSSAIGFALELVTEKGHTFAEELQKVSNTISPKLGIFSPGGHHGTQHPATSYSLCHLGLVTLPL

SEQ ID NO: 863592 - protein, 270 aa, Homo sapiens; identical to SEQ ID NO: 863589

SEQ ID NO: 863593 - protein, 270 aa, Homo sapiens; identical to SEQ ID NO: 863589

SEQ ID NO: 863594 - protein, 204 aa, Homo sapiens
VTPRTGREPGGVRSRQAAWLMAVCGLGSRLGLGSRLGLRGCFGAARLLYPRFQSRGPQGVEDGDRPQPSSKTPRIPKIYTKTGDKGFSSTFTGERRPKDDQVFEAVGTTDELSSAIGFALELVTEKGHTFAEELQKIQCTLQDVGSALATPCSSAREAHLIGRQDQLGAAFLPGRVPPGRETCGASCPDGRDRCERGQVLKQTQ

SEQ ID NO: 863595 - protein, 270 aa, Homo sapiens; identical to SEQ ID NO: 863589

SEQ ID NO: 863596 - protein, 145 aa, Homo sapiens
VTPRTGREPGGVRSRQAAWLMAVCGLGSRLGLGSRLGLRGCFGAARLLYPRFQSRGPQGVEDGDRPQPSSKTPRIPKIYTKTGDKGFSSTFTGERRPKDDQVFEAVGTTDELSSAIGQSLEGGLKDGPDQDGPGHAVITDNPKIS

SEQ ID NO: 863597 - protein, 270 aa, Homo sapiens; identical to SEQ ID NO: 863589

SEQ ID NO: 863598 - protein, 193 aa, Homo sapiens
VTPRTGREPGGVRSRQAAWLMAVCGLGSRLGLGSRLGLRGCFGAARLLYPRFQSRGPQGVEDGDRPQPSSKTPRIPKIYTKTGDKGFSSTFTGERRPKDDQVFEAVGTTDELSSAIGFALELVTEKGHTFAEELQKIQCTLQDVGSALATPCSSAREAHLKYTTFKAGPILELEQWIDKYTSQLPPLTAFILP

SEQ ID NO: 863599 - protein, 220 aa, Homo sapiens
ESPRGLDGNLAGSGPVKQPGSWLCAAWGAVLAWGAVLACAGASAPPGSCIPVSRAAALRAWKTGTGHSLPRRHPGSPRFTPKRETKIQCTLQDVGSALATPCSSAREAHLKYTTFKAGPILELEQWIDKYTSQLPPLTAFILPSGGKISSALHFCRAVCRRAERRVVPLVQMGETDANVAKFLNRLSDYLFTLARYAAMKEGNQEKIYKKNDPSAESEGL

SEQ ID NO: 863600 - protein, 237 aa, Homo sapiens
VTPRTGREPGGVRSRQAAWLMAVCGLGSRLGLGSRLGLRGCFGAARLLYPRFQSRGPQGVEDGDRPQPSSKTPRIPKIYTKTGDKGFSSTFTGERRPKDDQVFEAVGTTDELSSAIGFALELVTEKGHTFAEELQKSIPRSRRGPSWSWSSGSTSTPASSHHSRPSSCLDRRCPPVPQVPPGPHRSLPALPTLEQRARREARSARRCISAGPCAAGPRDVWCLLSRWERPMRTWPSS

SEQ ID NO: 863601 - protein, 407 aa, Homo sapiens
MRRNLRLGPSSGADAQGQGAPRPGLAAPRMLLPPASQASRGSGSTGCSLMAQEVDTAQGAEMRRGAGAARGRASWCWALALLWLAVVPGWSRVSGIPSRRHWPVPYKRFDFRPKPDPYCQAKYTFCPTGSPIPVMEGDDDIEVFRLQAPVWEFKYGDLLGHLKIMHDAIGFRSTLTGKNYTMEWYELFQLGNCTFPHLRPEMDAPFWCNQGAACFFEGIDDVHWKENGTLVQVATISGNMFNQMAKWVKQDNETGIYYETWNVKASPEKGAETWFDSYDCSKFVLRTFNKLAEFGAEFKNIETNYTRIFLYSGEPTYLGNETSVFGPTGNKTLGLAIKRFYYPFKPHLPTKEFLLSLLQIFDAVIVHKQFYLFYNFEYWFLPMKFPFIKITYEEIPLPIRNKTLSGL

SEQ ID NO: 863602 - protein, 240 aa, Homo sapiens
MRRNLRLGPSSGADAQGQGAPRPGLAAPRMLLPPASQASRGSGSTGCSLMAQEVDTAQGAEMRRGAGAARGRASWCWALALLWLAVVPGWSRVSGIPSRRHWPVPYKRFDFRPKPDPYCQAKYTFCPTGSPIPVMEGDDDIEVFRLQAPVWEFKYGDLLGHLKIMHDAIGFRSTLTGKNYTMEWYELFQLGNCTFPHLRPEMDAPFWCNQGAACFFEGIDDVHWKENGTLVQVATISGKL

SEQ ID NO: 863603 - protein, 869 aa, Homo sapiens
GSAPGFWSPSAAAALSIPTSPEKPVGNEIMSAFRLWPGLLIMLGSLCHRGSPCGLSTHVEIGHRALEFLQLHNGRVNYRELLLEHQDAYQAGIVFPDCFYPSICKGGKFHDVSESTHWTPFLNASVHYIRENYPLPWEKDTEKLVAFLFGITSHMAADVSWHSLGLEQGFLRTMGAIDFHGSYSEAHSAGDFGGDVLSQFEFNFNYLARRWYVPVKDLLGIYEKLYGRKVITENVIVDCSHIQFLEMYGEMLAVSKLYPTYSTKSPFLVEQFQEYFLGGLDDMAFWSTNIYHLTSFMLENGTSDCNLPENPLFIACGGQQNHTQGSKMQKNDFHRNLTTSLTESVDRNINYTERGVFFSVNSWTPDSMSFIYKALERNIRTMFIGGSQLSQKHVSSPLASYFLSFPYARLGWAMTSADLNQDGHGDLVVGAPGYSRPGHIHIGRVYLIYGNDLGLPPVDLDLDKEAHRILEGFQPSGRFGSALAVLDFNVDGVPDLAVGAPSVGSEQLTYKGAVYVYFGSKQGGMSSSPNITISCQDIYCNLGWTLLAADVNGDSEPDLVIGSPFAPGGGKQKGIVAAFYSGPSLSDKEKLNVEAANWTVRGEEDFSWFGYSLHGVTVDNRTLLLVGSPTWKNASRLGHLLHIRDEKKSLGRVYGYFPPNGQSWFTISGDKAMGKLGTSLSSGHVLMNGTLKQVLLVGAPTYDDVSKVAFLTVTLHQGGATRMYALISDAQPLLLSTFSGDRRFSRFGGVLHLSDLDDDGLDEIIMAAPLRIADVTSGLIGGEDGRVYVYNGKETTLGDMTGKCKSWITPCPEEKAQYVLISPEASSRFGSSLITVRSKAKNQVVIAAGRSSLGARLSGALHVYSLGSD

SEQ ID NO: 863604 - protein, 147 aa, Homo sapiens
EPAAAHEAVGAQQRRREARQAPSVAAELGRAGRRPGGRDQAAGAGAEAAAWKRRPEAPGPTAPQPNAGRHGPGNDGDRKQASGRARTGTQGSRGSKRSEEAPGTRGESVGAGGRLQSHRAAPSLRVFLAAPPRRPLHLALSAARLLS

SEQ ID NO: 863605 - protein, 846 aa, Homo sapiens
MARATTATGNRLWPGLLIMLGSLCHRGSPCGLSTHVEIGHRALEFLQLHNGRVNYRELLLEHQDAYQAGIVFPDCFYPSICKGGKFHDVSESTHWTPFLNASVHYIRENYPLPWEKDTEKLVAFLFGITSHMAADVSWHSLGLEQGFLRTMGAIDFHGSYSEAHSAGDFGGDVLSQFEFNFNYLARRWYVPVKDLLGIYEKLYGRKVITENVIVDCSHIQFLEMYGEMLAVSKLYPTYSTKSPFLVEQFQEYFLGGLDDMAFWSTNIYHLTSFMLENGTSDCNLPENPLFIACGGQQNHTQGSKMQKNDFHRNLTTSLTESVDRNINYTERGVFFSVNSWTPDSMSFIYKALERNIRTMFIGGSQLSQKHVSSPLASYFLSFPYARLGWAMTSADLNQDGHGDLVVGAPGYSRPGHIHIGRVYLIYGNDLGLPPVDLDLDKEAHRILEGFQPSGRFGSALAVLDFNVDGVPDLAVGAPSVGSEQLTYKGAVYVYFGSKQGGMSSSPNITISCQDIYCNLGWTLLAADVNGDSEPDLVIGSPFAPGGGKQKGIVAAFYSGPSLSDKEKLNVEAANWTVRGEEDFSWFGYSLHGVTVDNRTLLLVGSPTWKNASRLGHLLHIRDEKKSLGRVYGYFPPNGQSWFTISGDKAMGKLGTSLSSGHVLMNGTLKQVLLVGAPTYDDVSKVAFLTVTLHQGGATRMYALISDAQPLLLSTFSGDRRFSRFGGVLHLSDLDDDGLDEIIMAAPLRIADVTSGLIGGEDGRVYVYNGKETTLGDMTGKCKSWITPCPEEKAQYVLISPEASSRFGSSLITVRSKAKNQVVIAAGRSSLGARLSGALHVYSLGSD

SEQ ID NO: 863606 - protein, 869 aa, Homo sapiens; identical to SEQ ID NO: 863603

SEQ ID NO: 863607 - protein, 715 aa, Homo sapiens
MAADVSWHSLGLEQGFLRTMGAIDFHGSYSEAHSAGDFGGDVLSQFEFNFNYLARRWYVPVKDLLGIYEKLYGRKVITENVIVDCSHIQFLEMYGEMLAVSKLYPTYSTKSPFLVEQFQEYFLGGLDDMAFWSTNIYHLTSFMLENGTSDCNLPENPLFIACGGQQNHTQGSKMQKNDFHRNLTTSLTESVDRNINYTERGVFFSVNSWTPDSMSFIYKALERNIRTMFIGGSQLSQKHVSSPLASYFLSFPYARLGWAMTSADLNQDGHGDLVVGAPGYSRPGHIHIGRVYLIYGNDLGLPPVDLDLDKEAHRILEGFQPSGRFGSALAVLDFNVDGVPDLAVGAPSVGSEQLTYKGAVYVYFGSKQGGMSSSPNITISCQDIYCNLGWTLLAADVNGDSEPDLVIGSPFAPGGGKQKGIVAAFYSGPSLSDKEKLNVEAANWTVRGEEDFSWFGYSLHGVTVDNRTLLLVGSPTWKNASRLGHLLHIRDEKKSLGRVYGYFPPNGQSWFTISGDKAMGKLGTSLSSGHVLMNGTLKQVLLVGAPTYDDVSKVAFLTVTLHQGGATRMYALISDAQPLLLSTFSGDRRFSRFGGVLHLSDLDDDGLDEIIMAAPLRIADVTSGLIGGEDGRVYVYNGKETTLGDMTGKCKSWITPCPEEKAQYVLISPEASSRFGSSLITVRSKAKNQVVIAAGRSSLGARLSGALHVYSLGSD

SEQ ID NO: 863608 - protein, 167 aa, Homo sapiens
MARATTATGNRLWPGLLIMLGSLCHRGSPCGLSTHVEIGHRALEFLQLHNGRVNYRELLLEHQDAYQAGIVFPDCFYPSICKGGKFHDVSESTHWTPFLNASVHYIRENYPLPWEKVGVVLQSLKYLAPNLPCTVFAPALTPFVPLCKGCPPFHLQCHAHCLDIVDG

SEQ ID NO: 863609 - protein, 167 aa, Homo sapiens; identical to SEQ ID NO: 863608

SEQ ID NO: 863610 - protein, 54 aa, Homo sapiens
KDELSSLEKLNVEAANWTVRGEEDFSWFGYSLHGVTVDNRTLLLVGSPTWKNAS

SEQ ID NO: 863611 - protein, 205 aa, Homo sapiens
GSAPGFWSPSAAAALSIPTSPEKPVGNEIMSAFRLWPGLLIMLGSLCHRGSPCGLSTHVEIGHRALEFLQLHNGRVNYRELLLEHQDAYQAGIVFPDCFYPSICKGGKFHDVSESTHWTPFLNASVHYIRENYPLPWEKDTEKLVAFLFGITSHMAADVSWHSLGLEQGFLRTMGAIDFHGSYSEAHSAGDFGTVYLHLLNFLVV

SEQ ID NO: 863612 - protein, 77 aa, Homo sapiens
GSAPGFWSPSAAAALSIPTSPEKPVGNEIMSAFRLWPGLLIMLGSLCHRGSPCGLSTHVEIAVTRTPGCVSGWNRVS

SEQ ID NO: 863613 - protein, 869 aa, Homo sapiens; identical to SEQ ID NO: 863603

SEQ ID NO: 863614 - protein, 869 aa, Homo sapiens; identical to SEQ ID NO: 863603

SEQ ID NO: 863615 - protein, 831 aa, Homo sapiens
  misc_feature (810)..(810): Xaa can be any naturally occurring amino acid
MARATTATGNRLWPGLLIMLGSLCHRGSPCGLSTHVEIGHRALEFLQLHNGRVNYRELLLEHQDAYQAGIVFPDCFYPSICKGGKFHDVSESTHWTPFLNASVHYIRENYPLPWEKDTEKLVAFLFGITSHMAADVSWHSLGLEQGFLRTMGAIDFHGSYSEAHSAGDFGGDVLSQFEFNFNYLARRWYVPVKDLLGIYEKLYGRKVITENVIVDCSHIQFLEMYGEMLAVSKLYPTYSTKSPFLVEQFQEYFLGGLDDMAFWSTNIYHLTSFMLENGTSDCNLPENPLFIACGGQQNHTQGSKMQKNDFHRNLTTSLTESVDRNINYTERGVFFSVNSWTPDSMSFIYKALERNIRTMFIGGSQLSQKHVSSPLASYFLSFPYARLGWAMTSADLNQDGHGDLVVGAPGYSRPGHIHIGRVYLIYGNDLGLPPVDLDLDKEAHRILEGFQPSGRFGSALAVLDFNVDGVPDLAVGAPSVGSEQLTYKGAVYVYFGSKQGGMSSSPNITISCQDIYCNLGWTLLAADVNGDSEPDLVIGSPFAPGGGKQKGIVAAFYSGPSLSDKEKLNVEAANWTVRGEEDFSWFGYSLHGVTVDNRTLLLVGSPTWKNASRLGHLLHIRDEKKSLGRVYGYFPPNGQSWFTISGDKAMGKLGTSLSSGHVLMNGTLKQVLLVGAPTYDDVSKVAFLTVTLHQGGATRMYALISDAQPLLLSTFSGDRRFSRFGGVLHLSDLDDDGLDEIIMAAPLRIADVTSGLIGGEDGRVYVYNGKETTLGDMTGKCKSWITPCPEEKHREVQAKNQVVMLLEESXGSRLFGHLRYSLALSYYISPC

SEQ ID NO: 863616 - protein, 182 aa, Homo sapiens
MARATTATGNRLWPGLLIMLGSLCHRGSPCGLSTHVEIGHRALEFLQLHNGRVNYRELLLEHQDAYQAGIVFPDCFYPSICKGGKFHDVSESTHWTPFLNASVHYIRENYPLPWEKDTEKLVAFLFGITSHMAADVSWHSLGLEQGFLRTMGAIDFHGSYSEAHSAGDFGTVYLHLLNFLVV

SEQ ID NO: 863617 - protein, 327 aa, Homo sapiens
MRALPGLLEARARTPRLLLLQCLLAAARPSSADGSAPDSPFTSPPLREEIMANNFSLESHNISLTEHSSMPVEKNITLERPSNVNLTCQFTTSGDLNAVNVTWKKDGEQLENNYLVSATGSTLYTQYRFTIINSKQMGSYSCFFREEKEQRGTFNFKVPELHGKNKPLISYVGDSTVLTCKCQNCFPLNWTWYSSNGSVKVPVGVQMNKYVINGTYANETKLKITQLLEEDGESYWCRALFQLGESEEHIELVVLSYLVPLKPFLVIVAEVILLVATILLCEKYTQKKKKHSDEGKEFEQIEQLKSDDSNGIENNVPRHRKNESLGQ

SEQ ID NO: 863618 - protein, 327 aa, Homo sapiens; identical to SEQ ID NO: 863617

SEQ ID NO: 863619 - protein, 327 aa, Homo sapiens; identical to SEQ ID NO: 863617

SEQ ID NO: 863620 - protein, 277 aa, Homo sapiens
MANNFSLESHNISLTEHSSMPVEKNITLERPSNVNLTCQFTTSGDLNAVNVTWKKDGEQLENNYLVSATGSTLYTQYRFTIINSKQMGSYSCFFREEKEQRGTFNFKVPELHGKNKPLISYVGDSTVLTCKCQNCFPLNWTWYSSNGSVKVPVGVQMNKYVINGTYANETKLKITQLLEEDGESYWCRALFQLGESEEHIELVVLSYLVPLKPFLVIVAEVILLVATILLCEKYTQKKKKHSDEGKEFEQIEQLKSDDSNGIENNVPRHRKNESLGQ

SEQ ID NO: 863621 - protein, 273 aa, Homo sapiens
MRALPGLLEARARTPRLLLLQCLLAAARPSSADGSAPDSPFTSPPLREEIMANNFSLESHNISLTGSTLYTQYRFTIINSKQMGSYSCFFREEKEQRGTFNFKVPELHGKNKPLISYVGDSTVLTCKCQNCFPLNWTWYSSNGSVKVPVGVQMNKYVINGTYANETKLKITQLLEEDGESYWCRALFQLGESEEHIELVVLSYLVPLKPFLVIVAEVILLVATILLCEKYTQKKKKHSDEGKEFEQIEQLKSDDSNGIENNVPRHRKNESLGQ

SEQ ID NO: 863622 - protein, 67 aa, Homo sapiens
VWYPNRYNLLFMTGYTPLVGNFSVISLKDAFFTIPLHTSSQNLFALTGLILTQAAPNNSPDCPPPGV

SEQ ID NO: 863623 - protein, 205 aa, Homo sapiens
MAEIEHFVDPSEKDHPKFQNVADLHLYLYSAKAQVSGQSARKMRLGDAVEQGVINNTVLGYFIGRIYLYLTKVGISPDKLRFRQHMENEMAHYACDCWDAESKTSYGWIEIVGCADRSCYDLSCHARATKVPLVAEKPLKEPISFLVTPKTQDSHVNILLMNKSKSLPCSMDKWRCFRHCSNACLNLLFYLSLCSFPILCTCSLT

SEQ ID NO: 863624 - protein, 807 aa, Homo sapiens
LPIVLVNTVRLIQYPIHLYVVWIKGLFILMEEVSSSEPGGAAISSCSEPGGARRFRRHPLWTAQGRRLMPSPRPVLLRGARAALLLLLPPRLLARPSLLLRRSLSAASCAPISLPAAASRSSMDGAGAEEVLAPLRLAVRQQGDLVRKLKEDKAPQVDVDKAVAELKARKRVLEAKELALQPKDDIVDRAKMEDTLKRRFFYDQAFAIYGGVSGLYDFGPVGCALKNNIIQTWRQHFIQEEQILEIDCTMLTPEPVLKTSGHVDKFADFMVKDVKNGECFRADHLLKAHLQKLMSDKKCSVEKKSEMESVLAQLDNYGQQELADLFVNYNVKSPITGNDLSPPVSFNLMFKTFIGPGGNMPGYLRPETAQGIFLNFKRLLEFNQGKLPFAAAQIGNSFRNEISPRSGLIRVREFTMAEIEHFVDPSEKDHPKFQNVADLHLYLYSAKAQVSGQSARKMRLGDAVEQGVINNTVLGYFIGRIYLYLTKVGISPDKLRFRQHMENEMAHYACDCWDAESKTSYGWIEIVGCADRSCYDLSCHARATKVPLVAEKPLKEPKTVNVVQFEPSKGAIGKAYKKDAKLVMEYLAICDECYITEMEMLLNEKGEFTIETEGKTFQLTKDMINVKRFQKTLYVEEVVPNVIEPSFGLGRIMYTVFEHTFHVREGDEQRTFFSFPAVVAPFKCSVLPLSQNQEFMPFVKELSEALTRHGVSHKVDDSSGSIGRRYARTDEIGVAFGVTIDFDTVNKTPHTATLRDRDSMRQIRAEISELPSIVQDLANGNITWADVEARYPLFEGQETGKKETIEE

SEQ ID NO: 863625 - protein, 807 aa, Homo sapiens; identical to SEQ ID NO: 863624

SEQ ID NO: 863626 - protein, 844 aa, Homo sapiens
HSYKNLCFEGSRVSRPAGLAQSCVPEHPPCWGGLTHFCANLFARNPTYLSPEPEKTFGGVLPGFVSNLRRRPGAASRGGECAADARRVVYAAISSCSEPGGARRFRRHPLWTAQGRRLMPSPRPVLLRGARAALLLLLPPRLLARPSLLLRRSLSAASCAPISLPAAASRSSMDGAGAEEVLAPLRLAVRQQGDLVRKLKEDKAPQVDVDKAVAELKARKRVLEAKELALQPKDDIVDRAKMEDTLKRRFFYDQAFAIYGGVSGLYDFGPVGCALKNNIIQTWRQHFIQEEQILEIDCTMLTPEPVLKTSGHVDKFADFMVKDVKNGECFRADHLLKAHLQKLMSDKKCSVEKKSEMESVLAQLDNYGQQELADLFVNYNVKSPITGNDLSPPVSFNLMFKTFIGPGGNMPGYLRPETAQGIFLNFKRLLEFNQGKLPFAAAQIGNSFRNEISPRSGLIRVREFTMAEIEHFVDPSEKDHPKFQNVADLHLYLYSAKAQVSGQSARKMRLGDAVEQGVINNTVLGYFIGRIYLYLTKVGISPDKLRFRQHMENEMAHYGWIEIVGCADRSCYDLSCHARATKVPLVAEKPLKEPKTVNVVQFEPSKGAIGKAYKKDAKLVMEYLAICDECYITEMEMLLNEKGEFTIETEGKTFQLTKDMINVKRFQKTLYVEEVVPNVIEPSFGLGRIMYTVFEHTFHVREGDEQRTFFSFPAVVAPFKCSVLPLSQNQEFMPFVKELSEALTRHGVSHKVDDSSGSIGRRYARTDEIGVAFGVTIDFDTVNKTPHTATLRDRDSMRQIRAEISELPSIVQDLANGNITWADVEARYPLFEGQETGKKETIEE

SEQ ID NO: 863627 - protein, 595 aa, Homo sapiens
MIGSEAGWLGCALKNNIIQTWRQHFIQEEQILEIDCTMLTPEPVLKTSGHVDKFADFMVKDVKNGECFRADHLLKAHLQKLMSDKKCSVEKKSEMESVLAQLDNYGQQELADLFVNYNVKSPITGNDLSPPVSFNLMFKTFIGPGGNMPGYLRPETAQGIFLNFKRLLEFNQGKLPFAAAQIGNSFRNEISPRSGLIRVREFTMAEIEHFVDPSEKDHPKFQNVADLHLYLYSAKAQVSGQSARKMRLGDAVEQGVINNTVLGYFIGRIYLYLTKVGISPDKLRFRQHMENEMAHYACDCWDAESKTSYGWIEIVGCADRSCYDLSCHARATKVPLVAEKPLKEPKTVNVVQFEPSKGAIGKAYKKDAKLVMEYLAICDECYITEMEMLLNEKGEFTIETEGKTFQLTKDMINVKRFQKTLYVEEVVPNVIEPSFGLGRIMYTVFEHTFHVREGDEQRTFFSFPAVVAPFKCSVLPLSQNQEFMPFVKELSEALTRHGVSHKVDDSSGSIGRRYARTDEIGVAFGVTIDFDTVNKTPHTATLRDRDSMRQIRAEISELPSIVQDLANGNITWADVEARYPLFEGQETGKKETIEE

SEQ ID NO: 863628 - protein, 857 aa, Homo sapiens
HSYKNLCFEGSRVSRPAGLAQSCVPEHPPCWGGLTHFCANLFARNPTYLSPEPEKTFGGVLPGFVSNLRRRPGAASRGGECAADARRVVYAAISSCSEPGGARRFRRHPLWTAQGRRLMPSPRPVLLRGARAALLLLLPPRLLARPSLLLRRSLSAASCAPISLPAAASRSSMDGAGAEEVLAPLRLAVRQQGDLVRKLKEDKAPQVDVDKAVAELKARKRVLEAKELALQPKDDIVDRAKMEDTLKRRFFYDQAFAIYGGVSGLYDFGPVGCALKNNIIQTWRQHFIQEEQILEIDCTMLTPEPVLKTSGHVDKFADFMVKDVKNGECFRADHLLKAHLQKLMSDKKCSVEKKSEMESVLAQLDNYGQQELADLFVNYNVKSPITGNDLSPPVSFNLMFKTFIGPGGNMPGYLRPETAQGIFLNFKRLLEFNQGKLPFAAAQIGNSFRNEISPRSGLIRVREFTMAEIEHFVDPSEKDHPKFQNVADLHLYLYSAKAQVSGQSARKMRLGDAVEQGVINNTVLGYFIGRIYLYLTKVGISPDKLRFRQHMENEMAHYACDCWDAESKTSYGWIEIVGCADRSCYDLSCHARATKVPLVAEKPLKEPKTVNVVQFEPSKGAIGKAYKKDAKLVMEYLAICDECYITEMEMLLNEKGEFTIETEGKTFQLTKDMINVKRFQKTLYVEEVVPNVIEPSFGLGRIMYTVFEHTFHVREGDEQRTFFSFPAVVAPFKCSVLPLSQNQEFMPFVKELSEALTRHGVSHKVDDSSGSIGRRYARTDEIGVAFGVTIDFDTVNKTPHTATLRDRDSMRQIRAEISELPSIVQDLANGNITWADVEARYPLFEGQETGDGVSCHL

SEQ ID NO: 863629 - protein, 697 aa, Homo sapiens
HSYKNLCFEGSRVSRPAGLAQSCVPEHPPCWGGLTHFCANLFARNPTYLSPEPEKTFGGVLPGFVSNLRRRPGAASRGGECAADARRVVYAAISSCSEPGGARRFRRHPLWTAQGRRLMPSPRPVLLRGARAALLLLLPPRLLARPSLLLRRSLSAASCAPISLPAAASRSSMDGAGAEEVLAPLRLAVRQQGDLVRKLKEDKAPQVDVDKAVAELKARKRVLEAKELALQPKDDIVDRAKMEDTLKRRFFYDQAFAIYGGVSGLYDFGPVGCALKNNIIQTWRQHFIQEEQILEIDCTMLTPEPVLKTSGHVDKFADFMVKDVKNGECFRADHLLKAHLQKLMSDKKCSVEKKSEMESVLAQLDNYGQQELADLFVNYNVKSPITGNDLSPPVSFNLMFKTFIGPGGNMPGYLRPETAQGIFLNFKRLLEFNQGKLPFAAAQIGNSFRNEISPRSGLIRVREFTMAEIEHFVDPSEKDHPKFQNVADLHLYLYSAKAQVSGQSARKMRLGDAVEQGVINNTVLGYFIGRIYLYLTKVGISPDKLRFRQHMENEMAHYACDCWDAESKTSYGWIEIVGCADRSCYDLSCHARATKVPLVAEKPLKEPKTVNVVQFEPSKGAIGKAYKKDAKLVMEYLAICDECYITEMEMLLNEKGEFTIETGGKTFQLTVFRIVLKLSFGRVGTCLPDLDIHFMYE

SEQ ID NO: 863630 - protein, 370 aa, Homo sapiens
YGRGLSVGTVFLHRGSNTTNTGVEDAGAQGVINNTVLGYFIGRIYLYLTKVGISPDKLRFRQHMENEMAHYACDCWDAESKTSYGWIEIVGCADRSCYDLSCHARATKVPLVAEKPLKEPKTVNVVQFEPSKGAIGKAYKKDAKLVMEYLAICDECYITEMEMLLNEKGEFTIETEGKTFQLTKDMINVKRFQKTLYVEEVVPNVIEPSFGLGRIMYTVFEHTFHVREGDEQRTFFSFPAVVAPFKCSVLPLSQNQEFMPFVKELSEALTRHGVSHKVDDSSGSIGRRYARTDEIGVAFGVTIDFDTVNKTPHTATLRDRDSMRQIRAEISELPSIVQDLANGNITWADVEARYPLFEGQETGKKETIEE

SEQ ID NO: 863631 - protein, 463 aa, Homo sapiens
HSYKNLCFEGSRVSRPAGLAQSCVPEHPPCWGGLTHFCANLFARNPTYLSPEPEKTFGGVLPGFVSNLRRRPGAASRGGECAADARRVVYAAISSCSEPGGARRFRRHPLWTAQGRRLMPSPRPVLLRGARAALLLLLPPRLLARPSLLLRRSLSAASCAPISLPAAASRSSMDGAGAEEVLAPLRLAVRQQGDLVRKLKEDKAPQVDVDKAVAELKARKRVLEAKELALQPKDDIVDRAKMEDTLKRRFFYDQAFAIYGGVSGLYDFGPVGCALKNNIIQTWRQHFIQEEQILEIDCTMLTPEPVLKTSGHVDKFADFMVKDVKNGECFRADHLLKAHLQKLMSDKKCSVEKKSEMESVLAQLDNYGQQELADLFVNYNVKSPITGNDLSPPVSFNLMFKTFIGPGGNMPGLETAGGDSEFNAWGHPGMPGRHGTVKDPPGVTRIRGMLYQDPYGSLITRPT

SEQ ID NO: 863632 - protein, 187 aa, Homo sapiens
  misc_feature (2)..(2): Xaa can be any naturally occurring amino acid
EXRPPPIGSEVPDVTATPARLLFFAPTRRAAPLEEMEAPAADAIMSPEEELDGYEPEPLGKLAGSVLPLSQNQEFMPFVKELSEALTRHGVSHKVDDSSGSIGRRYARTDEIGVAFGVTIDFDTVNKTPHTATLRDRDSMRQIRAEISELPSIVQDLANGNITWADVEARYPLFEGQETGKKETIEE

SEQ ID NO: 863633 - protein, 156 aa, Homo sapiens
KDTGGDEIISSNGRFYIIVHKKIRKFLLSIVIKPVLPLSQNQEFMPFVKELSEALTRHGVSHKVDDSSGSIGRRYARTDEIGVAFGVTIDFDTVNKTPHTATLRDRDSMRQIRAEISELPSIVQDLANGNITWADVEARYPLFEGQETGKKETIEE

SEQ ID NO: 863634 - protein, 232 aa, Homo sapiens
LPIVLVNTVRLIQYPIHLYVVWIKGLFILMEEVSSSEPGGAAISSCSEPGGARRFRRHPLWTAQGRRLMPSPRPVLLRGARAALLLLLPPRLLARPSLLLRRSLSAASCAPISLPAAASRSSMDGAGAEEVLAPLRLAVRQQGDLVRKLKEDKAPQVDVDKAVAELKARKRVLEAKELALQPKDDIVDRAKMEDTLKRRFFYDQAFAIYGGVTVGLVLTFLGGPKFWAFCFG

SEQ ID NO: 863635 - protein, 857 aa, Homo sapiens
HSYKNLCFEGSRVSRPAGLAQSCVPEHPPCWGGLTHFCANLFARNPTYLSPEPEKTFGGVLPGFVSNLRRRPGAASRGGECAADARRVVYAAISSCSEPGGARRFRRHPLWTAQGRRLMPSPRPVLLRGARAALLLLLPPRLLARPSLLLRRSLSAASCAPISLPAAASRSSMDGAGAEEVLAPLRLAVRQQGDLVRKLKEDKAPQVDVDKAVAELKARKRVLEAKELALQPKDDIVDRAKMEDTLKRRFFYDQAFAIYGGVSGLYDFGPVGCALKNNIIQTWRQHFIQEEQILEIDCTMLTPEPVLKTSGHVDKFADFMVKDVKNGECFRADHLLKAHLQKLMSDKKCSVEKKSEMESVLAQLDNYGQQELADLFVNYNVKSPITGNDLSPPVSFNLMFKTFIGPGGNMPGYLRPETAQGIFLNFKRLLEFNQGKLPFAAAQIGNSFRNEISPRSGLIRVREFTMAEIEHFVDPSEKDHPKFQNVADLHLYLYSAKAQVSGQSARKMRLGDAVEQGVINNTVLGYFIGRIYLYLTKVGISPDKLRFRQHMENEMAHYACDCWDAESKTSYGWIEIVGCADRSCYDLSCHARATKVPLVAEKPLKEPKTVNVVQFEPSKGAIGKAYKKDAKLVMEYLAICDECYITEMEMLLNEKGEFTIETEGKTFQLTKDMINVKRFQKTLYVEEVVPNVIEPSFGLGRIMYTVFEHTFHVREGDEQRTFFSFPAVVAPFKCSVLPLSQNQEFMPFVKELSEALTRHGVSHKVDDSSGSIGRRYARTDEIGVAFGVTIDFDTVNKTPHTATLRDRDSMRQIRAEISELPSIVQDLANGNITWADVEARYPLFEGQETGKKETIEE

SEQ ID NO: 863636 - protein, 807 aa, Homo sapiens; identical to SEQ ID NO: 863624

SEQ ID NO: 863637 - protein, 807 aa, Homo sapiens; identical to SEQ ID NO: 863624

SEQ ID NO: 863638 - protein, 671 aa, Homo sapiens
GGERKLRLGSEAWVSSKAPQVDVDKAVAELKARKRVLEAKELALQPKDDIVDRAKMEDTLKRRFFYDQAFAIYGGVSGLYDFGPVGCALKNNIIQTWRQHFIQEEQILEIDCTMLTPEPVLKTSGHVDKFADFMVKDVKNGECFRADHLLKAHLQKLMSDKKCSVEKKSEMESVLAQLDNYGQQELADLFVNYNVKSPITGNDLSPPVSFNLMFKTFIGPGGNMPGYLRPETAQGIFLNFKRLLEFNQGKLPFAAAQIGNSFRNEISPRSGLIRVREFTMAEIEHFVDPSEKDHPKFQNVADLHLYLYSAKAQVSGQSARKMRLGDAVEQGVINNTVLGYFIGRIYLYLTKVGISPDKLRFRQHMENEMAHYACDCWDAESKTSYGWIEIVGCADRSCYDLSCHARATKVPLVAEKPLKEPKTVNVVQFEPSKGAIGKAYKKDAKLVMEYLAICDECYITEMEMLLNEKGEFTIETEGKTFQLTKDMINVKRFQKTLYVEEVVPNVIEPSFGLGRIMYTVFEHTFHVREGDEQRTFFSFPAVVAPFKCSVLPLSQNQEFMPFVKELSEALTRHGVSHKVDDSSGSIGRRYARTDEIGVAFGVTIDFDTVNKTPHTATLRDRDSMRQIRAEISELPSIVQDLANGNITWADVEARYPLFEGQETGKKETIEE

SEQ ID NO: 863639 - protein, 1007 aa, Homo sapiens
HSYKNLCFEGSRVSRPAGLAQSCVPEHPPCWGGLTHFCANLFARNPTYLSPEPEKTFGGVLPGFVSNLRRRPGAASRGGECAADARRVVYAAISSCSEPGGARRFRRHPLWTAQGRRLMPSPRPVLLRGARAALLLLLPPRLLARPSLLLRRSLSAASCAPISLPAAASRSSMDGAGAEEVLAPLRLAVRQQGDLVRKLKEDKAPQVDVDKAVAELKARKRVLEAKELALQPKDDIVDRAKMEDTLKRRFFYDQAFAIYGGVSGLYDFGPVGCALKNNIIQTWRQHFIQEEQILEIDCTMLTPEPVLKTSGHVDKFADFMVKDVKNGECFRADHLLKAHLQKLMSDKKCSVEKKSEMESVLAQLDNYGQQELADLFVNYNVKSPITGNDLSPPVSFNLMFKTFIGPGGNMPGYLRPETAQGIFLNFKRLLEFNQGKLPFAAAQIGNSFRNEISPRSGLIRVREFTMAEIEHFVDPSEKDHPKFQNVADLHLYLYSAKAQVSGQSARKMRLGDAVEQGVINNTVLGYFIGRIYLYLTKVGISPDKLRFRQHMENEMAHYACDCWDAESKTSYGWIEIVGCADRSCYDLSCHARATKVPLVAEKPLKEPKTVNVVQFEPSKGAIGKAYKKDAKLVMEYLAICDECYITEMEMLLNEKGEFTIETEGKTFQLTKDMINVKRFQKTLYVEEVVPNVIEPSFGLGRIMYTVFEHTFHVREGDEQRTFFSFPAVVAPFKCSVLPLSQNQEFMPFVKELSEALTRHGVSHKVDDSSGSIGRRYARTDEIGVAFGVTIDFDTVNKTPHTATLRDRDSMRQIRAEISELPSIVQDLANGNITWADVEARYPLFYQSLARRKLLPLLKLKPKQKALKAKKAVLKGVHSHKKKKIRTSPTFRRPKTLRLRRQPKYPRKSAPRRNKLDHYAIIKFPLTTESAMKKIEDNNTLVVIVDVKANKHQIKKAVEEAVDIDVAKVNNLDYGLMERRRDMFWWILITMLWDVGTKMGSSRVSSDS

SEQ ID NO: 863640 - protein, 771 aa, Homo sapiens
HSYKNLCFEGSRVSRPAGLAQSCVPEHPPCWGGLTHFCANLFARNPTYLSPEPEKTFGGVLPGFVSNLRRRPGAASRGGECAADARRVVYAAISSCSEPGGARRFRRHPLWTAQGRRLMPSPRPVLLRGARAALLLLLPPRLLARPSLLLRRSLSAASCAPISLPAAASRSSMDGAGAEEVLAPLRLAVRQQGDLVRKLKEDKAPQVDVDKAVAELKARKRVLEAKELALQPKDDIVDRAKMEDTLKRRFFYDQAFAIYGGVSGLYDFGPVGCALKNNIIQTWRQHFIQEEQILEIDCTMLTPEPVLKTSGHVDKFADFMVKDVKNGECFRADHLLKAHLQKLMSDKKCSVEKKSEMESVLAQLDNYGQQELADLFVNYNVKSPITGNDLSPPVSFNLMFKTFIGPGGNMPGYLRPETAQGIFLNFKRLLEFNQGKLPFAAAQIGNSFRNEISPRSGLIRVREFTMAEIEHFVDPSEKDHPKFQNVADLHLYLYSAKAQVSGQSARKMRLGDAVEQGVINNTVLGYFIGRIYLYLTKVGISPDKLRFRQHMENEMAHYACDCWDAESKTSYGWIEIVGCADRSCYDLSCHARATKVPLVAEKPLKEPKTVNVVQFEPSKGAIGKAYKKDAKLVMEYLAICDECYITEMEMLLNEKGEFTIETEGKTFQLTKDMINVKRFQKTLYVEEVVPNVIEPSFGLGRIMYTVFEHTFHVREGDEQRTFFSFPAVVAPFKCSVLPLSQNQEFMPFVKELCKQIQLGKLHGNTIKETEF

SEQ ID NO: 863641 - protein, 450 aa, Homo sapiens
HSYKNLCFEGSRVSRPAGLAQSCVPEHPPCWGGLTHFCANLFARNPTYLSPEPEKTFGGVLPGFVSNLRRRPGAASRGGECAADARRVVYAAISSCSEPGGARRFRRHPLWTAQGRRLMPSPRPVLLRGARAALLLLLPPRLLARPSLLLRRSLSAASCAPISLPAAASRSSMDGAGAEEVLAPLRLAVRQQGDLVRKLKEDKAPQVDVDKAVAELKARKRVLEAKELALQPKDDIVDRAKMEDTLKRRFFYDQAFAIYGGVSGLYDFGPVGCALKNNIIQTWRQHFIQEEQILEIDCTMLTPEPVLKTSGHVDKFADFMVKDVKNGECFRADHLLKAHLQKLMSDKKCSVEKKSEMESVLAQLDNYGQQELADLFVNYNVKSPITGNDLSPPVSFNLMFKTFIGPGGNMPGYLRPETAQGIFLNFKRLLEFNQGKLPFENSQWQKLSTL

SEQ ID NO: 863642 - protein, 112 aa, Homo sapiens [sequence omitted]

SEQ ID NO: 863643 - protein, 137 aa, Homo sapiens
MYPVILGSAECAIQAVLPLSQNQEFMPFVKELSEALTRHGVSHKVDDSSGSIGRRYARTDEIGVAFGVTIDFDTVNKTPHTATLRDRDSMRQIRAEISELPSIVQDLANGNITWADVEARYPLFEGQETGKKETIEE

SEQ ID NO: 863644 - protein, 89 aa, Homo sapiens
  misc_feature (18)..(18): Xaa can be any naturally occurring amino acid
NPLHSQLCAGGAPAVHLXARLEICALRDTVAVYLTPESKSSFKQALEALPQLSSGADKKLLEELLNKFKSSMHLQLTCFQAASSTMMKT

SEQ ID NO: 863645 - protein, 924 aa, Homo sapiens
MSRSRQPPLVTGISPNEGIPWTKVTIRGENLGTGPTDLIGLTICGHNCLLTAEWMSASKIVCRVGQAKNDKGDIIVTTKSGGRGTSTVSFKLLKPEKIGILDQSAVWVDEMNYYDMRTDRNKGIPPLSLRPANPLGIEIEKSKFSQKDLEMLFHGMSADFTSENFSAAWYLIENHSNTSFEQLKMAVTNLKRQANKKSEGSLAYVKGGLSTFFEAQDALSAIHQKLEADGTEKVEGSMTQKLENVLNRASNTADTLFQEVLGRKDKADSTRNALNVLQRFKFLFNLPLNIERNIQKGDYDVVINDYEKAKSLFGKTEVQVFKKYYAEVETRIEALRELLLDKLLETPSTLHDQKRYIRYLSDLHASGDPAWQCIGAQHKWILQLMHSCKEGYVKDLKGNPGLHSPMLDLDNDTRPSVLGHLSQTASLKRGSSFQSGRDDTWRYKTPHRVAFVEKLTKLVLSQLPNFWKLWISYVNGSLFSETAEKSGQIERSKNVRQRQNDFKKMIQEVMHSLVKLTRGALLPLSIRDGEAKQYGGWEVKCELSGQWLAHAIQTVRLTHESLTALEIPNDLLQTIQDLILDLRVRCVMATLQHTAEEIKRLAEKEDWIVDNEGLTSLPCQFEQCIVCSLQSLKGVLECKPGEASVFQQPKTQEEVCQLSINIMQVFIYCLEQLSTKPDADIDTTHLSVDVSSPDLFGSIHEDFSLTSEQRLLIVLSNCCYLERHTFLNIAEHFEKHNFQGIEKITQVSMASLKELDQRLFENYIELKADPIVGSLEPGIYAGYFDWKDCLPPTGVRNYLKEALVNIIAVHAEVFTISKELVPRVLSKVIEAVSEELSRLMQCVSSFSKNGALQARLEICALRDTVAVYLTPESKSSFKQALEALPQLSSGADKKLLEELLNKFKSSMHLQLTCFQAASSTMMKT

SEQ ID NO: 863646 - protein, 924 aa, Homo sapiens; identical to SEQ ID NO: 863645

SEQ ID NO: 863647 - protein, 924 aa, Homo sapiens; identical to SEQ ID NO: 863645

SEQ ID NO: 863648 - protein, 806 aa, Homo sapiens
MSRSRQPPLVTGISPNEGIPWTKVTIRGENLGTGPTDLIGLTICGHNCLLTAEWMSASKIVCRVGQAKNDKGDIIVTTKSGGRGTSTVSFKLLKPEKIGILDQSAVWVDEMNYYDMRTDRNKGIPPLSLRPANPLGIEIEKSKFSQKDLEMLFHGMSADFTSENFSAAWYLIENHSNTSFEQLKMAVTNLKRQANKKSEGSLAYVKGGLSTFFEAQDALSAIHQKLEADGTEKVEGSMTQKLENVLNRASNTADTLFQEVLGRKDKADSTRNALNVLQRFKFLFNLPLNIERNIQKGDYDVVINDYEKAKSLFGKTEVQVFKKYYAEVETRIEALRELLLDKLLETPSTLHDQKRYIRYLSDLHASGDPAWQCIGAQHKWILQLMHSCKEGYVKDLKGNPGLHSPMLDLDNDTRPSVLGHLSQTASLKRGSSFQSGRDDTWRYKTPHRVAFVEKLTKLVLSQLPNFWKLWISYVNGSLFSETAEKSGQIERSKNVRQRQNDFKKMIQEVMHSLVKLTRGALLPLSIRDGEAKQYGGWEVKCELSGQWLAHAIQTVRLTHESLTALEIPNDLLQTIQDLILDLRVRCVMATLQHTAEEIKRLAEKEDWIVDNEGLTSLPCQFEQCIVCSLQSLKGVLECKPGEASVFQQPKTQEEVCQLSINIMQVFIYCLEQLSTKPDADIDTTHLSVDVSSPDLFGSIHEDFSLTSEQRLLIVLSNCCYLERHTFLNIAEHFEKHNFQGIEKITQVSMASLKELDQRLFENYIELKADPIVGSLEPGIYAGYFDWKDCLPPTVLGHMCRACRFLT

SEQ ID NO: 863649 - protein, 924 aa, Homo sapiens; identical to SEQ ID NO: 863645

SEQ ID NO: 863650 - protein, 123 aa, Homo sapiens
PDGQALTTLTSEVLRDQVKCWNSEPEKRPSLYHLSEIVENLLPGQYKKKKNRCRLESPGHRGRTADPMCGRTGKYSCRFITSTMSTRVTRSPRTNCGSDVWAYGVWGDIMVTGNESLIFHKCA

SEQ ID NO: 863651 - protein, 924 aa, Homo sapiens; identical to SEQ ID NO: 863645

SEQ ID NO: 863652 - protein, 860 aa, Homo sapiens
MSRSRQPPLVTGISPNEGIPWTKVTIRGENLGTGPTDLIGLTICGHNCLLTAEWMSASKIVCRVGQAKNDKGDIIVTTKSGGRGTSTVSFKLLKPEKIGILDQSAVWVDEMNYYDMRTDRNKGIPPLSLRPANPLGIEIEKSKFSQKDLEMLFHGMSADFTSENFSAAWYLIENHSNTSFEQLKMAVTNLKRQANKKSEGSLAYVKGGLSTFFEAQDALSAIHQKLEADGTEKVEGSMTQKLENVLNRASNTADTLFQEVLGRKDKADSTRNALNVLQRFKFLFNLPLNIERNIQKGDYDVVINDYEKAKSLFGKTEVQVFKKYYAEVETRIEALRELLLDKLLETPSTLHDQKRYIRYLSDLHASGDPAWQCIGAQHKWILQLMHSCKEGYVKDLKGNPGLHSPMLDLDNDTRPSVLGHLSQTASLKRGSSFQSGRDDTWRYKTPHRVAFVEKLTKLVLSQLPNFWKLWISYVNGSLFSETAEKSGQIERSKNVRQRQNDFKKMIQEVMHSLVKLTRGALLPLSIRDGEAKQYGGWEVKCELSGQWLAHAIQTVRLTHESLTALEIPNDLLQTIQDLILDLRVRCVMATLQHTAEEIKRLAEKEDWIVDNEGLTSLPCQFEQCIVCSLQSLKGVLECKPGEASVFQQPKTQEEVCQLSINIMQVFIYCLEQLSTKPDADIDTTHLSVDVSSPDLFGSIHEDFSLTSEQRLLIVLSNCCYLERHTFLNIAEHFEKHNFQGIEKITQVSMASLKELDQRLFENYIELKADPIVGSLEPGIYAEDEMLEGLPTSHFLERLDFCLVFLRNRSWSQVKCTLSNVRVCFVLVAFLFFNLLFRHLKKEKKKLMFLVKCRNVPSATR

SEQ ID NO: 863653 - protein, 468 aa, Homo sapiens
MSRSRQPPLVTGISPNEGIPWTKVTIRGENLGTGPTDLIGLTICGHNCLLTAEWMSASKIVCRVGQAKNDKGDIIVTTKSGGRGTSTVSFKLLKPEKIGILDQSAVWVDEMNYYDMRTDRNKGIPPLSLRPANPLGIEIEKSKFSQKDLEMLFHGMSADFTSENFSAAWYLIENHSNTSFEQLKMAVTNLKRQANKKSEGSLAYVKGGLSTFFEAQDALSAIHQKLEADGTEKVEGSMTQKLENVLNRASNTADTLFQEVLGRKDKADSTRNALNVLQRFKFLFNLPLNIERNIQKGDYDVVINDYEKAKSLFGKTEVQVFKKYYAEVETRIEALRELLLDKLLETPSTLHDQKRYIRYLSDLHASGDPAWQCIGAQHKWILQLMHSCKEGYVKDLKDHTGQKGYVKRTLSICDCSSWFFSTALAYCASGRRLLAAGSHFMSKLVPILHRKKILMMNVKHTLNANFTW

SEQ ID NO: 863654 - protein, 564 aa, Homo sapiens
RPEPQASLLGSWLEGLLLGTPGVSAGRSHILDSGYIIMSDTLTADVIGRRVEVNGEHATVRFAGVVPPVAGPWLGVEWDNPERGKHDGSHEGTVYFKCRHPTGGSFIRPNKVNFGTDFLTAIKNRYVLEDGPEEDRKEQIVTIGNKPVETIGFDSIMKQQSQLSKLQEVSLRNCAVSCAGEKGGVAEACPNIRKVDLSKNLLSSWDEVIHIADQLRHLEVLNVSENKLKFPSGSVLTGTLSVLKVLVLNQTGITWAEVLRCVAGCPGLEELYLESNNIFISERPTDVLQTVKLLDLSSNQLIDENQLYLIAHLPRLEQLILSDTGISSLHFPDAGIGCKTSMFPSLKYLVVNDNQISQWSFFNELEKLPSLRALSCLRNPLTKEDKEAETARLLIIASIGQLKTLNKCEILPEERRRAELDYRKAFGNEWKQAGGHKDPEKNRLSEEFLTAHPRYQFLCLKYGAPEDWELKTQQPLMLKNQLLTLKIKYPHQLDQKVLEKQLPGSMTIQKVKGLLSRLLKVPVSDLLLSYESPKKPGREIELENDLKSLQFYSVENGDCLLVRW

SEQ ID NO: 863655 - protein, 182 aa, Homo sapiens
MKQQSQLSKLQEVSLRNCAVSCAGEKGGVAEACPNIRKVDLSKNLLSSWDEVIHIADQLRHLEVLNVSENKLKFPSGSVLTGTLSVLKVLVLNQTGITWAEVLRCVAGCPGLEELYLESNNIFISERPTDVLQTVKLLDLSSNQLIDENQLYLIAHLPRLEQLILSDTGISSLHFPDAGIGI

SEQ ID NO: 863656 - protein, 408 aa, Homo sapiens
MKQQSQLSKLQEVSLRNCAVSCAGEKGGVAEACPNIRKVDLSKNLLSSWDEVIHIADQLRHLEVLNVSENKLKFPSGSVLTGTLSVLKVLVLNQTGITWAEVLRCVAGCPGLEELYLESNNIFISERPTDVLQTVKLLDLSSNQLIDENQLYLIAHLPRLEQLILSDTGISSLHFPDAGIGCKTSMFPSLKYLVVNDNQISQWSFFNELEKLPSLRALSCLRNPLTKEDKEAETARLLIIASIGQLKTLNKCEILPEERRRAELDYRKAFGNEWKQAGGHKDPEKNRLSEEFLTAHPRYQFLCLKYGAPEDWELKTQQPLMLKNQLLTLKIKYPHQLDQKVLEKQLPGSMTIQKVKGLLSRLLKVPVSDLLLSYESPKKPGREIELENDLKSLQFYSVENGDCLLVRW

SEQ ID NO: 863657 - protein, 272 aa, Homo sapiens
RPEPQASLLGSWLEGLLLGTPGVSAGRSHILDSGYIIMSDTLTADVIGRRVEVNGEHATVRFAGVVPPVAGPWLGVEWDNPERGKHDGSHEGTVYFKCRHPTGGSFIRPNKVNFGTDFLTAIKNRYVLEDGPEEDRKEQIVTIGNKPVETIGFDSIMKQQSQLSKLQEVSLRNCAVSCAGEKGGVAEACPNIRKVDLSKNLLSSWDEVIHIADQLRHLEVLNVSENKLKFPSGSVLTGTLSVLKVLVLNQTGITWAEANRCSPDSQVIRSFL

SEQ ID NO: 863658 - protein, 223 aa, Homo sapiens [sequence omitted]

SEQ ID NO: 863659 - protein, 83 aa, Homo sapiens
RPEPQASLLGSWLEGLLLGTPGVSAGRSHILDSGYIIMSDTLTADVIGRRVEVNGEHATVRFAGVVPPVAGTRQEDPLFVRTR

SEQ ID NO: 863660 - protein, 112 aa, Homo sapiens
RYRPGSRASRCRPRLAGFSTPSSARAFFWGTPRAVGPPVCFCEPSWTVAFFTRGGAAPPHACVLNLFLFGRRAPHHYLCLCSLVFSADDWCFLVSCVCVFFFFFFLFFFILK

SEQ ID NO: 863661 - protein, 315 aa, Homo sapiens
RPEPQASLLGSWLEGLLLGTPGVSAGRSHILDSGYIIMSDTLTADVIGRRVEVNGEHATVRFAGVVPPVAGPWLGVEWDNPERGKHDGSHEGTVYFKCRHPTGGSFIRPNKVNFGTDFLTAIKNRYVLEDGPEEDRKEQIVTIGNKPVETIGFDSIMKQQSQLSKLQEVSLRNCAVSCAGEKGGVAEACPNIRKVDLSKNLLSSWDEVIHIADQLRHLEVLNVSENKLKFPSGSVLTGTLSVLKVLVLNQTGITWAEVLRCVAGCPGLEELYLESNNIFISERPTDVLQTVKLLDLSSNQLIDENQLYLIAHLPR

SEQ ID NO: 863662 - protein, 564 aa, Homo sapiens; identical to SEQ ID NO: 863654

SEQ ID NO: 863663 - protein, 272 aa, Homo sapiens; identical to SEQ ID NO: 863657

SEQ ID NO: 863664 - protein, 428 aa, Homo sapiens
LGRGVGYASPRRGDFGGQWSHMSALAELWPLSSACLYALPGTYVDRHMQPRCLSHGPPWAVRSVTETEVSHVAKLSVLMRGTRGISPDENKLKFPSGSVLTGTLSVLKVLVLNQTGITWAEVLRCVAGCPGLEELYLESNNIFISERPTDVLQTVKLLDLSSNQLIDENQLYLIAHLPRLEQLILSDTGISSLHFPDAGIGCKTSMFPSLKYLVVNDNQISQWSFFNELEKLPSLRALSCLRNPLTKEDKEAETARLLIIASIGQLKTLNKCEILPEERRRAELDYRKAFGNEWKQAGGHKDPEKNRLSEEFLTAHPRYQFLCLKYGAPEDWELKTQQPLMLKNQLLTLKIKYPHQLDQKVLEKQLPGSMTIQKVKGLLSRLLKVPVSDLLLSYESPKKPGREIELENDLKSLQFYSVENGDCLLVRW

SEQ ID NO: 863665 - protein, 557 aa, Homo sapiens
RPEPQASLLGSWLEGLLLGTPGVSAGRSHILDSGYIIMSDTLTADVIGRRVEVNGEHATVRFAGVVPPVAGPWLGVEWDNPERGKHDGSHEGTVYFKCRHPTGGSFIRPNKVNFGTDFLTAIKNRYVLEDGPEEDRKEQIVTIGNKPVETIGFDSIMKQQSQLSKLQEVSLRNCAVSCAGEKGGVAEACPNIRKVDLSKNLLSSWDEVIHIADQLRHLEVLNVSENKLKFPSGSVLTGTLSVLKVLVLNQTGITWAEVLRCVAGCPGLEELYLESNNIFISERPTDVLQTVKLLDLSSNQLIDENQLYLIAHLPRLEQLILSDTGISSLHFPDAGIGCKTSMFPSLKYLVVNDNQISQWSFFNELEKLPSLRALSCLRNPLTKEDKEAETARLLIIASIGQLKTLNKCEILPEERRRAELDYRKAFGNEWKQAGGHKDPEKNRLSEEFLTAHPRYQFLCLKYGAPEDWELKTQQPLMLKNQLLTLKIKYPHQLDQKVLEKQLPGSMTIQKVKGLLSRLLKVPVSDLLLSYESPKVSCPAKYKVKVKLSPRIMTLNCL

SEQ ID NO: 863666 - protein, 487 aa, Homo sapiens
RPEPQASLLGSWLEGLLLGTPGVSAGRSHILDSGYIIMSDTLTADVIGRRVEVNGEHATVRFAGVVPPVAGPWLGVEWDNPERGKHDGSHEGTVYFKCRHPTGGSFIRPNKVNFGTDFLTAIKNRYVLEDGPEEDRKEQIVTIGNKPVETIGFDSIMKQQSQLSKLQEVSLRNCAVSCAGEKGGVAEACPNIRKVDLSKNLLSSWDEVIHIADQLRHLEVLNVSENKLKFPSGSVLTGTLSVLKVLVLNQTGITWAEVLRCVAGCPGLEELYLESNNIFISERPTDVLQTVKLLDLSSNQLIDENQLYLIAHLPRLEQLILSDTGISSLHFPDAGIGCKTSMFPSLKYLVVNDNQISQWSFFNELEKLPSLRALSCLRNPLTKEDKEAETARLLIIASIGQLKTLNKCEILPEERRRAELDYRKAFGNEWKQAGGHKDPEKNRLSEEFLTAHPRYQFLCLKYGAPEDWELKTQQPLMLKNQLLTLID

SEQ ID NO: 863667 - protein, 526 aa, Homo sapiens
PSHMAALLRRLLQRERPSAASGRPVGRREANLGTDAGVAVRVRFAPSPTGFLHLGGLRTALYNYIFAKKYQGSFILRLEDTDQTRVVPGAAENIEDMLEWAGIPPDESPRRGGPAGPYQQSQRLELYAQATEALLKTGAAYPCFCSPQRLELLKKEALRNHQTPRYDNRCRNMSQEQVAQKLAKDPKPAIRFRLEQVVPAFQDLVYGWNRHEVASVEGDPVIMKSDGFPTYHLACVVDDHHMGISHVLRGSEWLVSTAKHLLLYQALGWQPPHFAHLPLLLNRDGSKLSKRQGDVFLEHFAADGFLPDSLLDIITNCGSGFAENQMGRTLPELITQFNLTQVTCHSALLDLEKLPEFNRLHLQRLVSNESQRRQLVGKLQVLVEEAFGCQLQNRDVLNPVYVERILLLRQGHICRLQDLVSPVYSYLWTRPAVGRAQLDAISEKVDVIAKRVLGLLERSGMSLTQDMLNGELKKLSEGLEGTKYSNVMKLLRMALSGQQQGPPVAEMMLALGPKEVRERIQKVVSS

SEQ ID NO: 863668 - protein, 354 aa, Homo sapiens
MSQEQVAQKLAKDPKPAIRFRLEQVVPAFQDLVYGWNRHEVASVEGDPVIMKSDGFPTYHLACVVDDHHMGISHVLRGSEWLVSTAKHLLLYQALGWQPPHFAHLPLLLNRDGSKLSKRQGDVFLEHFAADGFLPDSLLDIITNCGSGFAENQMGRTLPELITQFNLTQVTCHSALLDLEKLPEFNRLHLQRLVSNESQRRQLVGKLQVLVEEAFGCQLQNRDVLNPVYVERILLLRQGHICRLQDLVSPVYSYLWTRPAVGRAQLDAISEKVDVIAKRVLGLLERSGMSLTQDMLNGELKKLSEGLEGTKYSNVMKLLRMALSGQQQGPPVAEMMLALGPKEVRERIQKVVSS

SEQ ID NO: 863669 - protein, 526 aa, Homo sapiens; identical to SEQ ID NO: 863667

SEQ ID NO: 863670 - protein, 526 aa, Homo sapiens; identical to SEQ ID NO: 863667

SEQ ID NO: 863671 - protein, 55 aa, Homo sapiens
AVCTLAVIIPCVPGIPPDESPRRGGPAGPYQQSQRLELYAQATEALLKTGAAYPC

SEQ ID NO: 863672 - protein, 430 aa, Homo sapiens [sequence omitted]

SEQ ID NO: 863673 - protein, 526 aa, Homo sapiens; identical to SEQ ID NO: 863667

SEQ ID NO: 863674 - protein, 526 aa, Homo sapiens; identical to SEQ ID NO: 863667

SEQ ID NO: 863675 - protein, 768 aa, Homo sapiens
MSNLSKGTGSRKDTKMRIRAFPMTMDEKYVNSIWDLLKNAIQEIQRKNNSGLSFEELYRNAYTMVLHKHGEKLYTGLREVVTEHLINKVREDVLNSLNNNFLQTLNQAWNDHQTAMVMIRDILMYMDRVYVQQNNVENVYNLGLIIFRDQVVRYGCIRDHLRQTLLDMIARERKGEVVDRGAIRNACQMLMILGLEGRSVYEEDFEAPFLEMSAEFFQMESQKFLAENSASVYIKKVEARINEEIERVMHCLDKSTEEPIVKVVERELISKHMKTIVEMENSGLVHMLKNGKTEDLGCMYKLFSRVPNGLKTMCECMSSYLREQGKALVSEEGEGKNPVDYIQGLLDLKSRFDRFLLESFNNDRLFKQTIAGDFEYFLNLNSRSPEYLSLFIDDKLKKGVKGLTEQEVETILDKAMVLFRFMQEKDVFERYYKQHLARRLLTNKSVSDDSEKNMISKLKTECGCQFTSKLEGMFRDMSISNTTMDEFRQHLQATGVSLGGVDLTVRVLTTGYWPTQSATPKCNIPPAPRHAFEIFRRFYLAKHSGRQLTLQHHMGSADLNATFYGPVKKEDGSEVGVGGAQVTGSNTRKHILQVSTFQMTILMLFNNREKYTFEEIQQETDIPERELVRALQSLACGKPTQRVLTKEPKSKEIENGHIFTVNDQFTSKLHRVKIQTVAAKQGESDPERKETRQKVDDDRKHEIEAAIVRIMKSRKKMQHNVLVAEVTQQLKARFLPSPVVIKKRIEGLIEREYLARTPEDRKVYTYVA

SEQ ID NO: 863676 - protein, 768 aa, Homo sapiens; identical to SEQ ID NO: 863675

SEQ ID NO: 863677 - protein, 810 aa, Homo sapiens
MSNLSKGTGSRKDTKMRIRAFPMTMDEKYVNSIWDLLKNAIQEIQRKNNSGLSFEELYRNAYTMVLHKHGEKLYTGLREVVTEHLINKEYYISDVVSSVHHIRRHLMSVYPIIGDVNFDHWCPPDFSTVKVREDVLNSLNNNFLQTLNQAWNDHQTAMVMIRDILMYMDRVYVQQNNVENVYNLGLIIFRDQVVRYGCIRDHLRQTLLDMIARERKGEVVDRGAIRNACQMLMILGLEGRSVYEEDFEAPFLEMSAEFFQMESQKFLAENSASVYIKKVEARINEEIERVMHCLDKSTEEPIVKVVERELISKHMKTIVEMENSGLVHMLKNGKTEDLGCMYKLFSRVPNGLKTMCECMSSYLREQGKALVSEEGEGKNPVDYIQGLLDLKSRFDRFLLESFNNDRLFKQTIAGDFEYFLNLNSRSPEYLSLFIDDKLKKGVKGLTEQEVETILDKAMVLFRFMQEKDVFERYYKQHLARRLLTNKSVSDDSEKNMISKLKTECGCQFTSKLEGMFRDMSISNTTMDEFRQHLQATGVSLGGVDLTVRVLTTGYWPTQSATPKCNIPPAPRHAFEIFRRFYLAKHSGRQLTLQHHMGSADLNATFYGPVKKEDGSEVGVGGAQVTGSNTRKHILQVSTFQMTILMLFNNREKYTFEEIQQETDIPERELVRALQSLACGKPTQRVLTKEPKSKEIENGHIFTVNDQFTSKLHRVKIQTVAAKQGESDPERKETRQKVDDDRKHEIEAAIVRIMKSRKKMQHNVLVAEVTQQLKARFLPSPVVIKKRIEGLIEREYLARTPEDRKVYTYVA

SEQ ID NO: 863678 - protein, 750 aa, Homo sapiens
MSNLSKGTGSRKDTKMRIRAFPMTMDEKYVNSIWDLLKNAIQEIQRKNNSGLSFEELYRNAYTMVLHKHGEKLYTGLREVVTEHLINKVREDVLNSLNNNFLQTLNQAWNDHQTAMVMIRDILMYMDRVYVQQNNVENVYNLGLIIFRDQVVRYGCIRDHLRQTLLDMIARERKGEVVDRGAIRNACQMLMILGLEGRSVYEEDFEAPFLEMSAEFFQMESQKFLAENSASVYIKKVEARINEEIERVMHCLDKSTEEPIVKVVERELISKHMKTIVEMENSGLVHMLKNGKTEDLGCMYKLFSRVPNGLKTMCECMSSYLREQGKALVSEEGEGKNPVDYIQGLLDLKSRFDRFLLESFNNDRLFKQTIAGDFEYFLNLNSRSPEYLSLFIDDKLKKGVKGLTEQEVETILDKAMVLFRFMQEKDVFERYYKQHLARRLLTNKSVSDDSEKNMISKLKTECGCQFTSFRQHLQATGVSLGGVDLTVRVLTTGYWPTQSATPKCNIPPAPRHAFEIFRRFYLAKHSGRQLTLQHHMGSADLNATFYGPVKKEDGSEVGVGGAQVTGSNTRKHILQVSTFQMTILMLFNNREKYTFEEIQQETDIPERELVRALQSLACGKPTQRVLTKEPKSKEIENGHIFTVNDQFTSKLHRVKIQTVAAKQGESDPERKETRQKVDDDRKHEIEAAIVRIMKSRKKMQHNVLVAEVTQQLKARFLPSPVVIKKRIEGLIEREYLARTPEDRKVYTYVA

SEQ ID NO: 863679 - protein, 388 aa, Homo sapiens [sequence omitted]

SEQ ID NO: 863680 - protein, 768 aa, Homo sapiens; identical to SEQ ID NO: 863675

SEQ ID NO: 863681 - protein, 768 aa, Homo sapiens; identical to SEQ ID NO: 863675

SEQ ID NO: 863682 - protein, 776 aa, Homo sapiens
MSNLSKGTGSRKDTKMRIRAFPMTMDEKYVNSIWDLLKNAIQEIQRKNNSGLSFEELYRNAYTMVLHKHGEKLYTGLREVVTEHLINKVREDVLNSLNNNFLQTLNQAWNDHQTAMVMIRDILMYMDRVYVQQNNVENVYNLGLIIFRDQVVRYGCIRDHLRQTLLDMIARERKGEVVDRGAIRNACQMLMILGLEGRSVYEEDFEAPFLEMSAEFFQMESQKFLAENSASVYIKKVEARINEEIERVMHCLDKSTEEPIVKVVERELISKHMKTIVEMENSGLVHMLKNGKTEDLGCMYKLFSRVPNGLKTMCECMSSYLREQGKALVSEEGEGKNPVDYIQGLLDLKSRFDRFLLESFNNDRLFKQTIAGDFEYFLNLNSRSPEYLSLFIDDKLKKGVKGLTEQEVETILDKAMVLFRFMQEKDVFERYYKQHLARRLLTNKSVSDDSEKNMISKLKTECGCQFTSKLEGMFRDMSISNTTMDEFRQHLQATGVSLGGVDLTVRVLTTGYWPTQSATPKCNIPPAPRHAFEIFRRFYLAKHSGRQLTLQHHMGSADLNATFYGPVKKEDGSEVGVGGAQVTGSNTRKHILQVSTFQMTILMLFNNREKYTFEEIQQETDIPERELVRALQSLACGKPTQRVLTKEPKSKEIENGHIFTVNDQFTSKLHRVKIQTVAAKQGESDPERKETRQKVDDDRKHEIEAAIVRIMKSRKKMQHNVLVAEVTQQVKAPSFPVPWYEARFEAFGHTLRAHLGLTFTLCYGARLILDRLHAGD

SEQ ID NO: 863683 - protein, 732 aa, Homo sapiens
MSNLSKGTGSRKDTKMRIRAFPMTMDEKYVNSIWDLLKNAIQEIQRKNNSGLSFEELYRNAYTMVLHKHGEKLYTGLREVVTEHLINKVREDVLNSLNNNFLQTLNQAWNDHQTAMVMIRDILMYMDRVYVQQNNVENVYNLGLIIFRDQVVRYGCIRDHLRQTLLDMIARERKGEVVDRGAIRNACQMLMILGLEGRSVYEEDFEAPFLEMSAEFFQMESQKFLAENSASVYIKKVEARINEEIERVMHCLDKSTEEPIVKVVERELISKHMKTIVEMENSGLVHMLKNGKTEDLGCMYKLFSRVPNGLKTMCECMSSYLREQGKALVSEEGEGKNPVDYIQGLLDLKSRFDRFLLESFNNDRLFKQTIAGDFEYFLNLNSRSPEYLSLFIDDKLKKGVKGLTEQEVETILDKAMVLFRFMQEKDVFERYYKQHLARRLLTNKSVSDDSEKNMISKLKTECGCQFTSKLEGMFRDMSISNTTMDEFRQHLQATGVSLGGVDLTVRVLTTGYWPTQSATPKCNIPPAPRHAFEIFRRFYLAKHSGRQLTLQHHMGSADLNATFYGPVKKEDGSEVGVGGAQVTGSNTRKHILQVSTFQMTILMLFNNREKYTFEEIQQETDIPERELVRALQSLACGKPTQRVLTKEPKSKEIENGHIFTVNDQFTSKLHRVKIQTVAAKQGESDPERKETRQKVDDDRKHEIEAAIVRIMKSRKKMQHNVLVAEVRTLHYW

SEQ ID NO: 863684 - protein, 736 aa, Homo sapiens
MSNLSKGTGSRKDTKMRIRAFPMTMDEKYVNSIWDLLKNAIQEIQRKNNSGLSFEELYRNAYTMVLHKHGEKLYTGLREVVTEHLINKVREDVLNSLNNNFLQTLNQAWNDHQTAMVMIRDILMYMDRVYVQQNNVENVYNLGLIIFRDQVVRYGCIRDHLRQTLLDMIARERKGEVVDRGAIRNACQMLMILGLEGRSVYEEDFEAPFLEMSAEFFQMESQKFLAENSASVYIKKVEARINEEIERVMHCLDKSTEEPIVKVVERELISKHMKTIVEMENSGLVHMLKNGKTEDLGCMYKLFSRVPNGLKTMCECMSSYLREQGKALVSEEGEGKNPVDYIQGLLDLKSRFDRFLLESFNNDRLFKQTIAGDFEYFLNLNSRSPEYLSLFIDDKLKKGVKGLTEQEVETILDKAMVLFRFMQEKDVFERYYKQHLARRLLTNKSVSDDSEKNMISKLKTECGCQFTSKLEGMFRDMSISNTTMDEFRQHLQATGVSLGGVDLTVRVLTTGYWPTQSATPKCNIPPAPRHAFEIFRRFYLAKHSGRQLTLQHHMGSADLNATFYGPVKKEDGSEVGVGGAQVTGSNTRKHILQVSTFQMTILMLFNNREKYTFEEIQQETDIPERELVRALQSLACGKPTQRVLTKEPKSKEIENGHIFTVNDQFTSKLHRVKIQTVAAKQGESDPERKETRQKVLCIACANKDGFSRGCPEQEEGSSSFQEVYLYLFRAISMAAT

SEQ ID NO: 863685 - protein, 758 aa, Homo sapiens
MSNLSKGTGSRKDTKMRIRAFPMTMDEKYVNSIWDLLKNAIQEIQRKNNSGLSFEELYRNAYTMVLHKHGEKLYTGLREVVTEHLINKVREDVLNSLNNNFLQTLNQAWNDHQTAMVMIRDILMYMDRVYVQQNNVENVYNLGLIIFRDQVVRYGCIRDHLRQTLLDMIARERKGEVVDRGAIRNACQMLMILGLEGRSVYEEDFEAPFLEMSAEFFQMESQKFLAENSASVYIKKVEARINEEIERVMHCLDKSTEEPIVKVVERELISKHMKTIVEMENSGLVHMLKNGKTEDLGCMYKLFSRVPNGLKTMCECMSSYLREQGKALVSEEGEGKNPVDYIQGLLDLKSRFDRFLLESFNNDRLFKQTIAGDFEYFLNLNSRSPEYLSLFIDDKLKKGVKGLTEQEVETILDKAMVLFRFMQEKDVFERYYKQHLARRLLTNKSVSDDSEKNMISKLKTECGCQFTSFRQHLQATGVSLGGVDLTVRVLTTGYWPTQSATPKCNIPPAPRHAFEIFRRFYLAKHSGRQLTLQHHMGSADLNATFYGPVKKEDGSEVGVGGAQVTGSNTRKHILQVSTFQMTILMLFNNREKYTFEEIQQETDIPERELVRALQSLACGKPTQRVLTKEPKSKEIENGHIFTVNDQFTSKLHRVKIQTVAAKQGESDPERKETRQKVDDDRKHEIEAAIVRIMKSRKKMQHNVLVAEVTQQVKAPSFPVPWYEARFEAFGHTLRAHLGLTFTLCYGARLILDRLHAGD

SEQ ID NO: 863686 - protein, 519 aa, Homo sapiens
MSNLSKGTGSRKDTKMRIRAFPMTMDEKYVNSIWDLLKNAIQEIQRKNNSGLSFEELYRNAYTMVLHKHGEKLYTGLREVVTEHLINKVREDVLNSLNNNFLQTLNQAWNDHQTAMVMIRDILMYMDRVYVQQNNVENVYNLGLIIFRDQVVRYGCIRDHLRQTLLDMIARERKGEVVDRGAIRNACQMLMILGLEGRSVYEEDFEAPFLEMSAEFFQMESQKFLAENSASVYIKKVEARINEEIERVMHCLDKSTEEPIVKVVERELISKHMKTIVEMENSGLVHMLKNGKTEDLGCMYKLFSRVPNGLKTMCECMSSYLREQGKALVSEEGEGKNPVDYIQGLLDLKSRFDRFLLESFNNDRLFKQTIAGDFEYFLNLNSRSPEYLSLFIDDKLKKGVKGLTEQEVETILDKAMVLFRFMQEKDVFERYYKQHLARRLLTNKSVSDDSEKNMISKLKTECGCQFTSKLEGMFRDMSISNTTMDEFRQHLQATGVRFCVNFYLDIHVKSFVMGIFSST

SEQ ID NO: 863687 - protein, 768 aa, Homo sapiens; identical to SEQ ID NO: 863675

SEQ ID NO: 863688 - protein, 768 aa, Homo sapiens; identical to SEQ ID NO: 863675

SEQ ID NO: 863689 - protein, 520 aa, Homo sapiens [sequence omitted]

SEQ ID NO: 863690 - protein, 212 aa, Homo sapiens
MLISRHILCTSEKEDGSEVGVGGAQVTGSNTRKHILQVSTFQMTILMLFNNREKYTFEEIQQETDIPERELVRALQSLACGKPTQRVLTKEPKSKEIENGHIFTVNDQFTSKLHRVKIQTVAAKQGESDPERKETRQKVDDDRKHEIEAAIVRIMKSRKKMQHNVLVAEVTQQLKARFLPSPVVIKKRIEGLIEREYLARTPEDRKVYTYVA

SEQ ID NO: 863691 - protein, 223 aa, Homo sapiens
EIQQFYCNELYFLNFSFIFLFSYSKENKTQHFTFSQVTGSNTRKHILQVSTFQMTILMLFNNREKYTFEEIQQETDIPERELVRALQSLACGKPTQRVLTKEPKSKEIENGHIFTVNDQFTSKLHRVKIQTVAAKQGESDPERKETRQKVDDDRKHEIEAAIVRIMKSRKKMQHNVLVAEVTQQLKARFLPSPVVIKKRIEGLIEREYLARTPEDRKVYTYVA

SEQ ID NO: 863692 - protein, 768 aa, Homo sapiens; identical to SEQ ID NO: 863675

SEQ ID NO: 863693 - protein, 642 aa, Homo sapiens
MSNLSKGTGSRKDTKMRIRAFPMTMDEKYVNSIWDLLKNAIQEIQRKNNSGLSFEELYRNAYTMVLHKHGEKLYTGLREVVTEHLINKVREDVLNSLNNNFLQTLNQAWNDHQTAMVMIRDILMYMDRVYVQQNNVENVYNLGLIIFRDQVVRYGCIRDHLRQTLLDMIARERKGEVVDRGAIRNACQMLMILGLEGRSVYEEDFEAPFLEMSAEFFQMESQKFLAENSASVYIKKVEARINEEIERVMHCLDKSTEEPIVKVVERELISKHMKTIVEMENSGLVHMLKNGKTEDLGCMYKLFSRVPNGLKTMCECMSSYLREQGKALVSEEGEGKNPVDYIQGLLDLKSRFDRFLLESFNNDRLFKQTIAGDFEYFLNLNSRSPEYLSLFIDDKLKKGVKGLTEQEVETILDKAMVLFRFMQEKDVFERYYKQHLARRLLTNKSVSDDSEKNMISKLKTECGCQFTSKLEGMFRDMSISNTTMDEFRQHLQATGVSLGGVDLTVRVLTTGYWPTQSATPKCNIPPAPRHAFEIFRRFYLAKHSGRQLTLQHHMGSADLNATFYGPVKKEDGSEVGVGGAQVTGSNTRKHILQVSTFQMTILMLFNNREKYTFEVWIVVIYILTVLFLTLTCYLSLSYLNNL

SEQ ID NO: 863694 - protein, 80 aa, Homo sapiens
TLCVTAHVILRPDVFLSPSTISSFPIIPTESWSLLQILQALGKSYHPGCFRCVICNECLDGVPFTVDSENKIYCVRDYHK

SEQ ID NO: 863695 - protein, 676 aa, Homo sapiens
MDKYDDLGLEASKFIEDLNMYEASKDGLFRVDKGAGNNPEFEETRRVFATKMAKIHLQQQQQQLLQEETLPRGSRGPVNGGGRLGPQARWEVVGSKLTVDGAAKPPLAASTGAPGAVTTLAAGQPPYPPQEQRSRPYLHGTRHGSQDCGSRESLATSEMSAFHQPGPCEDPSCLTHGDYYDNLSLASPKWGDKPGVSPSIGLSVGSGWPSSPGSDPPLPKPCGDHPLNHRQLSLSSSRSSEGSLGGQNSGIGGRSSEKPTGLWSTASSQRVSPGLPSPNLENGAPAVGPVQPRTPSVSAPLALSCPRQGGLPRSNSGLGGEVSGVMSKPNVDPQPWFQDGPKSYLSSSAPSSSPAGLDGSQQGAVPGLGPKPGCTDLGTGPKLSPTSLVHPVMSTLPELSCKEGPLGWSSDGSLGSVLLDSPSSPRVRLPCQPLVPGPELRPSAAELKLEALTQRLEREMDAHPKADYFGACVKCSKGVFGAGQACQAMGNLYHDTCFTCAACSRKLRGKAFYFVNGKVFCEEDFLYSGFQQSADRCFLCGHLIMDMILQALGKSYHPGCFRCVICNECLDGVPFTVDSENKIYCVRDYHKVLAPKCAACGLPILPPEGSDETIRVVSMDRDYHVECYHCEDCGLELNDEDGHRCYPLEDHLFCHSCHVKRLEKRPSSTALHQHHF

SEQ ID NO: 863696 - protein, 188 aa, Homo sapiens
MGNLYHDTCFTCAACSRKLRGKAFYFVNGKVFCEEDFLYSGFQQSADRCFLCGHLIMDMILQALGKSYHPGCFRCVICNECLDGVPFTVDSENKIYCVRDYHKVLAPKCAACGLPILPPEGSDETIRVVSMDRDYHVECYHCEDCGLELNDEDGHRCYPLEDHLFCHSCHVKRLEKRPSSTALHQHHF

SEQ ID NO: 863697 - protein, 620 aa, Homo sapiens
MDKYDDLGLEASKFIEDLNMYEASKDGLFRVDKGAGNNPEFEETRRVFATKMAKIHLQQQQQQLLQEETLPRGSRGPVNGGGRLGPQARWEVVGSKLTVDGAAKPPLAASTGAPGAVTTLAAGQPPYPPQEQRSRPYLHGTRHGSQDCGSRESLATSEMSAFHQPGPCEDPSCLTHGDYYDNLSLASPKWGDKPGVSPSIGLSVGSGWPSSPGSDPPLPKPCGDHPLNHRQLSLSSSRSSEGSLGGQNSGIGGRSSEKPTGLWSTASSQRVSPGLPSPNLENGAPAVGPVQPRTPSVSAPLALSCPRQGGLPRSNSGLGGEVSGVMSKPNVDPQPWFQDGPKSYLSSSAPSSSPAGLDGSQQGAVPGLGPKPGCTDLGTGPKLSPTSLVHPVMSTLPELSCKEGPLGWSSDGSLGSVLLDSPSSPRVRLPCQPLVPGPELRPSAAELKLEALTQRLEREMDAHPKADYFGACVKCSKGVFGAGQACQAMGNLYHDTCFTCAACSRKLRGKAFYFVNGKVFCEEDFLYSGFQQSADRCFLCGHLIMDMILQALGKSYHPGCFRCVICNECLDGVPFTVDSENKIYCVRDYHKVLAPKCAACGLPILPPEVRCPSRHAPRGF

SEQ ID NO: 863698 - protein, 152 aa, Homo sapiens
GRRHLCCACCLTQLLGLGHLVLEELLQLGLLLLDEALPCVICNECLDGVPFTVDSENKIYCVRDYHKVLAPKCAACGLPILPPEGSDETIRVVSMDRDYHVECYHCEDCGLELNDEDGHRCYPLEDHLFCHSCHVKRLEKRPSSTALHQHHF

SEQ ID NO: 863699 - protein, 95 aa, Homo sapiens
MGRSLRPSGVQCSSAVLGNRALSRQRREIFRVIWVGGNILHHHFCSGSIVLCPPDPSPASPGASSGSTPRTREVTKINLQLGCDVIGGFPENMGI

SEQ ID NO: 863700 - protein, 498 aa, Homo sapiens
MKRKSERRSSWAAAPPCSRRCSSTSPGVKKIRSSTQQDPRRRDPQDDVYLDITDRLCFAILYSRPKSASNVHYFSIDNELEYENFYADFGPLNLAMVYRYCCKINKKLKSITMLRKKIVHFTGSDQRKQANAAFLVGCYMVIYLGRTPEEAYRILIFGETSYIPFRDAAYGSCNFYITLLDCFHAVKKAMQYGFLNFNSFNLDEYEHYEKAENGDLNWIIPDRFIAFCGPHSRARLESGYHQHSPETYIQYFKNHNVTTIIRLNKRMYDAKRFTDAGFDHHDLFFADGSTPTDAIVKEFLDICENAEGAIAVHCKAGLGRTGTLIACYIMKHYRMTAAETIAWVRICRPGSVIGPQQQFLVMKQTNLWLEGDYFRQKLKGQENGQHRAAFSKLLSGVDDISINGVENQDQQEPEPYSDDDEINGVTQGDRLRALKSRRQSKTNAIPLTVILQSSVQSCKTSEPNISGSAGITKRTTRSASRKSSVKSLSISRTKTVLR

SEQ ID NO: 863701 - protein, 471 aa, Homo sapiens
MKRKSERRSSWAAAPPCSRRCSSTSPGVKKIRSSTQQDPRRRDPQDDVYLDITDRLCFAILYSRPKSASNVHYFSIDNELEYENFYADFGPLNLAMVYRYCCKINKKLKSITMLRKKIVHFTGSDQRKQANAAFLVGCYMVIYLGRTPEEAYRILIFGETSYIPFRDAAYGSCNFYITLLDCFHAVKKAMQYGFLNFNSFNLDEYEHYEKAENGDLNWIIPDRFIAFCGPHSRARLESGYHQHSPETYIQYFKNHNVTTIIRLNKRMYDAKRFTDAGFDHHDLFFADGSTPTDAIVKEFLDICENAEGAIAVHCKAGLGRTGTLIACYIMKHYRMTAAETIAWVRICRPGSVIGPQQQFLVMKQTNLWLEGDYFRQKLKGQENGQHRAAFSKLLSGVDDISINGVENQDQQEPEPYSDDDEINGVTQGDRLRALKSRRQSKTNAIPLTDGWLSQAVTFLDRLLIWLGIHKD

SEQ ID NO: 863702 - protein, 485 aa, Homo sapiens
MKRKSERRSSWAAAPPCSRRCSSTSPGVKKIRSSTQQDPRRRDPQDDVYLDITDRLCFAILYSRPKSASNVHYFSIDNELEYENFYADFGPLNLAMVYRYCCKINKKLKSITMLRKKIVHFTGSDQRKQANAAFLVGCYMVIYLGRTPEEAYRILIFGETSYIPFRDAAYGSCNFYITLLDCFHAVKKAMQYGFLNFNSFNLDEYEHYEKAENGDLNWIIPDRFIAFCGPHSRARLESGYHQHSPETYIQYFKNHNVTTIIRLNKRMYDAKRFTDAGFDHHDLFFADGSTPTDAIVKEFLDICENAEGAIAVHCKAGLGRTGTLIACYIMKHYRMTAAETIAWVRICRPGSVIGPQQQFLVMKQTNLWLEGDYFRQKLKGQENGQHRAAFSKLLSGVDDISINGVENQDQQEPEPYSDDDEINGVTQGDRLRALKSRRQSKTNAIPLTCPLAVLTSALCSVVIWWIVCDYILPILLFCLDGFRTQ

SEQ ID NO: 863703 - protein, 485 aa, Homo sapiens; identical to SEQ ID NO: 863702

SEQ ID NO: 863704 - protein, 452 aa, Homo sapiens [sequence omitted]

SEQ ID NO: 863705 - protein, 246 aa, Homo sapiens
PSRCFGVMSREGAGAALVAEVIKDRLCFAILYSRPKSASNVHYFSIDNELEYENFYADFGPLNLAMVYRYCCKINKKLKSITMLRKKIVHFTGSDQRKQANAAFLVGCYMVIYLGRTPEEAYRILIFGETSYIPFRDAAYGSCNFYITLLDCFHAVKKAMQYGFLNFNSFNLDEYEHYEKAENGDLNWIIPDRFIAFCGPHSRARLESGYHQHSPETYIQYFKNHNVTTIIRLNKRMYDAQTSLWR

SEQ ID NO: 863706 - protein, 171 aa, Homo sapiens
MKRKSERRSSWAAAPPCSRRCSSTSPGVKKIRSSTQQDPRRRDPQDDVYLDITDRLCFAILYSRPKSASNVHYFSIDNELEYENFYADFGPLNLAMVYRYCCKINKKLKSITMLRKKIVHFTGSDQRKQANAAFLVGCYMVSICFPNVFIKMHTTVVLYICSWNFEIKIMS

SEQ ID NO: 863707 - protein, 143 aa, Homo sapiens
RNSPPGVPTSRVLLCPGAYAAAAAAAVGTHGYPGQLRPPAAAPSPRPRQPAAGTWGRAGGAGRGRRRCSEGCGAGPAAAAGGSGAGAVGRAPPPAPARPPPAGLCRRPPSPQRRSAPAAPSARAGLAGASAGARARGAMVVAP

SEQ ID NO: 863708 - protein, 498 aa, Homo sapiens; identical to SEQ ID NO: 863700

SEQ ID NO: 863709 - protein, 498 aa, Homo sapiens; identical to SEQ ID NO: 863700

SEQ ID NO: 863710 - protein, 485 aa, Homo sapiens; identical to SEQ ID NO: 863702

SEQ ID NO: 863711 - protein, 465 aa, Homo sapiens
AFQMLWSHEPGGRGGSFGSRGDQRKEHCNFSISDRLCFAILYSRPKSASNVHYFSIDNELEYENFYADFGPLNLAMVYRYCCKINKKLKSITMLRKKIVHFTGSDQRKQANAAFLVGCYMVIYLGRTPEEAYRILIFGETSYIPFRDAAYGSCNFYITLLDCFHAVKKAMQYGFLNFNSFNLDEYEHYEKAENGDLNWIIPDRFIAFCGPHSRARLESGYHQHSPETYIQYFKNHNVTTIIRLNKRMYDAKRFTDAGFDHHDLFFADGSTPTDAIVKEFLDICENAEGAIAVHCKAGLGRTGTLIACYIMKHYRMTAAETIAWVRICRPGSVIGPQQQFLVMKQTNLWLEGDYFRQKLKGQENGQHRAAFSKLLSGVDDISINGVENQDQQEPEPYSDDDEINGVTQGDRLRALKSRRQSKTNAIPLTCPLAVLTSALCSVVIWWIVCDYILPILLFCLDGFRTQ

SEQ ID NO: 863712 - protein, 390 aa, Homo sapiens
MVYRYCCKINKKLKSITMLRKKIVHFTGSDQRKQANAAFLVGCYMVIYLGRTPEEAYRILIFGETSYIPFRDAAYGSCNFYITLLDCFHAVKKAMQYGFLNFNSFNLDEYEHYEKAENGDLNWIIPDRFIAFCGPHSRARLESGYHQHSPETYIQYFKNHNVTTIIRLNKRMYDAKRFTDAGFDHHDLFFADGSTPTDAIVKEFLDICENAEGAIAVHCKAGLGRTGTLIACYIMKHYRMTAAETIAWVRICRPGSVIGPQQQFLVMKQTNLWLEGDYFRQKLKGQENGQHRAAFSKLLSGVDDISINGVENQDQQEPEPYSDDDEINGVTQGDRLRALKSRRQSKTNAIPLTCPLAVLTSALCSVVIWWIVCDYILPILLFCLDGFRTQ

SEQ ID NO: 863713 - protein, 485 aa, Homo sapiens; identical to SEQ ID NO: 863702

SEQ ID NO: 863714 - protein, 471 aa, Homo sapiens; identical to SEQ ID NO: 863701

SEQ ID NO: 863715 - protein, 485 aa, Homo sapiens; identical to SEQ ID NO: 863702

SEQ ID NO: 863716 - protein, 282 aa, Homo sapiens
MKVKVIPVLEDNYMYLVIEELTREAVAVDVAVPKRLLEIVGREGVSLTAVLTTHHHWDHARGNPELARLRPGLAVLGADERIFSLTRRLAHGEELRFGAIHVRCLLTPGHTAGHMSYFLWEDDCPDPPALFSGDALSVAGCGSCLEGSAQQMYQSLAELGTLPPETKVFCGHEHTLSNLEFAQKVEPCNDHVRAKLSWAKKRDEDDVPTVPSTLGEERLYNPFLRVAEEPVRKFTGKAVPADVLEALCKERARFEQAGEPRQPQARALLALQWGLLSAAPHD

SEQ ID NO: 863717 - protein, 354 aa, Homo sapiens
RRALWSHRAQDPGRAGAGAGRVRGGGRLAAPEPSAALSPDPVTGGRGPASVSLSFGSSAQPCRRHRWPSSVTMKVKVIPVLEDNYMYLVIEELTREAVAVDVAVPKRLLEIVGREGVSLTAVLTTHHHWDHARGNPELARLRPGLAVLGADERIFSLTRRLAHGEELRFGAIHVRCLLTPGHTAGHMSYFLWEDDCPDPPALFSGDALSVAGCGSCLEGSAQQMYQSLAELGTLPPETKVFCGHEHTLSNLEFAQKVEPCNDHVRAKLSWAKKRDEDDVPTVPSTLGEERLYNPFLRVAEEPVRKFTGKAVPADVLEALCKERARFEQAGEPRQPQARALLALQWGLLSAAPHD

SEQ ID NO: 863718 - protein, 316 aa, Homo sapiens
MKVKVIPVLEDNYMYLVIEELTREAVAVDVAVPKRLLEIVGREGVSLTAVLTTHHHWDHARGNPELARLRPGLAVLGADERIFSLTRRLAHGEELRFGAIHVRCLLTPGHTAGHMSYFLWEDDCPDPPALFSGTRSAERPTPPPAGPAPSALTRPPPPGDALSVAGCGSCLEGSAQQMYQSLAELGTLPPETKVFCGHEHTLSNLEFAQKVEPCNDHVRAKLSWAKARPLSRRGKRVGGEGTGFGVGGALRQGLMVTGACGHSRRGMRMTCPLCRRLWARSASTTPSCGWREYGCCPGASTVTWTLRKASGDCVLG

SEQ ID NO: 863719 - protein, 282 aa, Homo sapiens; identical to SEQ ID NO: 863716

SEQ ID NO: 863720 - protein, 309 aa, Homo sapiens
MKVKVIPVLEDNYMYLVIEELTREAVAVDVAVPKRLLEIVGREGVSLTAVLTTHHHWDHARGNPELARLRPGLAVLGADERIFSLTRRLAHGEELRVSARSREGRGGRPGSTRPHRSACSSAEFGAIHVRCLLTPGHTAGHMSYFLWEDDCPDPPALFSGDALSVAGCGSCLEGSAQQMYQSLAELGTLPPETKVFCGHEHTLSNLEFAQKVEPCNDHVRAKLSWAKKRDEDDVPTVPSTLGEERLYNPFLRVAEEPVRKFTGKAVPADVLEALCKERARFEQAGEPRQPQARALLALQWGLLSAAPHD

SEQ ID NO: 863721 - protein, 282 aa, Homo sapiens; identical to SEQ ID NO: 863716

SEQ ID NO: 863722 - protein, 227 aa, Homo sapiens
MKVKVIPVLEDNYMYLVIEELTREAVAVDVAVPKRLLEIVGREGVSLTAVLTTHHHWDHARGNPELARLRPGLAVLGADERIFSLTRRLAHGEELRFGAIHVRCLLTPGHTAGHMSYFLWEDDCPDPPALFSGDALSVAGCGSCLEGSAQQMYQSLAELGTLPPETKVFCGHEHTLSNLEFAQKVEPCNDHVRAKLSWAKKRDEDDVPTVPSTLGEERLYNPFLRVA

SEQ ID NO: 863723 - protein, 290 aa, Homo sapiens
MKVKVIPVLEDNYMYLVIEELTREAVAVDVAVPKRLLEIVGREGVSLTAVLTTHHHWDHARGNPELARLRPGLAVLGADERIFSLTRRLAHGEELRFGAIHVRCLLTPGHTAGHMSYFLWEDDCPDPPALFSGDALSVAGCGSCLEGSAQQMYQSLAELGTLPPETKVFCGHEHTLSNLEFAQKVEPCNDHVRAKLSWAKARPLSRRGKRVGGEGTGFGVGGALRQGLMVTGACGHSRRGMRMTCPLCRRLWARSASTTPSCGWREYGCCPGASTVTWTLRKASGDCVLG

SEQ ID NO: 863724 - protein, 282 aa, Homo sapiens; identical to SEQ ID NO: 863716

SEQ ID NO: 863725 - protein, 684 aa, Homo sapiens
MARHRNVRGYNYDEDFEDDDLYGQSVEDDYCISPSTAAQFIYSRRDKPSVEPVEEYDYEDLKESSNSVSNHQLSGFDQARLYSCLDHMREVLGDAVPDEILIEAVLKNKFDVQKALSGVLEQDRVQSLKDKNEATVSTGKIAKGKPVDSQTSRSESEIVPKVAKMTVSGKKQTMGFEVPGVSSEENGHSFHTPQKGPPIEDAIASSDVLETASKSANPPHTIQASEEQSSTPAPVKKSGKLRQQIDVKAELEKRQGGKQLLNLVVIGHVDAGKSTLMGHMLYLLGNINKRTMHKYEQESKKAGKASFAYAWVLDETGEERERGVTMDVGMTKFETTTKVITLMDAPGHKDFIPNMITGAAQADVAVLVVDASRGEFEAGFETGGQTREHGLLVRSLGVTQLAVAVNKMDQVNWQQERFQEITGKLGHFLKQAGFKESDVGFIPTSGLSGENLITRSQSSELTKWYKGLCLLEQIDSFKPPQRSIDKPFRLCVSDVFKDQGSGFCITGKIEAGYIQTGDRLLAMPPNETCTVKGITLHDEPVDWAAAGDHVSLTLVGMDIIKINVGCIFCGPKVPIKACTRFRARILIFNIEIPITKGFPVLLHYQTVSEPAVIKRLISVLNKSTGEVTKKKPKFLTKGQNALVELQTQRPIALELYKDFKELGRFMLRYGGSTIAAGVVTEIKE

SEQ ID NO: 863726 - protein, 202 aa, Homo sapiens
MARHRNVRGYNYDEDFEDDDLYGQSVEDDYCISPSTAAQFIYSRRDKPSVEPVEEYDYEDLKESSNSVSNHQLSGFDQARLYSCLDHMREVLGDAVPDEILIEAVLKNKFDVQKALSGVLEQDRVQSLKDKNEATVSTGKIAKGVLFSSSEVSADNVQSSYPQSANHLDYSSKPFDFASSVGKYGLSHNSSVPTHCLLHRKK

SEQ ID NO: 863727 - protein, 165 aa, Homo sapiens
MARHRNVRGYNYDEDFEDDDLYGQSVEDDYCISPSTAAQFIYSRRDKPSVEPVEEYDYEDLKESSNSVSNHQLSGFDQARLYSCLDHMREVLGDAVPDEILIEAVLKNKFDVQKALSGVLEQDRVQSLKDKNEATVSTGKIAKGHLAVDPFIRGKDRIHIGIQFL

SEQ ID NO: 863728 - protein, 684 aa, Homo sapiens; identical to SEQ ID NO: 863725

SEQ ID NO: 863729 - protein, 597 aa, Homo sapiens
MREVLGDAVPDEILIEAVLKNKFDVQKALSGVLEQDRVQSLKDKNEATVSTGKIAKGKPVDSQTSRSESEIVPKVAKMTVSGKKQTMGFEVPGVSSEENGHSFHTPQKGPPIEDAIASSDVLETASKSANPPHTIQASEEQSSTPAPVKKSGKLRQQIDVKAELEKRQGGKQLLNLVVIGHVDAGKSTLMGHMLYLLGNINKRTMHKYEQESKKAGKASFAYAWVLDETGEERERGVTMDVGMTKFETTTKVITLMDAPGHKDFIPNMITGAAQADVAVLVVDASRGEFEAGFETGGQTREHGLLVRSLGVTQLAVAVNKMDQVNWQQERFQEITGKLGHFLKQAGFKESDVGFIPTSGLSGENLITRSQSSELTKWYKGLCLLEQIDSFKPPQRSIDKPFRLCVSDVFKDQGSGFCITGKIEAGYIQTGDRLLAMPPNETCTVKGITLHDEPVDWAAAGDHVSLTLVGMDIIKINVGCIFCGPKVPIKACTRFRARILIFNIEIPITKGFPVLLHYQTVSEPAVIKRLISVLNKSTGEVTKKKPKFLTKGQNALVELQTQRPIALELYKDFKELGRFMLRYGGSTIAAGVVTEIKE

SEQ ID NO: 863730 - protein, 272 aa, Homo sapiens
KQWYQRRVAITSGGHFLKQAGFKESDVGFIPTSGLSGENLITRSQSSELTKWYKGLCLLEQIDSFKPPQRSIDKPFRLCVSDVFKDQGSGFCITGKIEAGYIQTGDRLLAMPPNETCTVKGITLHDEPVDWAAAGDHVSLTLVGMDIIKINVGCIFCGPKVPIKACTRFRARILIFNIEIPITKGFPVLLHYQTVSEPAVIKRLISVLNKSTGEVTKKKPKFLTKGQNALVELQTQRPIALELYKDFKELGRFMLRYGGSTIAAGVVTEIKE

SEQ ID NO: 863731 - protein, 684 aa, Homo sapiens; identical to SEQ ID NO: 863725

SEQ ID NO: 863732 - protein, 684 aa, Homo sapiens; identical to SEQ ID NO: 863725

SEQ ID NO: 863733 - protein, 684 aa, Homo sapiens; identical to SEQ ID NO: 863725

SEQ ID NO: 863734 - protein, 520 aa, Homo sapiens
MTVSGKKQTMGFEVPGVSSEENGHSFHTPQKGPPIEDAIASSDVLETASKSANPPHTIQASEEQSSTPAPVKKSGKLRQQIDVKAELEKRQGGKQLLNLVVIGHVDAGKSTLMGHMLYLLGNINKRTMHKYEQESKKAGKASFAYAWVLDETGEERERGVTMDVGMTKFETTTKVITLMDAPGHKDFIPNMITGAAQADVAVLVVDASRGEFEAGFETGGQTREHGLLVRSLGVTQLAVAVNKMDQVNWQQERFQEITGKLGHFLKQAGFKESDVGFIPTSGLSGENLITRSQSSELTKWYKGLCLLEQIDSFKPPQRSIDKPFRLCVSDVFKDQGSGFCITGKIEAGYIQTGDRLLAMPPNETCTVKGITLHDEPVDWAAAGDHVSLTLVGMDIIKINVGCIFCGPKVPIKACTRFRARILIFNIEIPITKGFPVLLHYQTVSEPAVIKRLISVLNKSTGEVTKKKPKFLTKGQNALVELQTQRPIALELYKDFKELGRFMLRYGGSTIAAGVVTEIKE

SEQ ID NO: 863735 - protein, 147 aa, Homo sapiens
MARHRNVRGYNYDEDFEDDDLYGQSVEDDYCISPSTAAQFIYSRRDKPSVEPVEEYDYEDLKESSNSVSNHQLSGFDQARLYSCLDHMREVLGDAVPDEILIEAVLKNKFDVQKALSGVLEQDRVQSLKDKNEATVSTGKIAKGPCC

SEQ ID NO: 863736 - protein, 353 aa, Homo sapiens
MTSPCSPPLKPPISPPKTPVPQASSIPSPPLPPSPLDFSALPSPPWSQQTPVPPPLPLPPPPAATGPAPPHVFGLEKSQLLKEAFDKAGPVPKGREDVKRLLKLHKDRFRGDLRWILFCADLPSLIQEGPQCGLVALWMAGTLLSPPSGVPLERLIRVATERGYTAQGEMFSVADMGRLAQEVLGCQAKLLSGGLGGPNRDLVLQHLVTGHPLLIPTSYDEDFNHEPCQRKGHKAHWAVSAGVLLGVRAVPSLGYTEDPELPGLFHPVLGTPCQPPSLPEEGSPGAVYLLSKQGKSWHYQLWDYDQVRESNLQLTDFSPSRATDGRVYVVPVGGVRAGLCGQALLLTPQDCSH

SEQ ID NO: 863737 - protein, 309 aa, Homo sapiens
MTSPCSPPLKPPISPPKTPVPQASSIPSPPLPPSPLDFSALPSPPWSQQTPVPPPLPLPPPPAATGPAPPHVFGLEKSQLLKEAFDKAGPVPKGREDVKRLLKLHKDRFRGDLRWILFCADLPSLIQEGPQCGLVALWMAGTLLSPPSGVPLERLIRVATERGYTAQGEMFSASYDEDFNHEPCQRKGHKAHWAVSAGVLLGVRAVPSLGYTEDPELPGLFHPVLGTPCQPPSLPEEGSPGAVYLLSKQGKSWHYQLWDYDQVRESNLQLTDFSPSRATDGRVYVVPVGGVRAGLCGQALLLTPQDCSH

SEQ ID NO: 863738 - protein, 215 aa, Homo sapiens
MAGTLLSPPSGVPLERLIRVATERGYTAQGEMFSVADMGRLAQEVLGCQAKLLSGGLGGPNRDLVLQHLVTGHPLLIPTSYDEDFNHEPCQRKGHKAHWAVSAGVLLGVRAVPSLGYTEDPELPGLFHPVLGTPCQPPSLPEEGSPGAVYLLSKQGKSWHYQLWDYDQVRESNLQLTDFSPSRATDGRVYVVPVGGVRAGLCGQALLLTPQDCSH

SEQ ID NO: 863739 - protein, 134 aa, Homo sapiens
MTSPCSPPLKPPISPPKTPVPQASSIPSPPLPPSPLDFSALPSPPWSQQTPVPPPLPLPPPPAATGPAPPHVFGLEKSQLLKEAFDKAGPVPKGREDVKRLLKLHKDRFRGDLRWILFCADLPSLIQEGPQYVP

SEQ ID NO: 863740 - protein, 309 aa, Homo sapiens; identical to SEQ ID NO: 863737

SEQ ID NO: 863741 - protein, 195 aa, Homo sapiens
MTSPCSPPLKPPISPPKTPVPQASSIPSPPLPPSPLDFSALPSPPWSQQTPVPPPLPLPPPPAATGPAPPHVFGLEKSQLLKEAFDKAGPVPKGREDVKRLLKLHKDRFRGDLRWILFCADLPSLIQEGPQCGLVALWMAGTLLSPPSGVPLERLIRVATERGYTAQGEMFSAPATTRTSTMSRVRGRATRHTGR

SEQ ID NO: 863742 - protein, 132 aa, Homo sapiens
TVCSNPYPNTTLRFFQVMSHRCLKFDESRTGPSMPLTFSPRALHLNKDHHHPTTLRLRPLNPLGLPSQPCPVCRQTHIPPLLVLQVPPPSPESNHCPLRIPPAQGFLWQSTTLTANTEVCCFFLNFSNIYTT

SEQ ID NO: 863743 - protein, 574 aa, Homo sapiens
KEAASGKSDRRTPESSLHEALDQCMTALDLFLTNQFSEALSYLKPRTKESMYHSLTYATILEMQAMMTFDPQDILLAGNMMKEAQMLCQRHRRKSSVTDSFSSLVNRPTLGQFTEEEIHAEVCYAECLLQRAALTFLQDENMVSFIKGGIKVRNSYQTYKELDSLVQSSQYCKGENHPHFEGGVKLGVGAFNLTLSMLPTRILRLLEFVGFSGNKDYGLLQLEEGASGHSFRSVLCVMLLLCYHTFLTFVLGTGNVNIEEAEKLLKPYLNRYPKGAIFLFFAGRIEVIKGNIDAAIRRFEECCEAQQHWKQFHHMCYWELMWCFTYKGQWKMSYFYADLLSKENCWSKATYIYMKAAYLSMFGKEDHKPFGDDEVELFRAVPGLKLKIAGKSLPTEKFAIRKSRRYFSSNPISLPVPALEMMYIWNGYAVIGKQPKLTDGILEIITKAEEMLEKGPENEYSVDDECLVKLLKGLCLKYLGRVQEAEENFRSISANEKKIKYDHYLIPNALLELALLLMEQDRNEEAIKLLESAKQNYKNYSMESRTHFRIQAATLQAKSSLENSSRSMVSSVSL

SEQ ID NO: 863744 - protein, 425 aa, Homo sapiens
MTSAGGAPGALPAGTPESSLHEALDQCMTALDLFLTNQFSEALSYLKPRTKESMYHSLTYATILEMQAMMTFDPQDILLAGNMMKEAQMLCQRHRRKSSVTDSFSSLVNRPTLGQFTEEEIHAEVCYAECLLQRAALTFLQGSSHGGAVRPRALHDPSHACSCPPGPGRQHLFSCDENMVSFIKGGIKVRNSYQTYKELDSLVQSSQYCKGENHPHFEGGVKLGVGAFNLTLSMLPTRILRLLEFVGFSGNKDYGLLQLEEGASGHSFRSVLCVMLLLCYHTFLTFVLGTGNVNIEEAEKLLKPYLNRYPKGAIFLFFAGRIEVIKGNIDAAIRRFEECCEAQQHWKQFHHMCYWELMWCFTYKGQWKMSYFYADLLSKENCWSKATYIYMKAAYLSMFGKEDHKPFGDDEVELFRWVPHRAPTV

SEQ ID NO: 863745 - protein, 1088 aa, Homo sapiens
MEVSSVALPGDQAEGEFSGSGAGGAGEEEQASTELSTCLAPVMSSTPHPVRRSYYLHWAHEGQLMLSEDCDFPTHMAVGDRHLDLRTVLCDSEASASLLLLESSWGVGACPEPTLLLKVLPQAQLPWPPHPLLITSYSQKGQSLREPFFFFERQGLAMLVRLVLNSWAQAIFPPLPPKVLGFWALGNLFELKVTSKPSCRVRWVAGANHMGKERPGGGTQLLYRGTEGGPGLPAVRKSGSVPRPLCGFGGGQSLSLCNTLLMRTSVKNGGCNPLSSGAPPISNLQNLATTDSTNFYVLGPGPLAIAIGTTCSVQAAPPSARILRGQLLGLTRRPWLSEDERSMQTQACLSADGGPLPESAAAPISLPRLHLFSTDVMTKAYSKLHLWVINIVAPPERAVLRMMIKGQVPRPKKTNLSRSIPLLLVIYSERIQLPSAKSFPEAFAKPPSLPRFASFCNFSHHPDLSPAVSPVEAFVFPPVLAASEAEMARNKVVTVACSGLGKPKELKAAQATKEDRKASEERPLRWVLERKDLGRQSGGSERTPQAKRAAGPKAQKPGRCRGAVCHRVKSLCGRRAGGLHQGGQLLFCPSIAPVHPWRAGASTTLSHSPHPNPGGAVRVSCLWAGGKTLGDEPGEGIMASRAEEQHRQRPGESLRSVGEEMAEDEPEKERLGQVLEDMSGCFGLYPAVGEPWQACGLDRCFRKPTSSCWATPLAGSCSKAGNTSMSRKRPPQGSRPSGETRNTDGQYNTMSGSSKCSEEQARLDAGSDGRGFVRGGRGKPVSEDTRMERRSSTWQSHGRPLGQRELGRAQQGRSVLMCPGNRPEAVVWLECCRCQGNCRRCLLSVMEYNQISRRNCHDLTKKATYIYMKAAYLSMFGKEDHKPFGDDEVELFRAVPGLKLKIAGKSLPTEKFAIRKSRRYFSSNPISLPVPALEMMYIWNGYAVIGKQPKLTDGILEIITKAEEMLEKGPENEYSVDDECLVKLLKGLCLKYLGRVQEAEENFRSISANEKKIKYDHYLIPNALLELALLLMEQDRNEEAIKLLESAKQNYKNYSMESRTHFRIQAATLQAKSSLENSSRSMVSSVSL

SEQ ID NO: 863746 - protein, 1139 aa, Homo sapiens
MADIANQSSAMSLAVTLDTFPAKLQAAVRTDPHWHLLGDLLICIWSLPLLCMEVSSVALPGDQAEGEFSGSGAGGAGEEEQASTELSTCLAPVMSSTPHPVRRSYYLHWAHEGQLMLSEDCDFPTHMAVGDRHLDLRTVLCDSEASASLLLLESSWGVGACPEPTLLLKVLPQAQLPWPPHPLLITSYSQKGQSLREPFFFFERQGLAMLVRLVLNSWAQAIFPPLPPKVLGFWALGNLFELKVTSKPSCRVRWVAGANHMGKERPGGGTQLLYRGTEGGPGLPAVRKSGSVPRPLCGFGGGQSLSLCNTLLMRTSVKNGGCNPLSSGAPPISNLQNLATTDSTNFYVLGPGPLAIAIGTTCSVQAAPPSARILRGQLLGLTRRPWLSEDERSMQTQACLSADGGPLPESAAAPISLPRLHLFSTDVMTKAYSKLHLWVINIVAPPERAVLRMMIKGQVPRPKKTNLSRSIPLLLVIYSERIQLPSAKSFPEAFAKPPSLPRFASFCNFSHHPDLSPAVSPVEAFVFPPVLAASEAEMARNKVVTVACSGLGKPKELKAAQATKEDRKASEERPLRWVLERKDLGRQSGGSERTPQAKRAAGPKAQKPGRCRGAVCHRVKSLCGRRAGGLHQGGQLLFCPSIAPVHPWRAGASTTLSHSPHPNPGGAVRVSCLWAGGKTLGDEPGEGIMASRAEEQHRQRPGESLRSVGEEMAEDEPEKERLGQVLEDMSGCFGLYPAVGEPWQACGLDRCFRKPTSSCWATPLAGSCSKAGNTSMSRKRPPQGSRPSGETRNTDGQYNTMSGSSKCSEEQARLDAGSDGRGFVRGGRGKPVSEDTRMERRSSTWQSHGRPLGQRELGRAQQGRSVLMCPGNRPEAVVWLECCRCQGNCRRCLLSVMEYNQISRRNCHDLTKKATYIYMKAAYLSMFGKEDHKPFGDDEVELFRAVPGLKLKIAGKSLPTEKFAIRKSRRYFSSNPISLPVPALEMMYIWNGYAVIGKQPKLTDGILEIITKAEEMLEKGPENEYSVDDECLVKLLKGLCLKYLGRVQEAEENFRSISANEKKIKYDHYLIPNALLELALLLMEQDRNEEAIKLLESAKQNYKNYSMESRTHFRIQAATLQAKSSLENSSRSMVSSVSL

SEQ ID NO: 863747 - protein, 1139 aa, Homo sapiens; identical to SEQ ID NO: 863746

SEQ ID NO: 863748 - protein, 571 aa, Homo sapiens
GLGEGGGLGEGGGKKGLWDLVAGLHPLGGQQSPMGQKGHKDSLYPCGGTPESSLHEALDQCMTALDLFLTNQFSEALSYLKPRTKESMYHSLTYATILEMQAMMTFDPQDILLAGNMMKEAQMLCQRHRRKSSVTDSFSSLVNRPTLGQFTEEEIHAEVCYAECLLQRAALTFLQDENMVSFIKGGIKVRNSYQTYKELDSLVQSSQYCKGENHPHFEGGVKLGVGAFNLTLSMLPTRILRLLEFVGFSGNKDYGLLQLEEGASGHSFRSVLCVMLLLCYHTFLTFVLGTGNVNIEEAEKLLKPYLNRYPKGAIFLFFAGRIEVIKGNIDAAIRRFEECCEAQQHWKQFHHMCYWELMWCFTYKGQWKMSYFYADLLSKENCWSKATYIYMKAAYLSMFGKEDHKPFGDDEVELFRAVPGLKLKIAGKSLPTEKFAIRKSRRYFSSNPISLPVPALEMMYIWNGYAVIGKQPKLTDGILEIITKAEEMLEKGPENEYSVDDECLVKLLKGLCLKYLGRVQEAEENFRSISANEKKIKYDHYLIPNALLELALLLMEQDRNEEAIKLLESAK

SEQ ID NO: 863749 - protein, 131 aa, Homo sapiens
MNKSVFFPHIPISENEYSVDDECLVKLLKGLCLKYLGRVQEAEENFRSISANEKKIKYDHYLIPNALLELALLLMEQDRNEEAIKLLESAKQNYKNYSMESRTHFRIQAATLQAKSSLENSSRSMVSSVSL

SEQ ID NO: 863750 - protein, 611 aa, Homo sapiens
GLGEGGGLGEGGGKKGLWDLVAGLHPLGGQQSPMGQKGHKDSLYPCGGTPESSLHEALDQCMTALDLFLTNQFSEALSYLKPRTKESMYHSLTYATILEMQAMMTFDPQDILLAGNMMKEAQMLCQRHRRKSSVTDSFSSLVNRPTLGQFTEEEIHAEVCYAECLLQRAALTFLQDENMVSFIKGGIKVRNSYQTYKELDSLVQSSQYCKGENHPHFEGGVKLGVGAFNLTLSMLPTRILRLLEFVGFSGNKDYGLLQLEEGASGHSFRSVLCVMLLLCYHTFLTFVLGTGNVNIEEAEKLLKPYLNRYPKGAIFLFFAGRIEVIKGNIDAAIRRFEECCEAQQHWKQFHHMCYWELMWCFTYKGQWKMSYFYADLLSKENCWSKATYIYMKAAYLSMFGKEDHKPFGDDEVELFRAVPGLKLKIAGKSLPTEKFAIRKSRRYFSSNPISLPVPALEMMYIWNGYAVIGKQPKLTDGILEIITKAEEMLEKGPENEYSVDDECLVKLLKGLCLKYLGRVQEAEENFRSISANEKKIKYDHYLIPNALLELALLLMEQDRNEEAIKLLESAKQNYKNYSMESRTHFRIQAATLQAKSSLENSSRSMVSSVSL

SEQ ID NO: 863751 - protein, 163 aa, Homo sapiens
  misc_feature (8)..(8): Xaa can be any naturally occurring amino acid
  misc_feature (18)..(18): Xaa can be any naturally occurring amino acid
  misc_feature (44)..(44): Xaa can be any naturally occurring amino acid
MWWTASSXAGLTSTPRNXGWLHQCAFNDFNPPCKEQEDGSPQGXLPAGTPESSLHEALDQCMTALDLFLTNQFSEALSYLKPRTKESMYHSLTYATILEMQAMMTFDPQDILLAGNMMKEAQMLCQRHRRKSSVTDSFSSLVNRPTLGQFTEGVASRTSFQPC

SEQ ID NO: 863752 - protein, 466 aa, Homo sapiens
VETPPQGSVHSGHLGSVVGDPHTGTGNAGERGPRGKGARVLALDSGGMDSSPSLPLIRTPESSLHEALDQCMTALDLFLTNQFSEALSYLKPRTKESMYHSLTYATILEMQAMMTFDPQDILLAGNMMKEAQMLCQRHRRKSSVTDSFSSLVNRPTLGQFTEEEIHAEVCYAECLLQRAALTFLQGSSQEGQSGPEPCMIPLTPAAAHLGQAVSIFSSCDENMVSFIKGGIKVRNSYQTYKELDSLVQSSQYCKGENHPHFEGGVKLGVGAFNLTLSMLPTRILRLLEFVGFSGNKDYGLLQLEEGASGHSFRSVLCVMLLLCYHTFLTFVLGTGNVNIEEAEKLLKPYLNRYPKGAIFLFFAGRIEVIKGNIDAVSDGGPGRGWGSLGVSQTSRKSGTCDILRDRIDWGRGGGQERTNQRAGAGEALLAEQPGKTREEEAFVVPGILTGRYRTAALQWREVEGGA

SEQ ID NO: 863753 - protein, 1088 aa, Homo sapiens
MEVSSVALPGDQAEGEFSGSGAGGAGEGSRLLLSSQHVWHLSCPPHHTQGGEVIISIGHMRATDAKLRTVTFPPTWLLVTDTGFEDSPVGLRGLCFSLAPRVLLRSRGLPWAHPAVEGASSGPAPMAPTPPPHHLLLPKRTKPQGTFFLFLETGSCYVGQAVLNSWAQAIFPPLPPKVLGFWALGNLFELKVTSKPSCRVRWVAGANHMGKERPGGGTQLLYRGTEGGPGLPAVRKSGSVPRPLCGFGGGQSLSLCNTLLMRTSVKNGGCNPLSSGAPPISNLQNLATTDSTNFYVLGPGPLAIAIGTTCSVQAAPPSARILRGQLLGLTRRPWLSEDERSMQTQACLSADGGPLPESAAAPISLPRLHLFSTDVMTKAYSKLHLWVINIVAPPERAVLRMMIKGQVPRPKKTNLSRSIPLLLVIYSERIQLPSAKSFPEAFAKPPSLPRFASFCNFSHHPDLSPAVSPVEAFVFPPVLAASEAEMARNKVVTVACSGLGKPKELKAAQATKEDRKASEERPLRWVLERKDLGRQSGGSERTPQAKRAAGPKAQKPGRCRGAVCHRVKSLCGRRAGGLHQGGQLLFCPSIAPVHPWRAGASTTLSHSPHPNPGGAVRVSCLWAGGKTLGDEPGEGIMASRAEEQHRQRPGESLRSVGEEMAEDEPEKERLGQVLEDMSGCFGLYPAVGEPWQACGLDRCFRKPTSSCWATPLAGSCSKAGNTSMSRKRPPQGSRPSGETRNTDGQYNTMSGSSKCSEEQARLDAGSDGRGFVRGGRGKPVSEDTRMERRSSTWQSHGRPLGQRELGRAQQAGVCLMCPGNRPEAVVWLECCRCQGNCRRCLLSVMEYNQISRRNCHDLDLKEATYIYMKAAYLSMFGKEDHKPFGDDEVELFRAVPGLKLKIAGKSLPTEKFAIRKSRRYFSSNPISLPVPALEMMYIWNGYAVIGKQPKLTDGILEIITKAEEMLEKGPENEYSVDDECLVKLLKGLCLKYLGRVQEAEENFRSISANEKKIKYDHYLIPNALLELALLLMEQDRNEEAIKLLESAKQNYKNYSMESRTHFRIQAATLQAKSSLENSSRSMVSSVSL

SEQ ID NO: 863754 - protein, 1139 aa, Homo sapiens
MADIANQSSAMSLAVTLDTFPAKLQAAVRTDPHWHLLGDLLICIWSLPLLCMEVSSVALPGDQAEGEFSGSGAGGAGEGSRLLLSSQHVWHLSCPPHHTQGGEVIISIGHMRATDAKLRTVTFPPTWLLVTDTGFEDSPVGLRGLCFSLAPRVLLRSRGLPWAHPAVEGASSGPAPMAPTPPPHHLLLPKRTKPQGTFFLFLETGSCYVGQAVLNSWAQAIFPPLPPKVLGFWALGNLFELKVTSKPSCRVRWVAGANHMGKERPGGGTQLLYRGTEGGPGLPAVRKSGSVPRPLCGFGGGQSLSLCNTLLMRTSVKNGGCNPLSSGAPPISNLQNLATTDSTNFYVLGPGPLAIAIGTTCSVQAAPPSARILRGQLLGLTRRPWLSEDERSMQTQACLSADGGPLPESAAAPISLPRLHLFSTDVMTKAQSKLHLWVINIVAPPERAVLRMMIKGQVPRPKKTNLSRSIPLLLVIYSERIQLPSAKSFPEAFAKPPSLPRFASFCNFSHHPDLSPAVSPVEAFVFPPVLAASEAEMARNKVVTVACSGLGKPKELKAAQATKEDRKASEERPLRWVLERKDLGRQSGGSERTPQAKRAAGPKAQKPGRCRGAVCHRVKSLCGRRAGGLHQGGQLLFCPSIAPVHPWRAGASTTLSHSPHPNPGGAVRVSCLWAGGKTLGDEPGEGIMASRAEEQHRQRPGESLRSVGEEMAEDEPEKERLGQVLEDMSGCFGLYPAVGEPWQACGLDRCFRKPTSSCWATPLAGSCSKAGNTSMSRKRPPQGSRPSGETRNTDGQYNTMSGSSKCSEEQARLDAGSDGRGFVRGGRGKPVSEDTRMERRSSTWQSHGRPLGQRELGRAQQGRSVLMCPGNRPEAVVWLECCRCQGNCRRCLLSVMEYNQISRRNCHDLDLKKATYIYMKAAYLSMFGKEDHKPFGDDEVELFRAVPGLKLKIAGKSLPTEKFAIRKSRRYFSSNPISLPVPALEMMYIWNGYAVIGKQPKLTDGILEIITKAEEMLEKGPENEYSVDDECLVKLLKGLCLKYLGRVQEAEENFRSISANEKKIKYDHYLIPNALLELALLLMEQDRNEEAIKLLESAKQNYKNYSMESRTHFRIQAATLQAKSSLENSSRSMVSSVSL

SEQ ID NO: 863755 - protein, 221 aa, Homo sapiens
MKAAYLSMFGKEDHKPFGDDEVELFRAVPGLKLKIAGKSLPTEKFAIRKSRRYFSSNPISLPVPALEMMYIWNGYAVIGKQPKLTDGILEIITKAEEMLEKGPENEYSVDDECLVKLLKGLCLKYLGRVQEAEENFRSISANEKKIKYDHYLIPNALLELALLLMEQDRNEEAIKLLESAKQNYKNYSMESRTHFRIQAATLQAKSSLENSSRSMVSSVSL

SEQ ID NO: 863756 - protein, 378 aa, Homo sapiens
MLPTRILRLLEFVGFSGNKDYGLLQLEEGASGHSFRSVLCVMLLLCYHTFLTFVLGTGNVNIEEAEKLLKPYLNRYPKGAIFLFFAGRIEVIKGNIDAAIRRFEECCEAQQHWKQFHHMCYWELMWCFTYKGQWKMSYFYADLLSKENCWSKATYIYMKAAYLSMFGKEDHKPFGDDEVELFRAVPGLKLKIAGKSLPTEKFAIRKSRRYFSSNPISLPVPALEMMYIWNGYAVIGKQPKLTDGILEIITKAEEMLEKGPENEYSVDDECLVKLLKGLCLKYLGRVQEAEENFRSISANEKKIKYDHYLIPNALLELALLLMEQDRNEEAIKLLESAKQNYKNYSMESRTHFRIQAATLQAKSSLENSSRSMVSSVSL

SEQ ID NO: 863757 - protein, 408 aa, Homo sapiens
GLGEGGGLGEGGGKKGLWDLVAGLHPLGGQQSPMGQKGHKDSLYPCGGTPESSLHEALDQCMTALDLFLTNQFSEALSYLKPRTKESMYHSLTYATILEMQAMMTFDPQDILLAGNMMKEAQMLCQRHRRKSSVTDSFSSLVNRPTLGQFTEEEIHAEVCYAECLLQRAALTFLQDENMVSFIKGGIKVRNSYQTYKELDSLVQSSQYCKGENHPHFEGGVKLGVGAFNLTLSMLPTRILRLLEFVGFSGNKDYGLLQLEEGASGHSFRSVLCVMLLLCYHTFLTFVLGTGNVNIEEAEKLLKPYLNRYPKGAIFLFFAGRIEVIKGNIDAVSDGGPGRGWGSLGVSQTSRKSGTCDILRDRIDWGRGGGPRENQPESRGRRGPSGRAAWEDKGGGGICGAWDFDWEI

SEQ ID NO: 863758 - protein, 457 aa, Homo sapiens
MTTDEGAKNNEESPTATVAEQGEDITSKKDRGVLKIVKRVGNGEETPMIGDKVYVHYKGKLSNGKKFDSSHDRNEPFVFSLGKGQVIKAWDIGVATMKKGEICHLLCKPEYAYGSAGSLPKIPSNATLFFEIELLDFKGEDLFEDGGIIRRTKRKGEGYSNPNEGATVEIHLEGRCGGRMFDCRDVAFTVGEGEDHDIPIGIDKALEKMQREEQCILYLGPRYGFGEAGKPKFGIEPNAELIYEVTLKSFEKAKESWEMDTKEKLEQAAIVKEKGTVYFKGGKYMQAVIQYGKIVSWLEMEYGLSEKESKASESFLLAAFLNLAMCYLKLREYTKAVECCDKALGLDSANEKGLYRRGEAQLLMNEFESAKGDFEKVLEVNPQNKAARLQISMCQKKAKEHNERDRRIYANMFKKFAEQDAKEEANKAMGKKTSEGVTNEKGTDSQAMEEEKPEGHV

SEQ ID NO: 863759 - protein, 457 aa, Homo sapiens; identical to SEQ ID NO: 863758

SEQ ID NO: 863760 - protein, 457 aa, Homo sapiens; identical to SEQ ID NO: 863758

SEQ ID NO: 863761 - protein, 457 aa, Homo sapiens; identical to SEQ ID NO: 863758

SEQ ID NO: 863762 - protein, 173 aa, Homo sapiens [sequence omitted]

SEQ ID NO: 863763 - protein, 168 aa, Homo sapiens
MYGKIVSWLEMEYGLSEKESKASESFLLAAFLNLAMCYLKLREYTKAVECCDKALGLDSANEKGLYRRGEAQLLMNEFESAKGDFEKVLEVNPQNKAARLQISMCQKKAKEHNERDRRIYANMFKKFAEQDAKEEANKAMGKKTSEGVTNEKGTDSQAMEEEKPEGHV

SEQ ID NO: 863764 - protein, 457 aa, Homo sapiens; identical to SEQ ID NO: 863758

SEQ ID NO: 863765 - protein, 457 aa, Homo sapiens; identical to SEQ ID NO: 863758

SEQ ID NO: 863766 - protein, 443 aa, Homo sapiens
MTTDEGAKNNEESPTATVAEQGEDITSKKDRGVLKIVKRVGNGEETPMIGDKVYVHYKGKLSNGKKFDSSHDRNEPFVFSLGKGQVIKAWDIGVATMKKGEICHLLCKPEYAYGSAGSLPKIPSNATLFFEIELLDFKGEDLFEDGGIIRRTKRKGEGYSNPNEGATVEIHLEGRCGGRMFDCRDVAFTVGEGEDHDIPIGIDKALEKMQREEQCILYLGPRYGFGEAGKPKFGIEPNAELIYEVTLKSFEKAKESWEMDTKEKLEQAAIVKEKGTVYFKGGKYMQAVIQYGKIVSWLEMEYGLSEKESKASESFLLAAFLNLAMCYLKLREYTKAVECCDKALGLDSANEKGLYRRGEAQLLMNEFESAKGDFEKVLEVNPQNKAARLQISMCQKKAKEHNERDRRIYANMFKKFAEQDAKRVDLLLFAKGESGTLEGSLLW

SEQ ID NO: 863767 - protein, 218 aa, Homo sapiens
MTTDEGAKNNEESPTATVAEQGEDITSKKDRGVLKIVKRVGNGEETPMIGDKVYVHYKGKLSNGKKFDSSHDRNEPFVFSLGKGQVIKAWDIGVATMKKGEICHLLCKPEYAYGSAGSLPKIPSNATLFFEIELLDFKGEDLFEDGGIIRRTKRKGEGYSNPNEGATVEIHLEGRCGGRMFDCRDVAFPPIQAFLIGTVQSKGLVTAFNSFGVFSKLQ

SEQ ID NO: 863768 - protein, 194 aa, Homo sapiens
VYRMPYCLKAKGKWLDVGVHMGSLAVTDPLGTTSVSFSPIIGLPDTCGGIENTYGSAGSLPKIPSNATLFFEIELLDFKGEDLFEDGGIIRRTKRKGEGYSNPNEGATVEIHLEGRCGGRMFDCRDVAFLINTGVYRCHLLEKKQQMAREYREKIERELRDICNDVLSLLEKFLIPNASQAESKVFYLKMTGDT

SEQ ID NO: 863769 - protein, 457 aa, Homo sapiens; identical to SEQ ID NO: 863758

SEQ ID NO: 863770 - protein, 457 aa, Homo sapiens; identical to SEQ ID NO: 863758

SEQ ID NO: 863771 - protein, 387 aa, Homo sapiens
MTTDEGAKNNEESPTATVAEQGEDITSKKDRGVLKIVKRVGNGEETPMIGDKVYVHYKGKLSNGKKFDSSHDRNEPFVFSLGKGQVIKAWDIGVATMKKGEICHLLCKPEYAYGSAGSLPKIPSNATLFFEIELLDFKGEDLFEDGGIIRRTKRKGEGYSNPNEGATVEIHLEGRCGGRMFDCRDVAFTVGEGEDHDIPIGIDKALEKMQREEQCILYLGPRYGFGEAGKPKFGIEPNAELIYEVTLKSFEKAKESWEMDTKEKLEQAAIVKEKGTVYFKGGKYMQAVIQYGKIVSWLEMEYGLSEKESKASESFLLAAFLNLAMCYLKLREYTKAVECCDKALGCLKLVHEQLGFTPPIQAFLIGTVQSKGLVTAFNSFGVFSKLQ

SEQ ID NO: 863772 - protein, 105 aa, Homo sapiens
NKLLPLFATKSYIPHAKTFRGVPKGEIPRCRTAPTLEDLTFSLGRAEARQRQGLRSDNPQPCVCKEPPRGRQPRCRRLDSPTPREPGVGCRDRTLLRGGSLLKRQ

SEQ ID NO: 863773 - protein, 222 aa, Homo sapiens
MGLFGKTQEKPPKELVNEWSLKIRKEMRVVDRQIRDIQREEEKVKRSVKDAAKKGQKDVCIVLAKEMIRSRKAVSKLYASKAHMNSVLMGMKNQLAVLRVAGSLQKSTEVMKAMQSLVKIPEIQATMRELSKEMMKAGIIEEMLEDTFESMDDQEEMEEEAEMEIDRILFEITAGALGKAPSKVTDALPEPEPPGAMAASEDEEEEEEALEAMQSRLATLRS

SEQ ID NO: 863774 - protein, 222 aa, Homo sapiens; identical to SEQ ID NO: 863773

SEQ ID NO: 863775 - protein, 142 aa, Homo sapiens
RGTITSVLFCREPATRKTASWFIIPMSTEVMKAMQSLVKIPEIQATMRELSKEMMKAGIIEEMLEDTFESMDDQEEMEEEAEMEIDRILFEITAGALGKAPSKVTDALPEPEPPGAMAASEDEEEEEEALEAMQSRLATLRS

SEQ ID NO: 863776 - protein, 222 aa, Homo sapiens; identical to SEQ ID NO: 863773

SEQ ID NO: 863777 - protein, 222 aa, Homo sapiens; identical to SEQ ID NO: 863773

SEQ ID NO: 863778 - protein, 222 aa, Homo sapiens; identical to SEQ ID NO: 863773

SEQ ID NO: 863779 - protein, 164 aa, Homo sapiens
MGLFGKTQEKPPKELVNEWSLKIRKEMRVVDRQIRDIQREEEKVKRSVKDAAKKGQKDVCIVLAKEMIRSRKAVSKLYASKAHMNSVLMGMKNQLAVLRVAGSLQKSTEVMKAMQSLVKIPEIQATMRELSKEMMKAGIIEEMLEDTFESMDDQEEMVVLTTEV

SEQ ID NO: 863780 - protein, 125 aa, Homo sapiens
MGLFGKTQEKPPKELVNEWSLKIRKEMRVVDRQIRDIQREEEKVKRSVKDAAKKGQKDVCIVLAKEMIRSRKAVSKLYASKAHMNSVLMGMKNQLETGFYHVAQDGLELLSSSDPLPQSSKVLGL

SEQ ID NO: 863781 - protein, 117 aa, Homo sapiens
MGLFGKTQEKPPKELAGVQWRDLSSLQPPPSSHLPWPPKVLRLQPLPGRHPVWEVRSVSAQPPIVWEVRSASARPPRLGGEERLCPAAPSGRRGAPLPGHPAWEARSTSARPPRLGG

SEQ ID NO: 863782 - protein, 167 aa, Homo sapiens
ELVAQVVCGAGTERKADGYPWLETKPERLSGHEDKGNESCDRQIRDIQREEEKVKRSVKDAAKKGQKDVCIVLAKEMIRSRKAVSKLYASKAHMNSVLMGMKNQLAVLRVAGSLQKSTEVMKAMQSLVKIPEIQATMRELSKEMMKAGIIEEMLRGHEVTGTELNCI

SEQ ID NO: 863783 - protein, 231 aa, Homo sapiens
GAGGRVFRSRLWDARAPGAMALEQVNEWSLKIRKEMRVVDRQIRDIQREEEKVKRSVKDAAKKGQKDVCIVLAKEMIRSRKAVSKLYASKAHMNSVLMGMKNQLAVLRVAGSLQKSTEVMKAMQSLVKIPEIQATMRELSKEMMKAGIIEEMLEDTFESMDDQEEMEEEAEMEIDRILFEITAGALGKAPSKVTDALPEPEPPGAMAASEDEEEEEEALEAMQSRLATLRS

SEQ ID NO: 863784 - protein, 214 aa, Homo sapiens
MLARAEQVNEWSLKIRKEMRVVDRQIRDIQREEEKVKRSVKDAAKKGQKDVCIVLAKEMIRSRKAVSKLYASKAHMNSVLMGMKNQLAVLRVAGSLQKSTEVMKAMQSLVKIPEIQATMRELSKEMMKAGIIEEMLEDTFESMDDQEEMEEEAEMEIDRILFEITAGALGKAPSKVTDALPEPEPPGAMAASEDEEEEEEALEAMQSRLATLRS

SEQ ID NO: 863785 - protein, 246 aa, Homo sapiens
EALCQTARALNDGQYYNGPAQAAARDLPGRGELKAGRGKTGSVRHGAVWKDPGEAAQRTDIQREEEKVKRSVKDAAKKGQKDVCIVLAKEMIRSRKAVSKLYASKAHMNSVLMGMKNQLAVLRVAGSLQKSTEVMKAMQSLVKIPEIQATMRELSKEMMKAGIIEEMLEDTFESMDDQEEMEEEAEMEIDRILFEITAGALGKAPSKVTDALPEPEPPGAMAASEDEEEEEEALEAMQSRLATLRS

SEQ ID NO: 863786 - protein, 186 aa, Homo sapiens
EALCQTARALNDGQYYNGPAQAAARDLPGRGELKAGRGKTGSVRHGAVWKDPGEAAQRTAVLRVAGSLQKSTEVMKAMQSLVKIPEIQATMRELSKEMMKAGIIEEMLEDTFESMDDQEEMEEEAEMEIDRILFEITAGALGKAPSKVTDALPEPEPPGAMAASEDEEEEEEALEAMQSRLATLRS

SEQ ID NO: 863787 - protein, 112 aa, Homo sapiens
MKAMQSLVKIPEIQATMRELSKEMMKAGIIEEMLEDTFESMDDQEEMEEEAEMEIDRILFEITAGALGKAPSKVTDALPEPEPPGAMAASEDEEEEEEALEAMQSRLATLRS

SEQ ID NO: 863788 - protein, 105 aa, Homo sapiens
RLGRGGVNRTRELSKEMMKAGIIEEMLEDTFESMDDQEEMEEEAEMEIDRILFEITAGALGKAPSKVTDALPEPEPPGAMAASEDEEEEEEALEAMQSRLATLRS

SEQ ID NO: 863789 - protein, 222 aa, Homo sapiens; identical to SEQ ID NO: 863773

SEQ ID NO: 863790 - protein, 227 aa, Homo sapiens
MGLFGKTQEKPPKELVNEWSLKIRKEMRVVDRQIRDIQREEEKVKRSVKDAAKKGQKDVCIVLAKEMIRSRKAVSKLYASKAHMNSVLMGMKNQLAVLRVAGSLQKSTEVMKAMQSLVKIPEIQATMRELSKEMMKAGIIEEMLEDTFESMDDQEEMEEEAEMEIDRILFEITAGALGKAPSKVTDALPEPEPPGAMAASEDEEEEEEALEAMQSRLASRVGVLPWV

SEQ ID NO: 863791 - protein, 157 aa, Homo sapiens
MGLFGKTQEKPPKELVNEWSLKIRKEMRVVDRQIRDIQREEEKVKRSVKDAAKKGQKDVCIVLAKEMIRSRKAVSKLYASKAHMNSVLMGMKNQLAVLRVAGSLQKSTEVMKAMQSLVKIPEIQATMRELSKEMMKAGIIEEMLRGHEVTGTELNCI

SEQ ID NO: 863792 - protein, 63 aa, Homo sapiens
GHRQQFSVCAYSTCCLCWVSEHRLPLPLNQQKGPPLRTSPAAHSPPNFAGIASGRLFRRPNEH

SEQ ID NO: 863793 - protein, 291 aa, Homo sapiens
MASPPESDGFSDVRKVGYLRKPKSMHKRFFVLRAASEAGGPARLEYYENEKKWRHKSSAPKRSIPLESCFNINKRADSKNKHLVALYTRDEHFAIAADSEAEQDSWYQALLQLHNRAKGHHDGAAALGAGGGGGSCSGSSGLGEAGEDLSYGDVPPGPAFKEVWQVILKPKGLGQTKNLIGIYRLCLTSKTISFVKLNSEAAAVVLQLMNIRRCGHSENFFFIEVGRSAVTGPGEFWMQVDDSVVAQNMHETILEAMRAMSDEFRPRSKSQSSSNCSNPISVPLANAHTSC

SEQ ID NO: 863794 - protein, 1242 aa, Homo sapiens
MASPPESDGFSDVRKVGYLRKPKSMHKRFFVLRAASEAGGPARLEYYENEKKWRHKSSAPKRSIPLESCFNINKRADSKNKHLVALYTRDEHFAIAADSEAEQDSWYQALLQLHNRAKGHHDGAAALGAGGGGGSCSGSSGLGEAGEDLSYGDVPPGPAFKEVWQVILKPKGLGQTKNLIGIYRLCLTSKTISFVKLNSEAAAVVLQLMNIRRCGHSENFFFIEVGRSAVTGPGEFWMQVDDSVVAQNMHETILEAMRAMSDEFRPRSKSQSSSNCSNPISVPLRRHHLNNPPPSQVGLTRRSRTESITATSPASMVGGKPGSFRVRASSDGEGTMSRPASVDGSPVSPSTNRTHAHRHRGSARLHPPLNHSRSIPMPASRCSPSATSPVSLSSSSTSGHGSTSDCLFPRRSSASVSGSPSDGGFISSDEYGSSPCDFRSSFRSVTPDSLGHTPPARGEEELSNYICMGGKGPSTLTAPNGHYILSRGGNGHRCTPGTGLGTSPALAGDEAASAADLDNRFRKRTHSAGTSPTITHQKTPSQSSVASIEEYTEMMPAYPPGGGSGGRLPGHRHSAFVPTRSYPEEGLEMHPLERRGGHHRPDSSTLHTDDGYMPMSPGVAPVPSGRKGSGDYMPMSPKSVSAPQQIINPIRRHPQRVDPNGYMMMSPSGGCSPDIGGGPSSSSSSSNAVPSGTSYGKLWTNGVGGHHSHVLPHPKPPVESSGGKLLPCTGDYMNMSPVGDSNTSSPSDCYYGPEDPQHKPVLSYYSLPRSFKHTQRPGEPEEGARHQHLRLSTSSGRLLYAATADDSSSSTSSDSLGGGYCGARLEPSLPHPHHQVLQPHLPRKVDTAAQTNSRLARPTRLSLGDPKASTLPRAREQQQQQQPLLHPPEPKSPGEYVNIEFGSDQSGYLSGPVAFHSSPSVRCPSQLQPAPREEETGTEEYMKMDLGPGRRAAWQESTGVEMGRLGPAPPGAASICRPTRAVPSSRGDYMTMQMSCPRQSYVDTSPAAPVSYADMRTGIAAEEVSLPRATMAAASSSSAASASPTGPQGAAELAAHSSLLGGPQGPGGMSAFTRVNLSPNRNQSAKVIRADPQGCRRRHSSETFSSTPSATRVGNTVPFGAGAAVGGGGGSSSSSEDVKRHSSASFENVWLRPGELGGAPKEPAKLCGAAGGLENGLNYIDLDLVKDFKQCPQECTPEPQPPPPPPPHQPLGSGESSSTRRSSEDLSAYASISFQKQPEDRQ

SEQ ID NO: 863795 - protein, 1242 aa, Homo sapiens; identical to SEQ ID NO: 863794

SEQ ID NO: 863796 - protein, 1242 aa, Homo sapiens; identical to SEQ ID NO: 863794

SEQ ID NO: 863797 - protein, 1242 aa, Homo sapiens; identical to SEQ ID NO: 863794

SEQ ID NO: 863798 - protein, 1242 aa, Homo sapiens; identical to SEQ ID NO: 863794

SEQ ID NO: 863799 - protein, 1242 aa, Homo sapiens; identical to SEQ ID NO: 863794

SEQ ID NO: 863800 - protein, 540 aa, Homo sapiens
MALARPVRLFSLVTRLLLAPRRGLTVRSPDEPLPVVRIPVALQRQLEQRQSRRRNLPRPVLVRPGPLLVSARRPELNQPARLTLGRWERAPLASQGWKSRRARRDHFSIERAQQEAPAVRKLSSKGSFADLGLEPRVLHALQEAAPEVVQPTTVQSSTIPSLLRGRHVVCAAETGSGKTLSYLLPLLQRLLGQPSLDSLPIPAPRGLVLVPSRELAQQVRAVAQPLGRSLGLLVRDLEGGHGMRRIRLQLSRQPSADVLVATPGALWKALKSRLISLEQLSFLVLDEADTLLDESFLELVDYILEKSHIAEGPADLEDPFNPKAQLVLVGATFPEGVGQLLNKVASPDAVTTITSSKLHCIMPHVKQTFLRLKGADKVAELVHILKHRDRAERTGPSGTVLVFCNSSSTVNWLGYILDDHKIQHLRLQGQMPALMRVGIFQSFQKSSRDILLCTDIASRGLDSTGVELVVNYDFPPTLQDYIHRAGRVGRVGSEVPGTVISFVTHPWDVSLVQKIELAARRRRSLPGLASSVKEPLPQAT

SEQ ID NO: 863801 - protein, 540 aa, Homo sapiens; identical to SEQ ID NO: 863800

SEQ ID NO: 863802 - protein, 553 aa, Homo sapiens
  misc_feature (5)..(5): Xaa can be any naturally occurring amino acid
TCVQXPGLLRGWVAPLARPVRLFSLVTRLLLAPRRGLTVRSPDEPLPVVRIPVALQRQLEQRQSRRRNLPRPVLVRPGPLLVSARRPELNQPARLTLGRWERAPLASQGWKSRRARRDHFSIERAQQEAPAVRKLSSKGSFADLGLEPRVLHALQEAAPEVVQPTTVQSSTIPSLLRGRHVVCAAETGSGKTLSYLLPLLQRLLGQPSLDSLPIPAPRGLVLVPSRELAQQVRAVAQPLGRSLGLLVRDLEGGHGMRRIRLQLSRQPSADVLVATPGALWKALKSRLISLEQLSFLVLDEADTLLDESFLELVDYILEKSHIAEGPADLEDPFNPKAQLVLVGATFPEGVGQLLNKVASPDAVTTITSSKLHCIMPHVKQTFLRLKGADKVAELVHILKHRDRAERTGPSGTVLVFCNSSSTVNWLGYILDDHKIQHLRLQGQMPALMRVGIFQSFQKSSRDILLCTDIASRGLDSTGVELVVNYDFPPTLQDYIHRAGRVGRVGSEVPGTVISFVTHPWDVSLVQKIELAARRRRSLPGLASSVKEPLPQAT

SEQ ID NO: 863803 - protein, 540 aa, Homo sapiens; identical to SEQ ID NO: 863800

SEQ ID NO: 863804 - protein, 540 aa, Homo sapiens; identical to SEQ ID NO: 863800

SEQ ID NO: 863805 - protein, 480 aa, Homo sapiens
MALARPVRLFSLVTRLLLAPRRGLTVRSPDEPLPVVRIPVALQRQLEQRQSRRRNLPRPVLVRPGPLLVSARRPELNQPARLTLGRWERAPLASQGWKSRRARRDHFSIERAQQEAPAVRKLSSKGSFADLGLEPRVLHALQEAAPEVVQPTTVQSSTIPSLLRGRHVVCAAETGSGKTLSYLLPLLQRLLGQPSLDSLPIPAPRGLVLVPSRELAQQVRAVAQPLGRSLGLLVRDLEGGHGMRRIRLQLSRQPSADVLVATPGALWKALKSRLISLEQLSFLVLDEADTLLDESFLELVDYILEKSHIAEGPADLEDPFNPKAQLVLVGATFPEGVGQLLNKVASPDAVTTITSSKLHCIMPHVKQTFLRLKGADKVAELVHILKHRDRAERTGPSGTVLVFCNSSSTVNWLGYILDDHKIQHLRLQGQMPALMRVGIFQSFQKSSRDILLCTDIASRGLDSTGVELVVNYDFPPTLQD

SEQ ID NO: 863806 - protein, 328 aa, Homo sapiens
MALARPVRLFSLVTRLLLAPRRGLTVRSPDEPLPVVRIPVALQRQLEQRQSRRRNLPRPVLVRPGPLLVSARRPELNQPARLTLGRWERAPLASQGWKSRRARRDHFSIERAQQEAPAVRKLSSKGSFADLGLEPRVLHALQEAAPEVVQPTTVQSSTIPSLLRGRHVVCAAETGSGKTLSYLLPLLQRLLGQPSLDSLPIPAPRGLVLVPSRELAQQVRAVAQPLGRSLGLLVRDLEGGHGMRRIRLQLSRQPSADVLVATPGALWKALKSRLISLEQLSFLVLDEADTLLDESFLELVDYILEKSHIAEGPAELEKKLLSMAFCSL

SEQ ID NO: 863807 - protein, 295 aa, Homo sapiens
ARRRQHWRGPFLPPTPGSSLRSHSVPVNMAAPVVTAPGRALLRAGAGRLLRGGVQELLRPRHEGNAPDLACNFSLSQNRGTVIVERWWKVPLAGEGRKPRLHRRHRVYKLVEDTKHRPKENLELILTQSVENVGVRGDLVSVKKSLGRNRLLPQGLAVYASPENKKLFEEEKLLRQEGKLEKIQTKAGEATVKFLKSCRLEVGMKNNVKWELNPEIVARHFFKNLGVVVAPHTLKLPAEPITRWGEYWCEVTVNGLDTVRVPMSVVNFEKPKTKRYKYWLAQQAAKAMAPTSPQI

SEQ ID NO: 863808 - protein, 282 aa, Homo sapiens
RLGTRLGLNRPRTVNMAAPVVTAPGRALLRAGAGRLLRGGVQELLRPRHEGNAPDLACNFSLSQNRGTVIVERWWKVPLAGEGRKPRLHRRHRVYKLVEDTKHRPKENLELILTQSVENVGVRGDLVSVKKSLGRNRLLPQGLAVYASPENKKLFEEEKLLRQEGKLEKIQTKAGEATVKFLKSCRLEVGMKNNVKWELNPEIVARHFFKNLGVVVAPHTLKLPAEPITRWGEYWCEVTVNGLDTVRVPMSVVNFEKPKTKRYKYWLAQQAAKAMAPTSPQI

SEQ ID NO: 863809 - protein, 294 aa, Homo sapiens
ARRRQHWRGPFLPPTPGSSLRSHSVPVNMAAPVVTAPGRALLRAGAGRLLRGGVQELLRPRHEGNAPDLACNFSLSQNRGTVIVERWWKVPLAGEGRKPRLHRRHRVYKLVEDTKHRPKENLELILTQSVENVGVRGDLVSVKKSLGRNRLLPQGLAVYASPENKKLFEEEKLLRQEGKLEKIQTKAGEATVKFLKSCRLEVGMKNNVKWELNPEIVARHFFKNLGVVVAPHTLKLPAEPITRWGEYWCEVTQQSRIGSSGAEMCKHPDLTPSSDQIQNFREHLKTSDCTAYTC

SEQ ID NO: 863810 - protein, 301 aa, Homo sapiens
RLGTRLGLNRPRTVNMAAPVVTAPGRALLRAGAGRLLRGGVQELLRPRHEGNAPDLACNFSLSQNRGTVIVERWWKVPLAGEGRKPRLHRRHRVYKLVEDTKHRPKENLELILTQSVENVGVRGDLVSVKKSLGRNRLLPQGLAVYASPENKKLFEEEKLLRQEGKLEKIQTKAGEADCRPKSGRKGKCCGCPTKQTVKFLKSCRLEVGMKNNVKWELNPEIVARHFFKNLGVVVAPHTLKLPAEPITRWGEYWCEVTVNGLDTVRVPMSVVNFEKPKTKRYKYWLAQQAAKAMAPTSPQI

SEQ ID NO: 863811 - protein, 248 aa, Homo sapiens
RLGTRLGLNRPRTVNMAAPVVTAPGRALLRAGAGRLLRGGVQELLRPRHEGNAPDLACNFSLSQNRGTVIVERWWKVPLAGEGRKPRLHRRHRVYKLVEDTKHRPKENLELILTQSVENVGVRGDLVSVKKSLGRNRLLPQGLAVYASPENKKLFEEEKLLRQEGKLEKIQTKAGEALGVVVAPHTLKLPAEPITRWGEYWCEVTVNGLDTVRVPMSVVNFEKPKTKRYKYWLAQQAAKAMAPTSPQI

SEQ ID NO: 863812 - protein, 129 aa, Homo sapiens
CRLAVRYHGAVMLRHEVIVADVDETVKFLKSCRLEVGMKNNVKWELNPEIVARHFFKNLGVVVAPHTLKLPAEPITRWGEYWCEVTVNGLDTVRVPMSVVNFEKPKTKRYKYWLAQQAAKAMAPTSPQI

SEQ ID NO: 863813 - protein, 138 aa, Homo sapiens
RLGTRLGLNRPRTVNMAAPVVTAPGRALLRAGAGRLLRGGVQELLRPRHEGNAPDLACNFSLSQNRGTVIVERWWKVPLAGEGRKPRLHRRHRVYKLVEDTKHRPKENLELILTQSVESKARAEALPLRLVRFGISFF

SEQ ID NO: 863814 - protein, 172 aa, Homo sapiens
RLGTRLGLNRPRTVNMAAPVVTAPGRALLRAGAGRLLRGGVQELLRPRHEGNAPDLACNFSLSQNRGTVIVERWWKVPLAGEGRKPRLHRRHRVYKLVEDTKHRPKENLELILTQSVENVGVRGDLVSVKKSLGRNRLLPQGLAVYASPENKKLFEEEKLVSSKEGQRDLGR

SEQ ID NO: 863815 - protein, 282 aa, Homo sapiens; identical to SEQ ID NO: 863808

SEQ ID NO: 863816 - protein, 282 aa, Homo sapiens; identical to SEQ ID NO: 863808

SEQ ID NO: 863817 - protein, 235 aa, Homo sapiens
HLCAHPTCVLIPLCAPVCYGTVIVERWWKVPLAGEGRKPRLHRRHRVYKLVEDTKHRPKENLELILTQSVENVGVRGDLVSVKKSLGRNRLLPQGLAVYASPENKKLFEEEKLLRQEGKLEKIQTKAGEATVKFLKSCRLEVGMKNNVKWELNPEIVARHFFKNLGVVVAPHTLKLPAEPITRWGEYWCEVTVNGLDTVRVPMSVVNFEKPKTKRYKYWLAQQAAKAMAPTSPQI

SEQ ID NO: 863818 - protein, 136 aa, Homo sapiens
RLGTRLGLNRPRTVNMAAPVVTAPGRALLRAGAGRLLRGGVQELLRPRHEGNAPDLACNFSLSQNRGTVIVERWWKVPLAGEGRKPRLHRRHRVYKLVEDTKHRPKENLELILTQSVESKARAEALPLRLVCWSPG

SEQ ID NO: 863819 - protein, 136 aa, Homo sapiens; identical to SEQ ID NO: 863818

SEQ ID NO: 863820 - protein, 220 aa, Homo sapiens
RLGTRLGLNRPRTVNMAAPVVTAPGRALLRAGAGRLLRGGVQELLRPRHEGNAPDLACNFSLSQNRGTVIVERWWKVPLAGEGRKPRLHRRHRVYKLVEDTKHRPKENLELILTQSVENVGVRGDLVSVKKSLGRNRLLPQGLAVYASPENKKLFEEEKLLRQEGKLEKIQTKAGEAVNGLDTVRVPMSVVNFEKPKTKRYKYWLAQQAAKAMAPTSPQI

SEQ ID NO: 863821 - protein, 182 aa, Homo sapiens
RLGTRLGLNRPRTVNMAAPVVTAPGRALLRAGAGRLLRGGVQELLRPRHEGNAPDLACNFSLSQNRGTVIVERWWKVPLAGEGRKPRLHRRHRVYKLVEDTKHRPKENLELILTQSVENVGVRGDLVSVKKSLGRNRLLPQGLAVYASPENKKLFEEEKLLRQEGKLEKTQHSVLRGPSLLL

SEQ ID NO: 863822 - protein, 285 aa, Homo sapiens
PEPASANDPGAAPFHSGNLQRSLRKDTAGCFSQRRSRAMLVLRSALTRALASRTLAPQMCSSFATGPRQYDGIFYEFRSYYLKPSKMNEFLENFEKNAHLRTAHSELVGYWSVEFGGRMNTVFHIWKYDNFAHRTEVRKALAKDKEWQEQFLIPNLALIDKQESEITYLVPWCKLEKPPKEGVYELATFQMKPGGPALWGDAFKRAVHAHVNLGYTKLVGVFHTEYGALNRVHVLWWNESADSRAAGRHKSHEDPRVVAAVRESVNYLVSQQNMLLIPTSFSPLK

SEQ ID NO: 863823 - protein, 285 aa, Homo sapiens; identical to SEQ ID NO: 863822

SEQ ID NO: 863824 - protein, 235 aa, Homo sapiens
PEPASANDPGAAPFHSGNLQRSLRKDTAGCFSQRRSRAMLVLRSALTRALASRTLAPQMCSSFATGPRQYDGIFYEFRSYYLKPSKMNEFLENFEKNAHLRTAHSELVGYWSVEFGGRMNTVFHIWKYDNFAHRAEVRKALANCKEWQEQSIIPNLARIDKQETEITYLIPWSKLEKPPKEVHVLWWNESADSRAAGRHKSHEDPRVVAAVRESVNYLVSQQNMLLIPASFSPLK

SEQ ID NO: 863825 - protein, 227 aa, Homo sapiens
MCSSFATGPRQYDGIFYEFRSYYLKPSKMNEFLENFEKNAHLRTAHSELVGYWSVEFGGRMNTVFHIWKYDNFAHRTEVRKALAKDKEWQEQFLIPNLALIDKQESEITYLVPWCKLEKPPKEGVYELATFQMKPGGPALWGDAFKRAVHAHVNLGYTKLVGVFHTEYGALNRVHVLWWNESADSRAAGRHKSHEDPRVVAAVRESVNYLVSQQNMLLIPTSFSPLK

SEQ ID NO: 863826 - protein, 285 aa, Homo sapiens; identical to SEQ ID NO: 863822

SEQ ID NO: 863827 - protein, 265 aa, Homo sapiens
PEPASANDPGAAPFHSGNLQRSLRKDTAGCFSQRRSRAMLVLRSALTRALASRTLAPQMCSSFATGPRQYDGIFYEFRSYYLKPSKMNEFLENFEKNAHLRTAHSELVGYWSVEFGGRMNTVFHIWKYDNFAHRTEVRKALAKDKEWQEQFLIPNLALIDKQESEITYLVPWCKLEKPPKEGVYELATFQMKPGGPALWGDAFKRAVHAHVNLGYTKLVGVFHTEYGALNRVHVLWWNESADSRAAGRHKSHEDPRVVAAGKLFD

SEQ ID NO: 863828 - protein, 494 aa, Homo sapiens
SFAWAPDGLPERVRGQLPVWVTSGGRSRGTARDAQAGTMADGGSERADGRIVKMEVDYSATVDQRLPECAKLAKEGRLQEVIETLLSLEKQTRTASDMVSTSRILVAVVKMCYEAKEWDLLNENIMLLSKRRSQLKQAVAKMVQQCCTYVEEITDLPIKLRLIDTLRMVTEGKIYVEIERARLTKTLATIKEQNGDVKEAASILQELQVETYGSMEKKERVEFILEQMRLCLAVKDYIRTQIISKKINTKFFQEENTEKLKLKYYNLMIQLDQHEGSYLSICKHYRAIYDTPCIQAESEKWQQALKSVVLYVILAPFDNEQSDLVHRISGDKKLEEIPKYKDLLKLFTTMELMRWSTLVEDYGMELRKGSLESPATDVFGSTEEGEKRWKDLKNRVVEHNIRIMAKYYTRITMKRMAQLLDLSVDESEAFLSNLVVNKTIFAKVDRLAGIINFQRPKDPNNLLNDWSQKLNSLMSLVNKTTHLIAKEEMIHNLQ

SEQ ID NO: 863829 - protein, 140 aa, Homo sapiens
SFAWAPDGLPERVRGQLPVWVTSGGRSRGTARDAQAGTMADGGSERADGRIVKMEVDYSATVDQRLPECAKLAKEGRLQEVIETLLSLEKQTRTASDMVSTSRILVAVVKMCYEAKEWDLLNENIMLLSKRRSQLKQVSS

SEQ ID NO: 863830 - protein, 203 aa, Homo sapiens
GCSRGSLIGRRQALKSVVLYVILAPFDNEQSDLVHRISGDKKLEEIPKYKDLLKLFTTMELMRWSTLVEDYGMELRKGSLESPATDVFGSTEEGEKRWKDLKNRVVEHNIRIMAKYYTRITMKRMAQLLDLSVDESEAFLSNLVVNKTIFAKVDRLAGIINFQRPKDPNNLLNDWSQKLNSLMSLVNKTTHLIAKEEMIHNLQ

SEQ ID NO: 863831 - protein, 504 aa, Homo sapiens
SFAWAPDGLPERVRGQLPVWVTSGGRSRGTARDAQAGTMADGGSERADGRIVKMEVDYSATVDQRLPECAKLAKEGRLQEVIETLLSLEKQTRTASDMVSTSRILVAVVKMCYEAKEWDLLNENIMLLSKRRSQLKQAVAKMVQQCCTYVEEITDLPIKLRLIDTLRMVTEGKIYVEIERARLTKTLATIKEQNGDVKEAASILQELQVETYGSMEKKERVEFILEQMRLCLAVKDYIRTQIISKKINTKFFQEENTEKLKLKYYNLMIQLDQHEGSYLSICKHYRAIYDTPCIQAESEKWQQALKSVVLYVILAPFDNEQSDLVHRISGDKKLEEIPKYKFGILRCIHFQDLLKLFTTMELMRWSTLVEDYGMELRKGSLESPATDVFGSTEEGEKRWKDLKNRVVEHNIRIMAKYYTRITMKRMAQLLDLSVDESEAFLSNLVVNKTIFAKVDRLAGIINFQRPKDPNNLLNDWSQKLNSLMSLVNKTTHLIAKEEMIHNLQ

SEQ ID NO: 863832 - protein, 430 aa, Homo sapiens
SSVPPDISGQEGRLQEVIETLLSLEKQTRTASDMVSTSRILVAVVKMCYEAKEWDLLNENIMLLSKRRSQLKQAVAKMVQQCCTYVEEITDLPIKLRLIDTLRMVTEGKIYVEIERARLTKTLATIKEQNGDVKEAASILQELQVETYGSMEKKERVEFILEQMRLCLAVKDYIRTQIISKKINTKFFQEENTEKLKLKYYNLMIQLDQHEGSYLSICKHYRAIYDTPCIQAESEKWQQALKSVVLYVILAPFDNEQSDLVHRISGDKKLEEIPKYKDLLKLFTTMELMRWSTLVEDYGMELRKGSLESPATDVFGSTEEGEKRWKDLKNRVVEHNIRIMAKYYTRITMKRMAQLLDLSVDESEAFLSNLVVNKTIFAKVDRLAGIINFQRPKDPNNLLNDWSQKLNSLMSLVNKTTHLIAKEEMIHNLQ

SEQ ID NO: 863833 - protein, 42 aa, Homo sapiens
LQSEREQGQCQLRAQQELLQSLQREKQGLEQATTDLRLTILE

SEQ ID NO: 863834 - protein, 382 aa, Homo sapiens
MDGETAEEQGGPVPPPVAPGGPGLGGAPGGRREPKKYAVTDDYQLSKQVLGLGVNGKVLECFHRRTGQKCALKLLYDSPKARQEVDHHWQASGGPHIVCILDVYENMHHGKRCLLIIMECMEGGELFSRIQERGDQAFTEREAAEIMRDIGTAIQFLHSHNIAHRDVKPENLLYTSKEKDAVLKLTDFGFAKETTQNALQTPCYTPYYVAPEVLGPEKYDKSCDMWSLGVIMYILLCGFPPFYSNTGQAISPGMKRRIRLGQYGFPNPEWSEVSEDAKQLIRLLLKTDPTERLTITQFMNHPWINQSMVVPQTPLHTARVLQEDKDHWDEVKEEMTSALATMRVDYDQVKIKDLKTSNNRLLNKRRKKQAGSSSASQGCNNQ

SEQ ID NO: 863835 - protein, 382 aa, Homo sapiens; identical to SEQ ID NO: 863834

SEQ ID NO: 863836 - protein, 382 aa, Homo sapiens; identical to SEQ ID NO: 863834

SEQ ID NO: 863837 - protein, 382 aa, Homo sapiens; identical to SEQ ID NO: 863834

SEQ ID NO: 863838 - protein, 382 aa, Homo sapiens; identical to SEQ ID NO: 863834

SEQ ID NO: 863839 - protein, 355 aa, Homo sapiens
MDGETAEEQGGPVPPPVAPGGPGLGGAPGGRREPKKYAVTDDYQLSKQVLGLGVNGKVLECFHRRTGQKCALKLLYDSPKARQEVDHHWQASGGPHIVCILDVYENMHHGKRCLLIIMECMEGGELFSRIQERGDQAFTEREAAEIMRDIGTAIQFLHSHNIAHRDVKPENLLYTSKEKDAVLKLTDFGFAKETTQNALQTPCYTPYYVAPEVLGPEKYDKSCDMWSLGVIMYILLCGFPPFYSNTGQAISPGMKRRIRLGQYGFPNPEWSEVSEDAKQLIRLLLKTDPTERLTITQFMNHPWINEEMTSALATMRVDYDQVKIKDLKTSNNRLLNKRRKKQAGSSSASQGCNNQ

SEQ ID NO: 863840 - protein, 268 aa, Homo sapiens
VIADSRGYTRGEFSRIQERGDQAFTEREAAEIMRDIGTAIQFLHSHNIAHRDVKPENLLYTSKEKDAVLKLTDFGFAKETTQNALQTPCYTPYYVAPEVLGPEKYDKSCDMWSLGVIMYILLCGFPPFYSNTGQAISPGMKRRIRLGQYGFPNPEWSEVSEDAKQLIRLLLKTDPTERLTITQFMNHPWINQSMVVPQTPLHTARVLQEDKDHWDEVKEEMTSALATMRVDYDQVKIKDLKTSNNRLLNKRRKKQAGSSSASQGCNNQ

SEQ ID NO: 863841 - protein, 191 aa, Homo sapiens
GLGRSVCCSLCSQPAYYVAPEVLGPEKYDKSCDMWSLGVIMYILLCGFPPFYSNTGQAISPGMKRRIRLGQYGFPNPEWSEVSEDAKQLIRLLLKTDPTERLTITQFMNHPWINQSMVVPQTPLHTARVLQEDKDHWDEVKEEMTSALATMRVDYDQVKIKDLKTSNNRLLNKRRKKQAGSSSASQGCNNQ

SEQ ID NO: 863842 - protein, 279 aa, Homo sapiens
MDGETAEEQGGPVPPPVAPGGPGLGGAPGGRREPKKYAVTDDYQLSKQVLGLGVNGKVLECFHRRTGQKCALKLLYDSPKARQEVDHHWQASGGPHIVCILDVYENMHHGKRCLLIIMECMEGGELFSRIQERGDQAFTEREAAEIMRDIGTAIQFLHSHNIAHRDVKPENLLYTSKEKDAVLKLTDFGFAKETTQNALQTPCYTPYYVAPEVLGPEKYDKSCDMWSLGVIMYILLCGFPPFYSNTGQAISPGMKRRIRLGQYGFPNPEWSEVSEDVPE

SEQ ID NO: 863843 - protein, 299 aa, Homo sapiens
MDGETAEEQGGPVPPPVAPGGPGLGGAPGGRREPKKYAVTDDYQLSKQVLGLGVNGKVLECFHRRTGQKCALKLLYDSPKARQEVDHHWQASGGPHIVCILDVYENMHHGKRCLLIIMECMEGGELFSRIQERGDQAFTEREAAEIMRDIGTAIQFLHSHNIAHRDVKPENLLYTSKEKDAVLKLTDFGFAKETTQNALQTPCYTPYYVAPEVLGPEKYDKSCDMWSLGVIMYILLCGFPPFYSNTGQAISPGMKRRIRLGQYGFPNPEWSEVSEDASRAVVDVLRSGLRGTLAECRRR

SEQ ID NO: 863844 - protein, 294 aa, Homo sapiens
MDGETAEEQGGPVPPPVAPGGPGLGGAPGGRREPKKYAVTDDYQLSKQVLGLGVNGKVLECFHRRTGQKCALKLLYDSPKARQEVDHHWQASGGPHIVCILDVYENMHHGKRCLLIIMECMEGGELFSRIQERGDQAFTEREAAEIMRDIGTAIQFLHSHNIAHRDVKPENLLYTSKEKDAVLKLTDFGFAKETTQNALQTPCYTPYYVAPEVLGPEKYDKSCDMWSLGVIMYILLCGFPPFYSNTGQAISPGMKRRIRLGQYGLTNSMIAMSSLSNPNHVLQLHRSENTRQAE

SEQ ID NO: 863845 - protein, 407 aa, Homo sapiens
MDGETAEEQGGPVPPPVAPGGPGLGGAPGGRREPKKYAVTDDYQLSKQVLGLGVNGKVLECFHRRTGQKCALKLLYDSPKARQEVDHHWQASGGPHIVCILDVYENMHHGKRCLLIIMECMEGGELFSRIQERGDQAFTEREAAEIMRDIGTAIQFLHSHNIAHRDVKPENLLYTSKEKDAVLKLTDSGYCIRQTQPKMTPARTTLEILPKLIVEPPEEGSMEEPTAKVYDKGNWGPLVRHLRASKQLDTLPSYRWHTHSILIPTKGTQGRLTREMKTQDYRPRGQQRELAQDSTVRTTASQKRPHRQTRKNRVRNEEQQNKYEKYKRNRDSNRRDNAEYEDHERNTHEHSRQKENEAQHNQEKTSSISNTEEKKAIRPAEQAGRHVGLKTRGQEPCSTAVLNDCRD

SEQ ID NO: 863846 - protein, 382 aa, Homo sapiens; identical to SEQ ID NO: 863834

SEQ ID NO: 863847 - protein, 382 aa, Homo sapiens; identical to SEQ ID NO: 863834

SEQ ID NO: 863848 - protein, 382 aa, Homo sapiens; identical to SEQ ID NO: 863834

SEQ ID NO: 863849 - protein, 320 aa, Homo sapiens
MDGETAEEQGGPVPPPVAPGGPGLGGAPGGRREPKKYAVTDDYQLSKQVLGLGVNGKVLECFHRRTGQKCALKLLYDSPKARQEVDHHWQASGGPHIVCILDVYENMHHGKRCLLIIMECMEGGELFSRIQERGDQAFTEREAAEIMRDIGTAIQFLHSHNIAHRDVKPENLLYTSKEKDAVLKLTDFGFAKETTQNALQTPCYTPYYVAPEVLGPEKYDKSCDMWSLGVIMYILLCGFPPFYSNTGQAISPGMKRRIRLGQYGFPNPEWSEVSEDAKQLIRLLLKTDPTERLTITQFMNHPWINVSPSSSHGSEAPSPP

SEQ ID NO: 863850 - protein, 328 aa, Homo sapiens
MDGETAEEQGGPVPPPVAPGGPGLGGAPGGRREPKKYAVTDDYQLSKQVLGLGVNGKVLECFHRRTGQKCALKLLYDSPKARQEVDHHWQASGGPHIVCILDVYENMHHGKRCLLIIMECMEGGELFSRIQERGDQAFTEREAAEIMRDIGTAIQFLHSHNIAHRDVKPENLLYTSKEKDAVLKLTDFGFAKETTQNALQTPCYTPYYVAPEVLGPEKYDKSCDMWSLGVIMYILLCGFPPFYSNTGQAISPGMKRRIRLGQYGFPNPEWSEVSEDAIDGSATDPTPHGPSAAGGQRPLGRSQGGDDQCLGHYAGRLRPGEDQGPEDL

SEQ ID NO: 863851 - protein, 146 aa, Homo sapiens
GRVGRPTRRTGQAISPGMKRRIRLGQYGFPNPEWSEVSEDAKQLIRLLLKTDPTERLTITQFMNHPWINQSMVVPQTPLHTARVLQEDKDHWDEVKEEMTSALATMRVDYDQVKIKDLKTSNNRLLNKRRKKQAGSSSASQGCNNQ

SEQ ID NO: 863852 - protein, 278 aa, Homo sapiens
MDGETAEEQGGPVPPPVAPGGPGLGGAPGGRREPKKYAVTDDYQLSKQVLGLGVNGKVLECFHRRTGQKCALKLLYDSPKARQEVDHHWQASGGPHIVCILDVYENMHHGKRCLLIIMECMEGGELFSRIQERGDQAFTEREAAEIMRDIGTAIQFLHSHNIAHRDVKPENLLYTSKEKDAVLKLTDFGFAKETTQNALQTPCYTPYYVAPEVLGPEKYDKSCDMWSLGVIMYILLCGFPPFYSNTGQAISPGMKRRIRLGQYGFPNPEWSEVSEDAL

SEQ ID NO: 863853 - protein, 250 aa, Homo sapiens
MDGETAEEQGGPVPPPVAPGGPGLGGAPGGRREPKKYAVTDDYQLSKQVLGLGVNGKVLECFHRRTGQKCALKLLYDSPKARQEVDHHWQASGGPHIVCILDVYENMHHGKRCLLIIMECMEGGELFSRIQERGDQAFTEREAAEIMRDIGTAIQFLHSHNIAHRDVKPENLLYTSKEKDAVLKLTDFGFAKETTQNALQTPCYTPYYVAPEVLGPEKYDKSCDMWSLGVIMYILKNKALLGTWNQSAVI

SEQ ID NO: 863854 - protein, 69 aa, Homo sapiens
MYRVGLDLRLASLTPSSSVSAEAAEIMRDIGTAIQFLHSHNIAHRDVKVRLQDSGWGPGEEDIVPLHNP

SEQ ID NO: 863855 - protein, 109 aa, Homo sapiens
LPRRLDTVFLIQYLFLTFPRIVFMLGFVVVLSFLLGGYLLFVLYLAATNQTTNEWYRGDWAWCQRCPLVAWPPSAEPQVHRNIHSHGLRSNLQEIFLPAFPCHERKKQE

SEQ ID NO: 863856 - protein, 344 aa, Homo sapiens
MDFLVLFLFYLASVLMGLVLICVCSKTHSLKGLARGGAQIFSCIIPECLQRAVHGLLHYLFHTRNHTFIVLHLVLQGMVYTEYTWEVFGYCQELELSLHYLLLPYLLLGVNLFFFTLTCGTNPGIITKANELLFLHVYEFDEVMFPKNVRCSTCDLRKPARSKHCSVCNWCVHRFDHHCVWVNNCIGAWNIRYFLIYVLTLTASAATVAIVSTTFLVHLVVMSDLYQETYIDDLGHLHVMDTVFLIQYLFLTFPRIVFMLGFVVVLSFLLGGYLLFVLYLAATNQTTNEWYRGDWAWCQRCPLVAWPPSAEPQVHRNIHSHGLRSNLQEIFLPAFPCHERKKQE

SEQ ID NO: 863857 - protein, 94 aa, Homo sapiens
KDRVHNMEVSKVIDEVSWYKSDITTKLDQKSGAHNGPGASVVPLWPGLRQQSPKSTGTFTPMGFGATFKRSFYLPFHVMRGRNKNDKCMTAFEL

SEQ ID NO: 863858 - protein, 344 aa, Homo sapiens; identical to SEQ ID NO: 863856

SEQ ID NO: 863859 - protein, 344 aa, Homo sapiens; identical to SEQ ID NO: 863856

SEQ ID NO: 863860 - protein, 344 aa, Homo sapiens; identical to SEQ ID NO: 863856

SEQ ID NO: 863861 - protein, 344 aa, Homo sapiens; identical to SEQ ID NO: 863856

SEQ ID NO: 863862 - protein, 344 aa, Homo sapiens; identical to SEQ ID NO: 863856

SEQ ID NO: 863863 - protein, 344 aa, Homo sapiens; identical to SEQ ID NO: 863856

SEQ ID NO: 863864 - protein, 212 aa, Homo sapiens
MDFLVLFLFYLASVLMGLVLICVCSKTHSLKGLARGGAQIFSCIIPECLQRAVHGLLHYLFHTRNHTFIVLHLVLQGMVYTEYTWEVFGYCQELELSLHYLLLPYLLLGVNLFFFTLTCGTNPGIITKANELLFLHVYEFDEVMFPKNVRCSTCDLRKPARSKHCSECGSRDSSGTSNSTCVGFVCEGMFPESESRASSPPDMVWPLLVELR

SEQ ID NO: 863865 - protein, 212 aa, Homo sapiens; identical to SEQ ID NO: 863864

SEQ ID NO: 863866 - protein, 212 aa, Homo sapiens; identical to SEQ ID NO: 863864

SEQ ID NO: 863867 - protein, 104 aa, Homo sapiens
ARGAHAWRQIQAPGRTMSGSYWSCQAHTAAQEELLFVLYLAATNQTTNEWYRGDWAWCQRCPLVAWPPSAEPQVHRNIHSHGLRSNLQEIFLPAFPCHERKKQE

SEQ ID NO: 863868 - protein, 344 aa, Homo sapiens; identical to SEQ ID NO: 863856

SEQ ID NO: 863869 - protein, 344 aa, Homo sapiens; identical to SEQ ID NO: 863856

SEQ ID NO: 863870 - protein, 282 aa, Homo sapiens
MDFLVLFLFYLASVLMGLVLICVCSKTHSLKGLARGGAQIFSCIIPECLQRAVHGLLHYLFHTRNHTFIVLHLVLQGMVYTEYTWEVFGYCQELELSLHYLLLPYLLLGVNLFFFTLTCGTNPGIITKANELLFLHVYEFDEVMFPKNVRCSTCDLRKPARSKHCSVCNWCVHRFDHHCVWVNNCIGAWNIRYFLIYVLTLTASAATVAIVSTTFLVHLVVMSDLYQETYIDDLGHLHVMDTVFLIQCEHFIHPTGNSCMYWDYSGLLLSAVYVQFVTSGHK

SEQ ID NO: 863871 - protein, 212 aa, Homo sapiens; identical to SEQ ID NO: 863864

SEQ ID NO: 863872 - protein, 212 aa, Homo sapiens; identical to SEQ ID NO: 863864

SEQ ID NO: 863873 - protein, 155 aa, Homo sapiens
IAPVTCQRRAKGAFGVGFLEAAFSFTWKASLVMDPYMIQMSSKGNLPSILDVHVNVGGRSSVPGKMKGRKARWSVRPSDMAKKTFNPIRAIVDNMKVKPNPNKTMISLSIGDPTVFGNLPTDPEVTQAMKDALDSGKYNGYAPSIGKLLLRLHTW

SEQ ID NO: 863874 - protein, 382 aa, Homo sapiens
IAPVTCQRRAKGAFGVGFLEAAFSFTWKASLVMDPYMIQMSSKGNLPSILDVHVNVGGRSSVPGKMKGRKARWSVRPSDMAKKTFNPIRAIVDNMKVKPNPNKTMISLSIGDPTVFGNLPTDPEVTQAMKDALDSGKYNGYAPSIGFLSSREEIASYYHCPEAPLEAKDVILTSGCSQAIDLCLAVLANPGQNILVPRPGFSLYKTLAESMGIEVKLYNLLPEKSWEIDLKQLEYLIDEKTACLIVNNPSNPCGSVFSKRHLQKILAVAARQCVPILADEIYGDMVFSDCKYEPLATLSTDVPILSCGGLAKRWLVPGWRLGWILIHDRRDIFGNEIRDGLVKLSQRILGPCTIVQGALLKHPMSHPGRVLPQHSELPQVQC

SEQ ID NO: 863875 - protein, 519 aa, Homo sapiens
IAPVTCQRRAKGAFGVGFLEAAFSFTWKASLVMDPYMIQMSSKGNLPSILDVHVNVGGRSSVPGKMKGRKARWSVRPSDMAKKTFNPIRAIVDNMKVKPNPNKTMISLSIGELGTLLRGCHCPPLLSCSQAGWRRWQLGVSLSTEHGRITSWLLLCFPPIKGDPTVFGNLPTDPEVTQAMKDALDSGKYNGYAPSIGFLSSREEIASYYHCPEAPLEAKDVILTSGCSQAIDLCLAVLANPGQNILVPRPGFSLYKTLAESMGIEVKLYNLLPEKSWEIDLKQLEYLIDEKTACLIVNNPSNPCGSVFSKRHLQKILAVAARQCVPILADEIYGDMVFSDCKYEPLATLSTDVPILSCGGLAKRWLVPGWRLGWILIHDRRDIFGNEIRDGLVKLSQRILGPCTIVQGALLKSNADLCYGALAAIPGLRPVRPSGAMYLMVGIEMEHFPEFENDVEFTERLVAEQSVHCLPATCFEYPNFIRVVITVPEVMMLEACSRIQEFCEQHYHCAEGSQEECDK

SEQ ID NO: 863876 - protein, 174 aa, Homo sapiens
IAPVTCQRRAKGAFGVGFLEAAFSFTWKASLVMDPYMIQMSSKGNLPSILDVHVNVGGRSSVPGKMKGRKARWSVRPSDMAKKTFNPIRAIVDNMKVKPNPNKTMISLSIGELGTLLRGCHCPPLLSCSQAGWRRWQLGVSLSTEHGRITSWLLLCFPPIKRGPYCVWKPAYRP

SEQ ID NO: 863877 - protein, 382 aa, Homo sapiens; identical to SEQ ID NO: 863874

SEQ ID NO: 863878 - protein, 519 aa, Homo sapiens; identical to SEQ ID NO: 863875

SEQ ID NO: 863879 - protein, 519 aa, Homo sapiens; identical to SEQ ID NO: 863875

SEQ ID NO: 863880 - protein, 433 aa, Homo sapiens
IAPVTCQRRAKGAFGVGFLEAAFSFTWKASLVMDPYMIQMSSKGNLPSILDVHVNVGGRSSVPGKMKGRKARWSVRPSDMAKKTFNPIRAIVDNMKVKPNPNKTMISLSIGELGTLLRGCHCPPLLSCSQAGWRRWQLGVSLSTEHGRITSWLLLCFPPIKGDPTVFGNLPTDPEVTQAMKDALDSGKYNGYAPSIGFLSSREEIASYYHCPEAPLEAKDVILTSGCSQAIDLCLAVLANPGQNILVPRPGFSLYKTLAESMGIEVKLYNLLPEKSWEIDLKQLEYLIDEKTACLIVNNPSNPCGSVFSKRHLQKILAVAARQCVPILADEIYGDMVFSDCKYEPLATLSTDVPILSCGGLAKRWLVPGWRLGWILIHDRRDIFGNEIRDGLVKLSQRILGPCTIVQGALLKHPMSHPGRVLPQHSELPQVQC

SEQ ID NO: 863881 - protein, 690 aa, Homo sapiens
MDMDTPHCLTCPQQSTAESEGATICTCESGHYRAPGEGPQVACTGPPSAPRNLSFSASGTQLSLRWEPPADTGGRQDVRYSVRCSQCQGTAQDGGPCQPCGVGVHFSPGARGLTTPAVHVNGLEPYANYTFNVEAQNGVSGLGSSGHASTSVSISMGHAESLSGLSLRLVKKEPRQLELTWAGSRPRSPGANLTYELHVLNQDEERYQMVLEPRVLLTELQPDTTYIVRVRMLTPLGPGPFSPDHEFRTSPPVSRGLTGGEIVAVIFGLLLGAALLLGILVFRSRRAQRQRQQRQRDRATDVDREDKLWLKPYVDLQAYEDPAQGALDFTRELDPAWLMVDTVIGEGEFGEVYRGTLRLPSQDCKTVAIKTLKDTSPGGQWWNFLREATIMGQFSHPHILHLEGVVTKRKPIMIITEFMENGALDAFLREREDQLVPGQLVAMLQGIASGMNYLSNHNYVHRDLAARNILVNQNLCCKVSDFGLTRLLDDFDGTYETQGGKIPIRWTAPEAIAHRIFTTASDVWSFGIVMWEVLSFGDKPYGEMSNQEVMKSIEDGYRLPPPVDCPAPLYELMKNCWAYDRARRPHFQKLQAHLEQLLANPHSLRTIANFDPRVTLRLPSLSGSDGIPYRTVSEWLESIRMKRYILHFHSAGLDTMECVLELTAEDLTQMGITLPGHQKRILCSIQGFKD

SEQ ID NO: 863882 - protein, 701 aa, Homo sapiens
MDMDTPHCLTCPQQSTAESEGATICTCESGHYRAPGEGPQVACTGPPSAPRNLSFSASGTQLSLRWEPPADTGGRQDVRYSVRCSQCQGTAQDGGPCQPCGVGVHFSPGARGLTTPAVHVNGLEPYANYTFNVEAQNGVSGLGSSGHASTSVSISMGHAESLSGLSLRLVKKEPRQLELTWAGSRPRSPGANLTYELHVLNQDEERYQMVLEPRVLLTELQPDTTYIVRVRMLTPLGPGPFSPDHEFRTSPPVSRGLTGGEIVAVIFGLLLGAALLLGILVFRSRRAQRQRQQRQRDRATDVDREDKLWLKPYVDLQAYEDPAQGALDFTRELDPAWLMVDTVIGEGEFGEVYRGTLRLPSQDCKTVAIKTLKDTSPGGQWWNFLREATIMGQFSHPHILHLEGVVTKRKPIMIITEFMENGALDAFLREREDQLVPGQLVAMLQGIASGMNYLSNHNYVHRDLAARNILVNQNLCCKVSDFGLTRLLDDFDGTYETQGGKIPIRWTAPEAIAHRIFTTASDVWSFGIVMWEVLSFGDKPYGEMSNQEVMKSIEDGYRLPPPVDCPAPLYELMKNCWAYDRARRPHFQKLQAHLEQLLANPHSLRTIANFDPRVTLRLPSLSGSDGIPYRTVSEWLESIRMKRYITIPKLHTSLAVVKIRWAMASGAVQRIGIFPPWVSYVPSKSSRRRVRPKSDTLQHRF

SEQ ID NO: 863883 - protein, 166 aa, Homo sapiens
MVDTVIGEGEFGEVYRGTLRLPSQDCKTVAIKTLKDTSPGGQWWNFLREATIMGQFSHPHILHLEGVVTKRKPIMIITEFMENGALDAFLREREDQLVPGQLVAMLQGIASGMNYLSNHNYVHRDLAARNILVNQNLCCKVSDFGLTRLLDDFDGTYETQVRGRYK

SEQ ID NO: 863884 - protein, 184 aa, Homo sapiens
SSGINQSAHYGRGALRNEMAVLWRLSAVCGALGGRALLLRTPVVRPAHISAFLQDRPIPEWCGVQHIHLSPSHHSGSKAASLHWTSERVVSVLLLGLLPAAYLNPCSAMDYSLAAALTLHGHWGLGPSCYWTMFMGMPCKKKLPRAGAFVGTFSFNLVAGLLLFQPITMWGICKGWCAMLCGKL

SEQ ID NO: 863885 - protein, 611 aa, Homo sapiens
QSRQFCACSLFSSTQNCQCERIWKSLDLLNTKMFFRVFLHFIRSHSATAVDFLPVMVHRLPVFKRYMGNTPQKKAVFGQCRGLPCVAPLLTTVEEAPRGISARVWGHFPKWLNGSLLRIGPGKFEFGKDKYNHWFDGMALLHQFRMAKGTVTYRSKFLQSDTYKANSAKNRIVISEFGTLALPDPCKNVFERFMSRFELPGKAAAMTDNTNVNYVRYKGDYYLCTETNFMNKVDIETLEKTEKVDWSKFIAVNGATAHPHYDPDGTAYNMGNSFGPYGFSYKVIRVPPEKVDLGETIHGVQVICSIASTEKGKPSYYHSFGMTRNYIIFIEQPLKMNLWKIATSKIRGKAFSDGISWEPQCNTRFHVVEKRTGQLLPGRYYSKPFVTFHQINAFEDQGCVIIDLCCQDNGRTLEVYQLQNLRKAGEGLDQVHNSAAKSFPRRFVLPLNVSLNAPEGDNLSPLSYTSASAVKQADGTIWCSHENLHQEDLEKEGGIEFPQIYYDRFSGKKYHFFYGCGFRHLVGDSLIKVDVVNKTLKVWREDGFYPSEPVFVPAPGTNEEDGGVILSVVITPNQNESNFLLVLDAKNFEELGRAEVPVQMPYGFHGTFIPI

SEQ ID NO: 863886 - protein, 539 aa, Homo sapiens
MGNTPQKKAVFGQCRGLPCVAPLLTTVEEAPRGISARVWGHFPKWLNGSLLRIGPGKFEFGKDKYNHWFDGMALLHQFRMAKGTVTYRSKFLQSDTYKANSAKNRIVISEFGTLALPDPCKNVFERFMSRFELPGKAAAMTDNTNVNYVRYKGDYYLCTETNFMNKVDIETLEKTEKVDWSKFIAVNGATAHPHYDPDGTAYNMGNSFGPYGFSYKVIRVPPEKVDLGETIHGVQVICSIASTEKGKPSYYHSFGMTRNYIIFIEQPLKMNLWKIATSKIRGKAFSDGISWEPQCNTRFHVVEKRTGQLLPGRYYSKPFVTFHQINAFEDQGCVIIDLCCQDNGRTLEVYQLQNLRKAGEGLDQVHNSAAKSFPRRFVLPLNVSLNAPEGDNLSPLSYTSASAVKQADGTIWCSHENLHQEDLEKEGGIEFPQIYYDRFSGKKYHFFYGCGFRHLVGDSLIKVDVVWREDGFYPSEPVFVPAPGTNEEDGGVILSVVITPNQNESNFLLVLDAKNFEELGRAEVPVQMPYGFHGTFIPI

SEQ ID NO: 863887 - protein, 166 aa, Homo sapiens
MAVLWRLSAVCGALGGRALLLRTPVVRPAHISAFLQDRPIPEWCGVQHIHLSPSHHSGSKAASLHWTSERVVSVLLLGLLPAAYLNPCSAMDYSLAAALTLHGHWGLGPSCYWTMFMGMPCKKKLPRAGAFVGTFSFNLVAGLLLFQPITMWGICKGWCAMLCGKL

SEQ ID NO: 863888 - protein, 166 aa, Homo sapiens; identical to SEQ ID NO: 863887

SEQ ID NO: 863889 - protein, 184 aa, Homo sapiens; identical to SEQ ID NO: 863884

SEQ ID NO: 863890 - protein, 168 aa, Homo sapiens
  misc_feature (4)..(4): Xaa can be any naturally occurring amino acid
QEFXTNGGLSAGCGALGGRALLLRTPVVRPAHISAFLQDRPIPEWCGVQHIHLSPSHHSGSKAASLHWTSERVVSVLLLGLLPAAYLNPCSAMDYSLAAALTLHGHWGLGPSCYWTMFMGMPCKKKLPRAGAFVGTFSFNLVAGLLLFQPITMWGICKGWCAMLCGKL

SEQ ID NO: 863891 - protein, 145 aa, Homo sapiens
SSGINQSAHYGRGALRNEMAVLWRLSAVCGALGGRAGSKAASLHWTSERVVSVLLLGLLPAAYLNPCSAMDYSLAAALTLHGHWGLGPSCYWTMFMGMPCKKKLPRAGAFVGTFSFNLVAGLLLFQPITMWGICKGWCAMLCGKL

SEQ ID NO: 863892 - protein, 140 aa, Homo sapiens
MGSWAWLHAIIIGFVLHRGAATYVDVQKDLTGSKAASLHWTSERVVSVLLLGLLPAAYLNPCSAMDYSLAAALTLHGHWGLGPSCYWTMFMGMPCKKKLPRAGAFVGTFSFNLVAGLLLFQPITMWGICKGWCAMLCGKL

SEQ ID NO: 863893 - protein, 104 aa, Homo sapiens
MAVLWRLSAVCGALGGRALLLRTPVVRPAHISAFLQDRPIPEWCGVQHIHLSPSHHSGSKAASLHWTSERVVSVLLLGLLPAAYLNPCSAMDYSLAAALTLHGH

SEQ ID NO: 863894 - protein, 126 aa, Homo sapiens
MTLSPQERDGGSLEAECRLRCPRRPSSVASNSSGQTCSYLSISSGPTYPRMVWSAAHTLVTEPPLGLGPSCYWTMFMGMPCKKKLPRAGAFVGTFSFNLVAGLLLFQPITMWGICKGWCAMLCGKL

SEQ ID NO: 863895 - protein, 111 aa, Homo sapiens
MAVLWRLSAVCGALGGRALLLRTPVVRPAHISAFLQDRPIPEWCGVQHIHLSPSHHSGSKAASLHWTSERVVSVLLLGLLPAAYLNPCSAMDYSLAAALTLHGHWKIKNNE

SEQ ID NO: 863896 - protein, 297 aa, Homo sapiens
MAVLWRLSAVCGALGGRALLLRTPVVRPAHISAFLQDRPIPEWCGVQHIHLSPSHHSGSKAASLHWTSERVVSVLLLGLLPAAYLNPCSAMDYSLAAALTLHGHCLQCQIVHSCPLLENQIHLSLKFPDYFIKMKPVEKDLNVFKRYMGNTPQKKAVFGQCRGLPCVAPLLTTVEEAPRGISARVWGHFPKWLNGSLLRIGPGKFEFGKDKYNHWFDGMALLHQFRMAKGTVTYRSKFLQSDTYKANSAKNRIVISEFGTLALPDPCKNVFERFMSRFELPGKAAGDSDDYLNYYDI

SEQ ID NO: 863897 - protein, 129 aa, Homo sapiens
  misc_feature (127)..(127): Xaa can be any naturally occurring amino acid
MAVLWRLSAVCGALGGRALLLRTPVVRPAHISAFLQDRPIPEWCGVQHIHLSPSHHSGSKAASLHWTSERVVSVLLLGLLPAAYLNPCSAMDYSLAAALTLHGHCGGLDNCYDQFRGCLPAKAGFAXRF

SEQ ID NO: 863898 - protein, 311 aa, Homo sapiens
MAVLWRLSAVCGALGGRALLLRTPVVRPAHISAFLQDRPIPEWCGVQHIHLSPSHHSGSKAASLHWTSERVVSVLLLGLLPAAYLNPCSAMDYSLAAALTLHGHCLQCQIVHSCPLLENQIHLSLKFPDYFIKMKPVEKDLNVFKRYMGNTPQKKAVFGQCRGLPCVAPLLTTVEEAPRGISARVWGHFPKWLNGSLLRIGPGKFEFGKDKYNHWFDGMALLHQFRMAKGTVTYRSKFLQSDTYKANSAKNRIVISEFGTLALPDPCKNVFEVDVAAHVGGEGRPHVLDLLLGEAVTLRGQQLLQELLLDG

SEQ ID NO: 863899 - protein, 593 aa, Homo sapiens
QSRQFCACSLFSSTQNCQCERIWKSLDLLNTKMFFRVFLHFIRSHSATAVDFLPVMVHRLPVFKRYMGNTPQNTVEEAPRGISARVWGHFPKWLNGSLLRIGPGKFEFGKDKYNHWFDGMALLHQFRMAKGTVTYRSKFLQSDTYKANSAKNRIVISEFGTLALPDPCKNVFERFMSRFELPGKAAAMTDNTNVNYVRYKGDYYLCTETNFMNKVDIETLEKTEKVDWSKFIAVNGATAHPHYDPDGTAYNMGNSFGPYGFSYKVIRVPPEKVDLGETIHGVQVICSIASTEKGKPSYYHSFGMTRNYIIFIEQPLKMNLWKIATSKIRGKAFSDGISWEPQCNTRFHVVEKRTGQLLPGRYYSKPFVTFHQINAFEDQGCVIIDLCCQDNGRTLEVYQLQNLRKAGEGLDQVHNSAAKSFPRRFVLPLNVSLNAPEGDNLSPLSYTSASAVKQADGTIWCSHENLHQEDLEKEGGIEFPQIYYDRFSGKKYHFFYGCGFRHLVGDSLIKVDVVNKTLKVWREDGFYPSEPVFVPAPGTNEEDGGVILSVVITPNQNESNFLLVLDAKNFEELGRAEVPVQMPYGFHGTFIPI

SEQ ID NO: 863900 - protein, 290 aa, Homo sapiens
MTRNYIIFIEQPLKMNLWKIATSKIRGKAFSDGISWEPQCNTRFHVVEKRTGQLLPGRYYSKPFVTFHQINAFEDQGCVIIDLCCQDNGRTLEVYQLQNLRKAGEGLDQVHNSAAKSFPRRFVLPLNVSLNAPEGDNLSPLSYTSASAVKQADGTIWCSHENLHQEDLEKEGGIEFPQIYYDRFSGKKYHFFYGCGFRHLVGDSLIKVDVVNKTLKVWREDGFYPSEPVFVPAPGTNEEDGGVILSVVITPNQNESNFLLVLDAKNFEELGRAEVPVQMPYGFHGTFIPI

SEQ ID NO: 863901 - protein, 166 aa, Homo sapiens; identical to SEQ ID NO: 863887

SEQ ID NO: 863902 - protein, 545 aa, Homo sapiens
MGNTPQKKAVFGQCRGLPCVAPLLTTVEEAPRGISARVWGHFPKWLNGSLLRIGPGKFEFGKDKYNHWFDGMALLHQFRMAKGTVTYRSKFLQSDTYKANSAKNRIVISEFGTLALPDPCKNVFERFMSRFELPGKAAAMTDNTNVNYVRYKGDYYLCTETNFMNKVDIETLEKTEKVDWSKFIAVNGATAHPHYDPDGTAYNMGNSFGPYGFSYKVIRVPPEKVDLGETIHGVQVICSIASTEKGKPSYYHSFGMTRNYIIFIEQPLKMNLWKIATSKIRGKAFSDGISWEPQCNTRFHVVEKRTGQLLPGRYYSKPFVTFHQINAFEDQGCVIIDLCCQDNGRTLEVYQLQNLRKAGEGLDQVHNSAAKSFPRRFVLPLNVSLNAPEGDNLSPLSYTSASAVKQADGTIWCSHENLHQEDLEKEGGIEFPQIYYDRFSGKKYHFFYGCGFRHLVGDSLIKVDVVNKTLKVWREDGFYPSEPVFVPAPGTNEEDGGVILSVVITPNQNESNFLLVLDAKNFEELGRAEVPVQMPYGFHGTFIPI

SEQ ID NO: 863903 - protein, 216 aa, Homo sapiens
QSRQFCACSLFSSTQNCQCERIWKSLDLLNTKMFFRVFLHFIRSHSATAVDFLPVMVHRLPVFKRYMGNTPQKKAVFGQCRGLPCVAPLLTTVEEAPRGISARVWGHFPKWLNGSLLRIGPGKFEFGKDKYNHWFDGMALLHQFRMAKGTVTYRSKFLQSDTYKANSAKNRIVISEFGTLALPDPCKNVFERFMSRFELPGKAAGDSDDYLNYYDI

SEQ ID NO: 863904 - protein, 166 aa, Homo sapiens; identical to SEQ ID NO: 863887

SEQ ID NO: 863905 - protein, 166 aa, Homo sapiens; identical to SEQ ID NO: 863887

SEQ ID NO: 863906 - protein, 178 aa, Homo sapiens
SSGINAECPLRPGSPQERDGGSLEAECRLRCPRRPSSVASNSSGQTCSYLSISEWCGVQHIHLSPSHHSGSKAASLHWTSERVVSVLLLGLLPAAYLNPCSAMDYSLAAALTLHGHWGLGPSCYWTMFMGMPCKKKLPRAGAFVGTFSFNLVAGLLLFQPITMWGICKGWCAMLCGKL

SEQ ID NO: 863907 - protein, 231 aa, Homo sapiens
QLYWTYLGLGFRRRRGVVSRKGDTLSINQYSESELPDRYADWAADAGQWEVLWHTVSRDQCMNSWLGSQIPVRYSTWCISAAFSNTKIRDWYAHWNGVVTDMLYNNCVHHGRTTPVSWNTQAGSKAASLHWTSERVVSVLLLGLLPAAYLNPCSAMDYSLAAALTLHGHWGLGPSCYWTMFMGMPCKKKLPRAGAFVGTFSFNLVAGLLLFQPITMWGICKGWCAMLCGKL

SEQ ID NO: 863908 - protein, 104 aa, Homo sapiens; identical to SEQ ID NO: 863893

SEQ ID NO: 863909 - protein, 686 aa, Homo sapiens
MAVLWRLSAVCGALGGRALLLRTPVVRPAHISAFLQDRPIPEWCGVQHIHLSPSHHSGSKAASLHWTSERVVSVLLLGLLPAAYLNPCSAMDYSLAAALTLHGHCLQCQIVHSCPLLENQIHLSLKFPDYFIKMKPVEKDLNVFKRYMGNTPQKKAVFGQCRGLPCVAPLLTTVEEAPRGISARVWGHFPKWLNGSLLRIGPGKFEFGKDKYNHWFDGMALLHQFRMAKGTVTYRSKFLQSDTYKANSAKNRIVISEFGTLALPDPCKNVFERFMSRFELPGKAAAMTDNTNVNYVRYKGDYYLCTETNFMNKVDIETLEKTEKVDWSKFIAVNGATAHPHYDPDGTAYNMGNSFGPYGFSYKVIRVPPEKVDLGETIHGVQVICSIASTEKGKPSYYHSFGMTRNYIIFIEQPLKMNLWKIATSKIRGKAFSDGISWEPQCNTRFHVVEKRTGQLLPGRYYSKPFVTFHQINAFEDQGCVIIDLCCQDNGRTLEVYQLQNLRKAGEGLDQVHNSAAKSFPRRFVLPLNVSLNAPEGDNLSPLSYTSASAVKQADGTIWCSHENLHQEDLEKEGGIEFPQIYYDRFSGKKYHFFYGCGFRHLVGDSLIKVDVVWREDGFYPSEPVFVPAPGTNEEDGGVILSVVITPNQNESNFLLVLDAKNFEELGRAEVPVQMPYGFHGTFIPI

SEQ ID NO: 863910 - protein, 692 aa, Homo sapiens
MAVLWRLSAVCGALGGRALLLRTPVVRPAHISAFLQDRPIPEWCGVQHIHLSPSHHSGSKAASLHWTSERVVSVLLLGLLPAAYLNPCSAMDYSLAAALTLHGHCLQCQIVHSCPLLENQIHLSLKFPDYFIKMKPVEKDLNVFKRYMGNTPQKKAVFGQCRGLPCVAPLLTTVEEAPRGISARVWGHFPKWLNGSLLRIGPGKFEFGKDKYNHWFDGMALLHQFRMAKGTVTYRSKFLQSDTYKANSAKNRIVISEFGTLALPDPCKNVFERFMSRFELPGKAAAMTDNTNVNYVRYKGDYYLCTETNFMNKVDIETLEKTEKVDWSKFIAVNGATAHPHYDPDGTAYNMGNSFGPYGFSYKVIRVPPEKVDLGETIHGVQVICSIASTEKGKPSYYHSFGMTRNYIIFIEQPLKMNLWKIATSKIRGKAFSDGISWEPQCNTRFHVVEKRTGQLLPGRYYSKPFVTFHQINAFEDQGCVIIDLCCQDNGRTLEVYQLQNLRKAGEGLDQVHNSAAKSFPRRFVLPLNVSLNAPEGDNLSPLSYTSASAVKQADGTIWCSHENLHQEDLEKEGGIEFPQIYYDRFSGKKYHFFYGCGFRHLVGDSLIKVDVVNKTLKVWREDGFYPSEPVFVPAPGTNEEDGGVILSVVITPNQNESNFLLVLDAKNFEELGRAEVPVQMPYGFHGTFIPI

SEQ ID NO: 863911 - protein, 121 aa, Homo sapiens
MAVLWRLSAVCGALGGRALLLRTPVVRPAHISAFLQDRPIPEWCGVQHIHLSPSHHSGSKAASLHWTSERVVSVLLLGLLPAAYLNPCSAMDYSLAAALTLHGHWASIAIPNIVVCSVCLL

SEQ ID NO: 863912 - protein, 474 aa, Homo sapiens
MALLHQFRMAKGTVTYRSKFLQSDTYKANSAKNRIVISEFGTLALPDPCKNVFERFMSRFELPGKAAAMTDNTNVNYVRYKGDYYLCTETNFMNKVDIETLEKTEKVDWSKFIAVNGATAHPHYDPDGTAYNMGNSFGPYGFSYKVIRVPPEKVDLGETIHGVQVICSIASTEKGKPSYYHSFGMTRNYIIFIEQPLKMNLWKIATSKIRGKAFSDGISWEPQCNTRFHVVEKRTGQLLPGRYYSKPFVTFHQINAFEDQGCVIIDLCCQDNGRTLEVYQLQNLRKAGEGLDQVHNSAAKSFPRRFVLPLNVSLNAPEGDNLSPLSYTSASAVKQADGTIWCSHENLHQEDLEKEGGIEFPQIYYDRFSGKKYHFFYGCGFRHLVGDSLIKVDVVNKTLKVWREDGFYPSEPVFVPAPGTNEEDGGVILSVVITPNQNESNFLLVLDAKNFEELGRAEVPVQMPYGFHGTFIPI

SEQ ID NO: 863913 - protein, 538 aa, Homo sapiens
QSRQFCACSLFSSTQNCQCERIWKSLDLLNTKMFFRVFLHFIRSHSATAVDFLPVMVHRLPVFKRYMGNTPQKKAVFGQCRGLPCVAPLLTTVEEAPRGISARVWGHFPKWLNGSLLRIGPGKFEFGKDKYNHWFDGMALLHQFRMAKGTVTYRSKFLQSDTYKANSAKNRIVISEFGTLALPDPCKNVFERFMSRFELPGKAAGFSYKVIRVPPEKVDLGETIHGVQVICSIASTEKGKPSYYHSFGMTRNYIIFIEQPLKMNLWKIATSKIRGKAFSDGISWEPQCNTRFHVVEKRTGQLLPGRYYSKPFVTFHQINAFEDQGCVIIDLCCQDNGRTLEVYQLQNLRKAGEGLDQVHNSAAKSFPRRFVLPLNVSLNAPEGDNLSPLSYTSASAVKQADGTIWCSHENLHQEDLEKEGGIEFPQIYYDRFSGKKYHFFYGCGFRHLVGDSLIKVDVVNKTLKVWREDGFYPSEPVFVPAPGTNEEDGGVILSVVITPNQNESNFLLVLDAKNFEELGRAEVPVQMPYGFHGTFIPI

SEQ ID NO: 863914 - protein, 275 aa, Homo sapiens
MAEPASVAAESLAGSRARAARTVLGQVVLPGEELLLPEQEDAEGPGGAVERPLSLNARACSRVRVVCGPGLRRCGDRLLVTKCGRLRHKEPGSGSGGGVYWVDSQQKRYVPVKGDHVIGIVTAKSGDIFKVDVGGSEPASLSYLSFEGATKRNRPNVQVGDLIYGQFVVANKDMEPEMVCIDSCGRANGMGVIGQDGLLFKVTLGLIRKLLAPDCEIIQEVGKLYPLEIVFGMNGRIWVKAKTIQQTLILANILEACEHMTSDQRKQIFSRLAES

SEQ ID NO: 863915 - protein, 275 aa, Homo sapiens; identical to SEQ ID NO: 863914

SEQ ID NO: 863916 - protein, 173 aa, Homo sapiens
RKRCLVEPAMAEPASVAAESLAGSRARAARTVLGQVVLPGEELLLPEQEDAEGPGGAVERPLSLNARACSRVRVVCGPGLRRCGDRLLVTKCGRLRHKEPGSGSGGGVYWVDSQQKRYVPVKGDHVIGIVTAKSGDIFKVDVGGSEPASLSYLSFEGATKRNRPNVQAISSRL

SEQ ID NO: 863917 - protein, 181 aa, Homo sapiens
RKRCLVEPAMAEPASVAAESLAGSRARAARTVLGQVVLPGEELLLPEQEDAEGPGGAVERPLSLNARACSRVRVVCGPGLRRCGDRLLVTKCGRLRHKEPGSGSGGGVYWVDSQQKRYVPVKGDHVIGIVTAKSGDIFKVDVGGSEPASLSYLSFEGATKRNRPNVQVITGAFGFKETNIH

SEQ ID NO: 863918 - protein, 101 aa, Homo sapiens
GRPPSEGPRLPVGRVLEVEDGAVGAGAEVHRVRGVDGTVEASHGAKIVPRRVHEQPAAQAALFQPPEQPSARAAQARAEAVSAPALGPAVWPGPPARRGGR

SEQ ID NO: 863919 - protein, 284 aa, Homo sapiens
RKRCLVEPAMAEPASVAAESLAGSRARAARTVLGQVVLPGEELLLPEQEDAEGPGGAVERPLSLNARACSRVRVVCGPGLRRCGDRLLVTKCGRLRHKEPGSGSGGGVYWVDSQQKRYVPVKGDHVIGIVTAKSGDIFKVDVGGSEPASLSYLSFEGATKRNRPNVQVGDLIYGQFVVANKDMEPEMVCIDSCGRANGMGVIGQDGLLFKVTLGLIRKLLAPDCEIIQEVGKLYPLEIVFGMNGRIWVKAKTIQQTLILANILEACEHMTSDQRKQIFSRLAES

SEQ ID NO: 863920 - protein, 275 aa, Homo sapiens; identical to SEQ ID NO: 863914

SEQ ID NO: 863921 - protein, 275 aa, Homo sapiens; identical to SEQ ID NO: 863914

SEQ ID NO: 863922 - protein, 173 aa, Homo sapiens; identical to SEQ ID NO: 863916

SEQ ID NO: 863923 - protein, 195 aa, Homo sapiens
GRPPSEGPRLPVGRVLEVEDGAVGAGAEYVPVKGDHVIGIVTAKSGDIFKVDVGGSEPASLSYLSFEGATKRNRPNVQVGDLIYGQFVVANKDMEPEMVCIDSCGRANGMGVIGQDGLLFKVTLGLIRKLLAPDCEIIQEVGKLYPLEIVFGMNGRIWVKAKTIQQTLILANILEACEHMTSDQRKQIFSRLAES

SEQ ID NO: 863924 - protein, 218 aa, Homo sapiens
RKRCLVEPAMAEPASVAAESLAGSRARAARTVLGQVVLPGEELLLPEQEDAEGPGGAVERPLSLNARACSRVRVVCGPGLRRCGDRLLVTKCGRLRHKEPGSGSGGGVYWVDSQQKRYVPVKGDHVIGIVTAKSGDIFKVDVGGSEPASLSYLSFEGATKRNRPNVQVGDLIYGQFVVANKDMEPEMVCIDSCGRANGMGVIGQDGLLFKVTLGLIRK

SEQ ID NO: 863925 - protein, 639 aa, Homo sapiens
MVWEILVSERDIRALIPLAKAEELVNTAPLTGVPQHVPVRLVTVDGGGALVEVTEHVGCESANTQVLQVSEACDAVFVAGKESRGARGVRVDFWWRRLRASLRLTVWAPLLPLRIELTDTTLEQVRGWRVPGPAEGPAEPAAEASDEAERRARGCHLQYQRAGVRFLAPFAAHPLDGGRRLTHLLGPDWLLDVSHLVAPHARVLDSRVASLEGGRVVVGREPGVTSIEVRSPLSDSILGEQALAVTDDKVSVLELRVQPVMGISLTLSRGTAHPGEVTATCWAQSALPAPKQEVALSLWLSFSDHTVAPAELYDRRDLGLSVSAEEPGAILPAEEQGAQLGVVVSGAGAEGLPLHVALHPPEPCRRGRHRVPLASGTAWLGLPPASTPAPALPSSPAWSPPATEATMGGKRQVAGSVGGNTGVRGKFERAEEEARKEETEAREEEEEEEEEMVPAPQHVTELELGMYALLGVFCVAIFIFLVNGVVFVLRYQRKEPPDSATDPTSPQPHNWVWLGTDQEELSRQLDRQSPGPPKGEGSCPCESGGGGEAPTLAPGPPGGTTSSSSTLARKEAGGRRKRVEFVTFAPAPPAQSPEEPVGAPAVQSILVAGEEDIRWVCEDMGLKDPEELRNYMERIRGSS

SEQ ID NO: 863926 - protein, 1020 aa, Homo sapiens [sequence omitted]

SEQ ID NO: 863927 - protein, 1020 aa, Homo sapiens [sequence omitted]

SEQ ID NO: 863928 - protein, 1020 aa, Homo sapiens [sequence omitted]

SEQ ID NO: 863929 - protein, 1020 aa, Homo sapiens [sequence omitted]

SEQ ID NO: 863930 - protein, 436 aa, Homo sapiens
VVRGEGTFTALFSLPCPQLLCPSMAPGSAPASSGAVIISPSYASSVDCGQAPLDPVYLPAALELLDAPEHFRVQQVGHYPPANSSLSSRSETFLLLQPWPRAQPLLRASYPPFATQQVVPPRVTEPHQRPVPWDVRAVSVEAAVTPAEPYARVLFHLKGQDWPPGSGSLPCARLHATHPAGTAHQACRFQPSLGACVVELELPSHWFSQASTTRAELAYTLEPAAEGPGGCGSGEENDPGEQALPVGGVELRPADPPQYQEVPLDEAVTLRVPDMPVRPGQLFSATLLLRHNFTASLLTLRIKVKKGLHVTAARPAQPTLWTAKLDRFKGSRHHTTLITCHRAGLTEPDSSSPLELSEFLWVDFVVENSTGGGVAVTRPVTWQLEYPGQAPEAEKDKMVWEILVSERDIRALIPLAKVRRPPSLPGKAGGQVPGAP

SEQ ID NO: 863931 - protein, 549 aa, Homo sapiens
MSAFEKQELLVIRSRRGRAAGLQQLGPGQAGAAQRCRPVPASPPCRPAEPAAEASDEAERRARGCHLQYQRAGVRFLAPFAAHPLDGGRRLTHLLGPDWLLDVSHLVAPHARVLDSRVASLEGGRVVVGREPGVTSIEVRSPLSDSILGEQALAVTDDKVSVLELRVQPVMGISLTLSRGTAHPGEVTATCWAQSALPAPKQEVALSLWLSFSDHTVAPAELYDRRDLGLSVSAEEPGAILPAEEQGAQLGVVVSGAGAEGLPLHVALHPPEPCRRGRHRVPLASGTAWLGLPPASTPAPALPSSPAWSPPATEATMGGKRQVAGSVGGNTGVRGKFERAEEEARKEETEAREEEEEEEEEMVPAPQHVTELELGMYALLGVFCVAIFIFLVNGVVFVLRYQRKEPPDSATDPTSPQPHNWVWLGTDQEELSRQLDRQSPGPPKGEGSCPCESGGGGEAPTLAPGPPGGTTSSSSTLARKEAGGRRKRVEFVTFAPAPPAQSPEEPVGAPAVQSILVAGEEDIRWVCEDMGLKDPEELRNYMERIRGSS

SEQ ID NO: 863932 - protein, 1160 aa, Homo sapiens
MAGRTTAAPRGPYGPWLCLLVALALDVVRVDCGQAPLDPVYLPAALELLDAPEHFRVQQVGHYPPANSSLSSRSETFLLLQPWPRAQPLLRASYPPFATQQVVPPRVTEPHQRPVPWDVRAVSVEAAVTPAEPYARVLFHLKGQDWPPGSGSLPCARLHATHPAGTAHQACRFQPSLGACVVELELPSHWFSQASTTRAELAYTLEPAAEGPGGCGSGEENDPGEQALPVGGVELRPADPPQYQEVPLDEAVTLRVPDMPVRPGQLFSATLLLRHNFTASLLTLRIKVKKGLHVTAARPAQPTLWTAKLDRFKGSRHHTTLITCHRAGLTEPDSSSPLELSEFLWVDFVVENSTGGGVAVTRPVTWQLEYPGQAPEAEKDKMVWEILVSERDIRALIPLAKAEELVNTAPLTGVPQHVPVRLVTVDGGGALVEVTEHVGCESANTQVLQVSEACDAVFVAGKESRGARGVRVDFWWRRLRASLRLTVWAPLLPLRIELTDTTLEQVRGWRVPGPAEGPAEPAAEASDEAERRARGCHLQYQRAGVRFLAPFAAHPLDGGRRLTHLLGPDWLLDVSHLVAPHARVLDSRVASLEGGRVVVGREPGVTSIEVRSPLSDSILGEQALAVTDDKVSVLELRVQPVMGISLTLSRGTAHPGEVTATCWAQSALPAPKQVTVGGSGGGGQHLQMGAHGRGEWEEGTLVPRPLRVFRVRTDSVRYVSSLQLEVIKQWLEYGSGRLVRWLYLRTLPITQTLGLSGRQVIDTRPLSPCVCLSACVSVFSLVSPPCGLSLWEWFLCACVRALACLCLCLCAPQEVALSLWLSFSDHTVAPAELYDRRDLGLSVSAEEPGAILPAEEQGAQLGVVVSGAGAEGLPLHVALHPPEPCRRGRHRVPLASGTAWLGLPPASTPAPALPSSPAWSPPATEATMGGKRQVAGSVGGNTGVRGKFERAEEEARKEETEAREEEEEEEEEMVPAPQHVTELELGMYALLGVFCVAIFIFLVNGVVFVLRYQRKEPPDSATDPTSPQPHNWVWLGTDQEELSRQLDRQSPGPPKGEGSCPCESGGGGEAPTLAPGPPGGTTSSSSTLARKEAGGRRKRVEFVTFAPAPPAQSPEEPVGAPAVQSILVAGEEDIRWVCEDMGLKDPEELRNYMERIRGSS

SEQ ID NO: 863933 - protein, 1211 aa, Homo sapiens
MAGRTTAAPRGPYGPWLCLLVALALDVVRVDCGQAPLDPVYLPAALELLDAPEHFRVQQVGHYPPANSSLSSRSETFLLLQPWPRAQPLLRASYPPFATQQVVPPRVTEPHQRPVPWDVRAVSVEAAVTPAEPYARVLFHLKGQDWPPGSGSLPCARLHATHPAGTAHQACRFQPSLGACVVELELPSHWFSQASTTRAELAYTLEPAAEGPGGCGSGEENDPGEQALPVGGVELRPADPPQYQEVPLDEAVTLRVPDMPVRPGQLFSATLLLRHNFTASLLTLRIKVKKGLHVTAARPAQPTLWTAKLDRFKGSRHHTTLITCHRAGLTEPDSSSPLELSEFLWVDFVVENSTGGGVAVTRPVTWQLEYPGQAPEAEKDKMVWEILVSERDIRALIPLAKAEELVNTAPLTGVPQHVPVRLVTVDGGGALVEVTEHVGCESANTQVLQVSEACDAVFVGVSGGLRKLAGLGESHWDGEGAGDTAMGPSRGQKNCPVACSSFCPPPPWAAQPMIAFCEIADFRIPLLLPCLTSPVAPSTSYSTSVLVNVACPSFPRSSPENVSPLKLRSVYAGRTLRAYDDTELQEMNTLGGGSPKPRERWPTPLESSFQALQRVSAPRVPVRERLPCGPLGSKSGDRGTAPVGSGLGRLACRWKGLTPRGADVAFEKQELLVIRSRRGRAAGLQQLGPGQAGAAQRCRPVPASPPCRPAEPAAEASDEAERRARGCHLQYQRAGVRFLAPFAAHPLDGGRRLTHLLGPDWLLDVSHLVAPHARVLDSRVASLEGGRVVVGREPGVTSIEVRSPLSDSILGEQALAVTDDKVSVLELRVQPVMGISLTLSRGTAHPGEVTATCWAQSALPAPKQEVALSLWLSFSDHTVAPAELYDRRDLGLSVSAEEPGAILPAEEQGAQLGVVVSGAGAEGLPLHVALHPPEPCRRGRHRVPLASGTAWLGLPPASTPAPALPSSPAWSPPATEATMGGKRQVAGSVGGNTGVRGKFERAEEEARKEETEAREEEEEEEEEMVPAPQHVTELELGMYALLGVFCVAIFIFLVNGVVFVLRYQRKEPPDSATDPTSPQPHNWVWLGTDQEELSRQLDRQSPGPPKGEGSCPCESGGGGEAPTLAPGPPGGTTSSSSTLARKEAGGRRKRVEFVTFAPAPPAQSPEEPVGAPAVQSILVAGEEDIRWVCEDMGLKDPEELRNYMERIRGSS

SEQ ID NO: 863934 - protein, 632 aa, Homo sapiens
SSTSKGRIGHQGLAACPVPGSMPHTLDVVRVDCGQAPLDPVYLPAALELLDAPEHFRVQQVGHYPPANSSLSSRSETFLLLQPWPRAQPLFRASLRLTVWAPLLPLRIELTDTTLEQVRGWRVPGPAEGPAEPAAEASDEAERRARGCHLQYQRAGVRFLAPFAAHPLDGGRRLTHLLGPDWLLDVSHLVAPHARVLDSRVASLEGGRVVVGREPGVTSIEVRSPLSDSILGEQALAVTDDKVSVLELRVQPVMGISLTLSRGTAHPGEVTATCWAQSALPAPKQEVALSLWLSFSDHTVAPAELYDRRDLGLSVSAEEPGAILPAEEQGAQLGVVVSGAGAEGLPLHVALHPPEPCRRGRHRVPLASGTAWLGLPPASTPAPALPSSPAWSPPATEATMGGKRQVAGSVGGNTGVRGKFERAEEEARKEETEAREEEEEEEEEMVPAPQHVTELELGMYALLGVFCVAIFIFLVNGVVFVLRYQRKEPPDSATDPTSPQPHNWVWLGTDQEELSRQLDRQSPGPPKGEGSCPCESGGGGEAPTLAPGPPGGTTSSSSTLARKEAGGRRKRVEFVTFAPAPPAQSPEEPVGAPAVQSILVAGEEDIRWVCEDMGLKDPEELRNYMERIRGSS

SEQ ID NO: 863935 - protein, 205 aa, Homo sapiens
MAGAAGLTAEVSWKVLERRARTKRSGSVYEPLKSINLPRPDNETLWDKLDHYYRIVKSTLLLYQSPTTGLFPTKTCGGDQKAKIQDSLYCAAGAWALALAYRRIDDDKGRTHELEHSAIKCMRGILYCYMRQADKVQQFKQDPRPTTCLHSVFNVHTGDELLSYEEYGHLQINAVSLYLLYLVEMISSGLQIIYNTDEMESCSVT

SEQ ID NO: 863936 - protein, 1093 aa, Homo sapiens
MAGAAGLTAEVSWKVLERRARTKRSGSVYEPLKSINLPRPDNETLWDKLDHYYRIVKSTLLLYQSPTTGLFPTKTCGGDQKAKIQDSLYCAAGAWALALAYRRIDDDKGRTHELEHSAIKCMRGILYCYMRQADKVQQFKQDPRPTTCLHSVFNVHTGDELLSYEEYGHLQINAVSLYLLYLVEMISSGLQIIYNTDEVSFIQNLVFCVERVYRVPDFGVWERGSKYNNGSTELHSSSVGLAKAALEAINGFNLFGNQGCSWSVIFVDLDAHNRNRQTLCSLLPRESRSHNTDAALLPCISYPAFALDDEVLFSQTLDKVVRKLKGKYGFKRFLRDGYRTSLEDPNRCYYKPAEIKLFDGIECEFPIFFLYMMIDGVFRGNPKQVQEYQDLLTPVLHHTTEGYPVVPKYYYVPADFVEYEKNNPGSQKRFPSNCGRDGKLFLWGQALYIIAKLLADELISPKDIDPVQRYVPLKDQRNVSMRFSNQGPLENDLVVHVALIAESQRLQVFLNTYGIQTQTPQQVEPIQIWPQQELVKAYLQLGINEKLGLSGRPDRPIGCLGTSKIYRILGKTVVCYPIIFDLSDFYMSQDVFLLIDDIKNALQFIKQYWKMHGRPLFLVLIREDNIRGSRFNPILDMLAALKKGIIGGVKVHVDRLQTLISGAVVEQLDFLRISDTEELPEFKSFEELEPPKHSKVKRQSSTPSAPELGQQPDVNISEWKDKPTHEILQKLNDCSCLASQAILLGILLKREGPNFITKEGTVSDHIERVYRRAGSQKLWSVVRRAASLLSKVVDSLAPSITNVLVQGKQVTLGAFGHEEEVISNPLSPRVIQNIIYYKCNTHDEREAVIQQELVIHIGWIISNNPELFSGMLKIRIGWIIHAMEYELQIRGGDKPALDLYQLSPSEVKQLLLDILQPQQNGRCWLNRRQIDGSLNRTPTGFYDRVWQILERTPNGIIVAGKHLPQQPTLSDMTMYEMNFSLLVEDTLGNIDQPQYRQIVVELLMVVSIVLERNPELEFQDKVDLDRLVKEAFNEFQKDQSRLKEIEKQDDMTSFYNTPPLGKRGTCSYLTKAVMNLLLEGEVKPNNDDPCLIS

SEQ ID NO: 863937 - protein, 1086 aa, Homo sapiens
MACSPDAVVSPSSAFLRSGSVYEPLKSINLPRPDNETLWDKLDHYYRIVKSTLLLYQSPTTGLFPTKTCGGDQKAKIQDSLYCAAGAWALALAYRRIDDDKGRTHELEHSAIKCMRGILYCYMRQADKVQQFKQDPRPTTCLHSVFNVHTGDELLSYEEYGHLQINAVSLYLLYLVEMISSGLQIIYNTDEVSFIQNLVFCVERVYRVPDFGVWERGSKYNNGSTELHSSSVGLAKAALEAINGFNLFGNQGCSWSVIFVDLDAHNRNRQTLCSLLPRESRSHNTDAALLPCISYPAFALDDEVLFSQTLDKVVRKLKGKYGFKRFLRDGYRTSLEDPNRCYYKPAEIKLFDGIECEFPIFFLYMMIDGVFRGNPKQVQEYQDLLTPVLHHTTEGYPVVPKYYYVPADFVEYEKNNPGSQKRFPSNCGRDGKLFLWGQALYIIAKLLADELISPKDIDPVQRYVPLKDQRNVSMRFSNQGPLENDLVVHVALIAESQRLQVFLNTYGIQTQTPQQVEPIQIWPQQELVKAYLQLGINEKLGLSGRPDRPIGCLGTSKIYRILGKTVVCYPIIFDLSDFYMSQDVFLLIDDIKNALQFIKQYWKMHGRPLFLVLIREDNIRGSRFNPILDMLAALKKGIIGGVKVHVDRLQTLISGAVVEQLDFLRISDTEELPEFKSFEELEPPKHSKVKRQSSTPSAPELGQQPDVNISEWKDKPTHEILQKLNDCSCLASQAILLGILLKREGPNFITKEGTVSDHIERVYRRAGSQKLWSVVRRAASLLSKVVDSLAPSITNVLVQGKQVTLGAFGHEEEVISNPLSPRVIQNIIYYKCNTHDEREAVIQQELVIHIGWIISNNPELFSGMLKIRIGWIIHAMEYELQIRGGDKPALDLYQLSPSEVKQLLLDILQPQQNGRCWLNRRQIDGSLNRTPTGFYDRVWQILERTPNGIIVAGKHLPQQPTLSDMTMYEMNFSLLVEDTLGNIDQPQYRQIVVELLMVVSIVLERNPELEFQDKVDLDRLVKEAFNEFQKDQSRLKEIEKQDDMTSFYNTPPLGKRGTCSYLTKAVMNLLLEGEVKPNNDDPCLIS

SEQ ID NO: 863938 - protein, 1086 aa, Homo sapiens; identical to SEQ ID NO: 863937

SEQ ID NO: 863939 - protein, 1066 aa, Homo sapiens
MACSPDAVVSPSSAFLRSGSVYEPLKSINLPRPDNETLWDKLDHYYRIVKSTLLLYQSPTTGLFPTKTCGGDQKAKIQDSLYCAAGAWALALAYRRIDDDKGRTHELEHSAIKCMRGILYCYMRQADKVQQFKQDPRPTTCLHSVFNVHTGDELLSYEEYGHLQINAVSLYLLYLVEMISSGLQIIYNTDEVSFIQNLVFCVERVYRVPDFGVWERGSKYNNGSTELHSSSVGLAKAALEAINGFNLFGNQGCSWSVIFVDLDAHNRNRQTLCSLLPRESRSHNTDAALLPCISYPAFALDDEVLFSQTLDKVVRKLKGKYGFKRFLRDGYRTSLEDPNRCYYKPAEIKLFDGIECEFPIFFLYMMIDGVFRGNPKQVQEYQDLLTPVLHHTTEGYPVVPKYYYVPADFVEYEKNNPGSQKRFPSNCGRDGKLFLWGQALYIIAKLLADELISPKDIDPVQRYVPLKDQRNVSMRFSNQGPLENDLVVHVALIAESQRLQVFLNTYGIQTQTPQQVEPIQIWPQQELVKAYLQLGINEKLGLSGRPDRPIGCLGTSKIYRILGKTVVCYPIIFDLSDFYMSQDVFLLIDDIKNALQFIKQYWKMHGRPLFLVLIREDNIRGSRFNPILDMLAALKKGIIGGVKVHVDRLQTLISGAVVEQLDFLRISDTEELPEFKSFEELEPPKHSKVKRQSSTPSAPELGQQPDVNISEWKDKPTHEILQKLNDCSCLASQAILLGILLKREGPNFITKEGTVSDHIERVYRRAGSQKLWSVVRRAASLLSKVVDSLAPSITNVLVQGKQVTLGAFGHEEEVISNPLSPRVIQNIIYYKCNTHDEREAVIQQELVIHIGWIISNNPELFSGMLKIRIGWIIHAMEYELQIRGGDKPALDLYQLSPSEVKQLLLDILQPQQNGRCWLNRRQIDGSLNRTPTGFYDRVWQILERTPNGIIVAGKHLPQQPTLSDMTMYEMNFSLLVEDTLGNIDQPQYRQIVVELLMVVSIVLERNPELEFQDKVDLDRLVKEAFNEFQKDQSRLKEIEKQLTQILPVNSLQTEDRMPCLLFSFVG

SEQ ID NO: 863940 - protein, 334 aa, Homo sapiens
MHSSSFRFVNIWPALFFAPRSVVRRAASLLSKVVDSLAPSITNVLVQGKQVTLGAFGHEEEVISNPLSPRVIQNIIYYKCNTHDEREAVIQQELVIHIGWIISNNPELFSGMLKIRIGWIIHAMEYELQIRGGDKPALDLYQLSPSEVKQLLLDILQPQQNGRCWLNRRQIDGSLNRTPTGFYDRVWQILERTPNGIIVAGKHLPQQPTLSDMTMYEMNFSLLVEDTLGNIDQPQYRQIVVELLMVVSIVLERNPELEFQDKVDLDRLVKEAFNEFQKDQSRLKEIEKQDDMTSFYNTPPLGKRGTCSYLTKAVMNLLLEGEVKPNNDDPCLIS

SEQ ID NO: 863941 - protein, 1085 aa, Homo sapiens
MACSPDAVVSPSSAFLRSGSVYEPLKSINLPRPDNETLWDKLDHYYRIVKSTLLLYQSPTTGLFPTKTCGGDQKAKIQDSLYCAAGAWALALAYRRIDDDKGRTHELEHSAIKCMRGILYCYMRQADKVQQFKQDPRPTTCLHSVFNVHTGDELLSYEEYGHLQINAVSLYLLYLVEMISSGLQIIYNTDEVSFIQNLVFCVERVYRVPDFGVWERGSKYNNGSTELHSSSVGLAKAALEAINGFNLFGNQGCSWSVIFVDLDAHNRNRQTLCSLLPRESRSHNTDAALLPCISYPAFALDDEVLFSQTLDKVVRKLKGKYGFKRFLRDGYRTSLEDPNRCYYKPAEIKLFDGIECEFPIFFLYMMIDGVFRGNPKQVQEYQDLLTPVLHHTTEGYPVVPKYYYVPADFVEYEKNNPGSQKRFPSNCGRDGKLFLWGQALYIIAKLLADELISPKDIDPVQRYVPLKDQRNVSMRFSNQGPLENDLVVHVALIAESQRLQVFLNTYGIQTQTPQQVEPIQIWPQQELVKAYLQLGINEKLGLSGRPDRPIGCLGTSKIYRILGKTVVCYPIIFDLSDFYMSQDVFLLIDDIKNALQFIKQYWKMHGRPLFLVLIREDNIRGSRFNPILDMLAALKKGIIGGVKVHVDRLQTLISGAVVEQLDFLRISDTEELPEFKSFEELEPPKHSKVKRQSSTPSAPELGQQPDVNISEWKDKPTHEILQKLNDCSCLASQAILLGILLKREGPNFITKEGTVSDHIERVYRRAGSQKLWSVVRRAASLLSKVVDSLAPSITNVLVQGKQVTLGAFGHEEEVISNPLSPRVIQNIIYYKCNTHDEREAVIQQELVIHIGWIISNNPELFSGMLKIRIGWIIHAMEYELQIRGGDKPALDLYQLSPSEVKQLLLDILQPQQNGRCWLNRRQIDGSLNRTPTGFYDRVWQILERTPNGIIVAGKHLPQQPTLSDMTMYEMNFSLLVEDTLGNIDQPQYRQIVVELLMVVSIVLERNPELEFQDKVDLDRLVKEAFNEFQKDQSRLKEIEKQDDMTSFYNTPPLGKRGTCSYLTKAVMNLLLEGEPLIYELSMLGR

SEQ ID NO: 863942 - protein, 791 aa, Homo sapiens [sequence omitted]

SEQ ID NO: 863943 - protein, 896 aa, Homo sapiens
MACSPDAVVSPSSAFLRSGSVYEPLKSINLPRPDNETLWDKLDHYYRIVKSTLLLYQSPTTGLFPTKTCGGDQKAKIQDSLYCAAGAWALALAYRRIDDDKGRTHELEHSAIKCMRGILYCYMRQADKVQQFKQDPRPTTCLHSVFNVHTGDELLSYEEYGHLQINAVSLYLLYLVEMISSGLQIIYNTDEVSFIQNLVFCVERVYRVPDFGVWERGSKYNNGSTELHSSSVGLAKAALEAINGFNLFGNQGCSWSVIFVDLDAHNRNRQTLCSLLPRESRSHNTDAALLPCISYPAFALDDEVLFSQTLDKVVRKLKGKYGFKRFLRDGYRTSLEDPNRCYYKPAEIKLFDGIECEFPIFFLYMMIDGVFRGNPKQVQEYQDLLTPVLHHTTEGYPVVPKYYYVPADFVEYEKNNPGSQKRFPSNCGRDGKLFLWGQALYIIAKLLADELISPKDIDPVQRYVPLKDQRNVSMRFSNQGPLENDLVVHVALIAESQRLQVFLNTYGIQTQTPQQVEPIQIWPQQELVKAYLQLGINEKLGLSGRPDRPIGCLGTSKIYRILGKTVVCYPIIFDLSDFYMSQDVFLLIDDIKNALQFIKQYWKMHGRPLFLVLIREDNIRGSRFNPILDMLAALKKGIIGGVKVHVDRLQTLISGAVVEQLDFLRISDTEELPEFKSFEELEPPKHSKVKRQSSTPSAPELGQQPDVNISEWKDKPTHEILQKLNDCSCLASQAILLGILLKREGPNFITKEGTVSDHIERVYRRAGSQKLWSVVRRAASLLSKVVDSLAPSITNVLVQGKQVTLGAFGHEEEVISNPLSPRVIQNIIYYKCNTHDEREAVIQQELVIHIGWIISNNPELFSGMLKIRIGFAKAVCSHKRSSPWRRGPFQPWLSPL

SEQ ID NO: 863944 - protein, 453 aa, Homo sapiens
MACSPDAVVSPSSAFLRSGSVYEPLKSINLPRPDNETLWDKLDHYYRIVKSTLLLYQSPTTGLFPTKTCGGDQKAKIQDSLYCAAGAWALALAYRRIDDDKGRTHELEHSAIKCMRGILYCYMRQADKVQQFKQDPRPTTCLHSVFNVHTGDELLSYEEYGHLQINAVSLYLLYLVEMISSGLQIIYNTDEVSFIQNLVFCVERVYRVPDFGVWERGSKYNNGSTELHSSSVGLAKAALEAINGFNLFGNQGCSWSVIFVDLDAHNRNRQTLCSLLPRESRSHNTDAALLPCISYPAFALDDEVLFSQTLDKVVRKLKGKYGFKRFLRDGYRTSLEDPNRCYYKPAEIKLFDGIECEFPIFFLYMMIDGVFRGNPKQVQEYQDLLTPVLHHTTEGYPVVPKYYYVPADFVEYEKNNPGSQKRFPSNCGRDGKLFLWGQALYIIAKLLETLPLS

SEQ ID NO: 863945 - protein, 257 aa, Homo sapiens
  misc_feature (239)..(239): Xaa can be any naturally occurring amino acid
MAGAAGLTAEVSWKVLERRARTKRSGSVYEPLKSINLPRPDNETLWDKLDHYYRIVKSTLLLYQSPTTGLFPTKTCGGDQKAKIQDSLYCAAGAWALALAYRRIDDDKGRTHELEHSAIKCMRGILYCYMRQADKVQQFKQDPRPTTCLHSVFNVHTGDELLSYEEYGHLQINAVSLYLLYLVEMISSGLQIIYNTDEVSFIQNLVFCVERVYRVPDFGVWERGSKYNNGSTELHSSSXGLASWSSIFGDLDAHSHG

SEQ ID NO: 863946 - protein, 1093 aa, Homo sapiens; identical to SEQ ID NO: 863936

SEQ ID NO: 863947 - protein, 1086 aa, Homo sapiens; identical to SEQ ID NO: 863937

SEQ ID NO: 863948 - protein, 223 aa, Homo sapiens
MLKIRIGWIIHAMEYELQIRGGDKPALDLYQLSPSEVKQLLLDILQPQQNGRCWLNRRQIDGSLNRTPTGFYDRVWQILERTPNGIIVAGKHLPQQPTLSDMTMYEMNFSLLVEDTLGNIDQPQYRQIVVELLMVVSIVLERNPELEFQDKVDLDRLVKEAFNEFQKDQSRLKEIEKQDDMTSFYNTPPLGKRGTCSYLTKAVMNLLLEGEVKPNNDDPCLIS

SEQ ID NO: 863949 - protein, 1059 aa, Homo sapiens
MACSPDAVVSPSSAFLRSGSVYEPLKSINLPRPDNETLWDKLDHYYRIVKSTLLLYQSPTTGLFPTKTCGGDQKAKIQDSLYCAAGAWALALAYRRIDDDKGRTHELEHSAIKCMRGILYCYMRQADKVQQFKQDPRPTTCLHSVFNVHTGDELLSYEEYGHLQINAVSLYLLYLVEMISSGLQIIYNTDEVSFIQNLVFCVERVYRVPDFGVWERGSKYNNGSTELHSSSVGLAKAALEAINGFNLFGNQGCSWSVIFVDLDAHNRNRQTLCSLLPRESRSHNTDAALLPCISYPAFALDDEVLFSQTLDKVVRKLKGKYGFKRFLRDGYRTSLEDPNRCYYKPAEIKLFDGIECEFPIFFLYMMIDGVFRGNPKQVQEYQDLLTPVLHHTTEGYPVVPKYYYVPADFVEYEKNNPGSQKRFPSNCGRDGKLFLWGQALYIIAKLLADELISPKDIDPVQRYVPLKDQRNVSMRFSNQGPLENDLVVHVALIAESQRLQVFLNTYGIQTQTPQQVEPIQIWPQQELVKAYLQLGINEKLGLSGRPDRPIGCLGTSKIYRILGKTVVCYPIIFDLSDFYMSQDVFLLIDDIKNALQFIKQYWKMHGRPLFLVLIREDNIRGSRFNPILDMLAALKKGIIGGVKVHVDRLQTLISGAVVEQLDFLRISDTEELPEFKSFEELEPPKHSKVKRQSSTPSAPELGQQPDVNISEWKDKPTHEILQKLNDCSCLASQAILLGILLKREGPNFITKEGTVSDHIERVYRRAGSQKLWSVVRRAASLLSKVVDSLAPSITNVLVQGKQVTLGAFGHEEEVISNPLSPRVIQNIIYYKCNTHDEREAVIQQELVIHIGWIISNNPELFSGMLKIRIGWIIHAMEYELQIRGGDKPALDLYQLSPSEVKQLLLDILQPQQNGRCWLNRRQIDGSLNRTPTGFYDRVWQILERTPNGIIVAGKHLPQQPTLSDMTMYEMNFSLLVEDTLGNIDQPQYRQIVVELLMVVSIVLERNPELEFQDKVDLDRLVKEAFNEFQKDQSRLKEIEKQDDMTSFYNTPPLGSQAKQ

SEQ ID NO: 863950 - protein, 181 aa, Homo sapiens
NSETFAFCYRCWLNRRQIDGSLNRTPTGFYDRVWQILERTPNGIIVAGKHLPQQPTLSDMTMYEMNFSLLVEDTLGNIDQPQYRQIVVELLMVVSIVLERNPELEFQDKVDLDRLVKEAFNEFQKDQSRLKEIEKQDDMTSFYNTPPLGKRGTCSYLTKAVMNLLLEGEVKPNNDDPCLIS

SEQ ID NO: 863951 - protein, 488 aa, Homo sapiens
MACSPDAVVSPSSAFLRSGSVYEPLKSINLPRPDNETLWDKLDHYYRIVKSTLLLYQSPTTGLFPTKTCGGDQKAKIQDSLYCAAGAWALALAYRRIDDDKGRTHELEHSAIKCMRGILYCYMRQADKVQQFKQDPRPTTCLHSVFNVHTGDELLSYEEYGHLQINAVSLYLLYLVEMISSGLQIIYNTDEVSFIQNLVFCVERVYRVPDFGVWERGSKYNNGSTELHSSSVGLAKAALEAINGFNLFGNQGCSWSVIFVDLDAHNRNRQTLCSLLPRESRSHNTDAALLPCISYPAFALDDEVLFSQTLDKVVRKLKGKYGFKRFLRDGYRTSLEDPNRCYYKPAEIKLFDGIECEFPIFFLYMMIDGVFRGNPKQVQEYQDLLTPVLHHTTEGYPVVPKYYYVPADFVEYEKNNPGSQKRFPSNCGRDGKLFLWGQALYIIAKLLADELISPKDIDPVQRYVPLKDQRNVSMRFSNQVDNVSLREV

SEQ ID NO: 863952 - protein, 245 aa, Homo sapiens
MFFFFSVQGCSWSVIFVDLDAHNRNRQTLCSLLPRESRSHNTDAALLPCISYPAFALDDEVLFSQTLDKVVRKLKGKYGFKRFLRDGYRTSLEDPNRCYYKPAEIKLFDGIECEFPIFFLYMMIDGVFRGNPKQVQEYQDLLTPVLHHTTEGYPVVPKYYYVPADFVEYEKNNPGSQKRFPSNCGRDGKLFLWGQALYIIAKLLADELISPKDIDPVQRYVPLKDQRNVSMRFSNQVDNVSLREV

SEQ ID NO: 863953 - protein, 111 aa, Homo sapiens
FHLYVTTTVSNSQQAYQEAFEISKKEMQPTHPIRLGLALNFSVFYYEILNSPEKACSLAKTAFDEAIAELDTLNEESYKDSTLIMQLLRDNLTLWTSENQGDEGDAGEGEN

SEQ ID NO: 863954 - protein, 111 aa, Homo sapiens; identical to SEQ ID NO: 863953

SEQ ID NO: 863955 - protein, 111 aa, Homo sapiens; identical to SEQ ID NO: 863953

SEQ ID NO: 863956 - protein, 111 aa, Homo sapiens; identical to SEQ ID NO: 863953

SEQ ID NO: 863957 - protein, 111 aa, Homo sapiens; identical to SEQ ID NO: 863953

SEQ ID NO: 863958 - protein, 111 aa, Homo sapiens; identical to SEQ ID NO: 863953

SEQ ID NO: 863959 - protein, 111 aa, Homo sapiens; identical to SEQ ID NO: 863953

SEQ ID NO: 863960 - protein, 111 aa, Homo sapiens; identical to SEQ ID NO: 863953

SEQ ID NO: 863961 - protein, 111 aa, Homo sapiens; identical to SEQ ID NO: 863953

SEQ ID NO: 863962 - protein, 111 aa, Homo sapiens; identical to SEQ ID NO: 863953

SEQ ID NO: 863963 - protein, 111 aa, Homo sapiens; identical to SEQ ID NO: 863953

SEQ ID NO: 863964 - protein, 89 aa, Homo sapiens
AAAYYYYCSEFKLLTMYGDMLFVPVTQVSQVHSSQVSAQMCLRRPYIQGSCVNTAVGRIENSQAYQSHRITPLPLIFHLAVESICLSIC

SEQ ID NO: 863965 - protein, 111 aa, Homo sapiens; identical to SEQ ID NO: 863953

SEQ ID NO: 863966 - protein, 111 aa, Homo sapiens; identical to SEQ ID NO: 863953

SEQ ID NO: 863967 - protein, 111 aa, Homo sapiens; identical to SEQ ID NO: 863953

SEQ ID NO: 863968 - protein, 94 aa, Homo sapiens
FHLYVTTTVSNSQQAYQEAFEISKKEMQPTHPIRLGLALNFSVFYYEILNSPEKACSLAKTAFDEAIAELDTLNEESYKDSNSDHASYLGTISL

SEQ ID NO: 863969 - protein, 111 aa, Homo sapiens; identical to SEQ ID NO: 863953

SEQ ID NO: 863970 - protein, 111 aa, Homo sapiens; identical to SEQ ID NO: 863953

SEQ ID NO: 863971 - protein, 111 aa, Homo sapiens; identical to SEQ ID NO: 863953

SEQ ID NO: 863972 - protein, 111 aa, Homo sapiens; identical to SEQ ID NO: 863953

SEQ ID NO: 863973 - protein, 111 aa, Homo sapiens; identical to SEQ ID NO: 863953

SEQ ID NO: 863974 - protein, 111 aa, Homo sapiens; identical to SEQ ID NO: 863953

SEQ ID NO: 863975 - protein, 1011 aa, Homo sapiens
MGAYARASGVCARGCLDSAGPWTMSRALRPPLPPLCFFLLLLAAAGARAGGYETCPTVQPNMLNVHLLPHTHDDVGWLKTVDQYFYGIKNDIQHAGVQYILDSVISALLADPTRRFIYVEIAFFSRWWHQQTNATQEVVRDLVRQGRLEFANGGWVMNDEAATHYGAIVDQMTLGLRFLEDTFGNDGRPRVAWHIDPFGHSREQASLFAQMGFDGFFFGRLDYQDKWVRMQKLEMEQVWRASTSLKPPTADLFTGVLPNGYNPPRNLCWDVLCVDQPLVEDPRSPEYNAKELVDYFLNVATAQGRYYRTNHTVMTMGSDFQYENANMWFKNLDKLIRLVNAQQAKGSSVHVLYSTPACYLWELNKANLTWSVKHDDFFPYADGPHQFWTGYFSSRPALKRYERLSYNFLQVCNQLEALVGLAANVGPYGSGDSAPLNEAMAVLQHHDAVSGTSRQHVANDYARQLAAGWGPCEVLLSNALARLRGFKDHFTFCQQLNISICPLSQTAARFQVIVYNPLGRKVNWMVRLPVSEGVFVVKDPNGRTVPSDVVIFPSSDSQAHPPELLFSASLPALGFSTYSVAQVPRWKPQARAPQPIPRRSWSPALTIENEHIRATFDPDTGLLMEIMNMNQQLLLPVRQTFFWYNASIGDNESDQASGAYIFRPNQQKPLPVSRWAQIHLVKTPLVQEVHQNFSAWCSQVVRLYPGQRHLELEWSVGPIPVGDTWGKEVISRFDTPLETKGRFYTDSNGREILERRRDYRPTWKLNQTEPVAGNYYPVNTRIYITDGNMQLTVLTDRSQGGSSLRDGSLELMVHRRLLKDDGRGVSEPLMENGSGAWVRGRHLVLLDTAQAAAAGHRLLAEQEVLAPQVVLAPGGGAAYNLGAPPRTQFSGLRRDLPPSVHLLTLASWGPEMVLLRLEHQFAVGEDSGRNLSAPVTLNLRDLFSTFTITRLQETTLVANQLREAASRLKWTTNTGPTPHQTPYQLDPANITLEPMEIRTFLASVQWKEVDG

SEQ ID NO: 863976 - protein, 471 aa, Homo sapiens
MGVWVLLIQVFVLGFWVLLPRCGRFWGPLSRHSGRGDHSPGEARFPADAGGREPSRRRCRQKTASAQTKQHIRATFDPDTGLLMEIMNMNQQLLLPVRQTFFWYNASIGDNESDQASGAYIFRPNQQKPLPVSRWAQIHLVKTPLVQEVHQNFSAWCSQVVRLYPGQRHLELEWSVGPIPVGDTWGKEVISRFDTPLETKGRFYTDSNGREILERRRDYRPTWKLNQTEPVAGNYYPVNTRIYITDGNMQLTVLTDRSQGGSSLRDGSLELMVHRRLLKDDGRGVSEPLMENGSGAWVRGRHLVLLDTAQAAAAGHRLLAEQEVLAPQVVLAPGGGAAYNLGAPPRTQFSGLRRDLPPSVHLLTLASWGPEMVLLRLEHQFAVGEDSGRNLSAPVTLNLRDLFSTFTITRLQETTLVANQLREAASRLKWTTNTGPTPHQTPYQLDPANITLEPMEIRTFLASVQWKEVDG

SEQ ID NO: 863977 - protein, 1011 aa, Homo sapiens; identical to SEQ ID NO: 863975

SEQ ID NO: 863978 - protein, 1011 aa, Homo sapiens; identical to SEQ ID NO: 863975

SEQ ID NO: 863979 - protein, 1011 aa, Homo sapiens; identical to SEQ ID NO: 863975

SEQ ID NO: 863980 - protein, 572 aa, Homo sapiens
MAVLQHHDAVSGTSRQHVANDYARQLAAGWGPCEVLLSNALARLRGFKDHFTFCQQLNISICPLSQTAARFQVIVYNPLGRKVNWMVRLPVSEGVFVVKDPNGRTVPSDVVIFPSSDSQAHPPELLFSASLPALGFSTYSVAQVPRWKPQARAPQPIPRRSWSPALTIENEHIRATFDPDTGLLMEIMNMNQQLLLPVRQTFFWYNASIGDNESDQASGAYIFRPNQQKPLPVSRWAQIHLVKTPLVQEVHQNFSAWCSQVVRLYPGQRHLELEWSVGPIPVGDTWGKEVISRFDTPLETKGRFYTDSNGREILERRRDYRPTWKLNQTEPVAGNYYPVNTRIYITDGNMQLTVLTDRSQGGSSLRDGSLELMVHRRLLKDDGRGVSEPLMENGSGAWVRGRHLVLLDTAQAAAAGHRLLAEQEVLAPQVVLAPGGGAAYNLGAPPRTQFSGLRRDLPPSVHLLTLASWGPEMVLLRLEHQFAVGEDSGRNLSAPVTLNLRDLFSTFTITRLQETTLVANQLREAASRLKWTTNTGPTPHQTPYQLDPANITLEPMEIRTFLASVQWKEVDG

SEQ ID NO: 863981 - protein, 572 aa, Homo sapiens; identical to SEQ ID NO: 863980

SEQ ID NO: 863982 - protein, 743 aa, Homo sapiens
MGAYARASGVCARGCLDSAGPWTMSRALRPPLPPLCFFLLLLAAAGARAGGYETCPTVQPNMLNVHLLPHTHDDVGWLKTVDQYFYGIKNDIQHAGVQYILDSVISALLADPTRRFIYVEIAFFSRWWHQQTNATQEVVRDLVRQGRLEFANGGWVMNDEAATHYGAIVDQMTLGLRFLEDTFGNDGRPRVAWHIDPFGHSREQASLFAQMGFDGFFFGRLDYQDKWVRMQKLEMEQVWRASTSLKPPTADLFTGVLPNGYNPPRNLCWDVLCVDQPLVEDPRSPEYNAKELVDYFLNVATAQGRYYRTNHTVMTMGSDFQYENANMWFKNLDKLIRLVNAQQAKGSSVHVLYSTPACYLWELNKANLTWSVKHDDFFPYADGPHQFWTGYFSSRPALKRYERLSYNFLQVCNQLEALVGLAANVGPYGSGDSAPLNEAMAVLQHHDAVSGTSRQHVANDYARQLAAGWGPCEVLLSNALARLRGFKDHFTFCQQLNISICPLSQTAARFQVIVYNPLGRKVNWMVRLPVSEGVFVVKDPNGRTVPSDVVIFPSSDSQAHPPELLFSASLPALGFSTYSVAQVPRWKPQARAPQPIPRRSWSPALTIENEHIRATFDPDTGLLMEIMNMNQQLLLPVRQTFFWYNASIGDNESDQASGAYIFRPNQQKPLPVSRWAQIHLVKTPLVQEVHQNFSAWCSQVVRLYPGQRHLELEWSVGPIPVGDTWGKEVISRFDTPAWSTSLP

SEQ ID NO: 863983 - protein, 812 aa, Homo sapiens
MGAYARASGVCARGCLDSAGPWTMSRALRPPLPPLCFFLLLLAAAGARAGGYETCPTVQPNMLNVHLLPHTHDDVGWLKTVDQYFYGIKNDIQHAGVQYILDSVISALLADPTRRFIYVEIAFFSRWWHQQTNATQEVVRDLVRQGRLEFANGGWVMNDEAATHYGAIVDQMTLGLRFLEDTFGNDGRPRVAWHIDPFGHSREQASLFAQMGFDGFFFGRLDYQDKWVRMQKLEMEQVWRASTSLKPPTADLFTGVLPNGYNPPRNLCWDVLCVDQPLVEDPRSPEYNAKELVDYFLNVATAQGRYYRTNHTVMTMGSDFQYENANMWFKNLDKLIRLVNAQQAKGSSVHVLYSTPACYLWELNKANLTWSVKHDDFFPYADGPHQFWTGYFSSRPALKRYERLSYNFLQVCNQLEALVGLAANVGPYGSGDSAPLNEAMAVLQHHDAVSGTSRQHVANDYARQLAAGWGPCEVLLSNALARLRGFKDHFTFCQQLNISICPLSQTAARFQVIVYNPLGRKVNWMVRLPVSEGVFVVKDPNGRTVPSDVVIFPSSDSQAHPPELLFSASLPALGFSTYSVAQVPRWKPQARAPQPIPRRSWSPALTIENEHIRATFDPDTGLLMEIMNMNQQLLLPVRQTFFWYNASIGDNESDQASGAYIFRPNQQKPLPVSRWAQIHLVKTPLVQEVHQNFSAWCSQVVRLYPGQRHLELEWSVGPIPVGDTWGKEVISRFDTPLETKGRFYTDSNGREILERRRDYRPTWKLNQTEPVAGNYYPVNTRIYITLDPANITLEPMEIRTFLASVQWKEVDG

SEQ ID NO: 863984 - protein, 358 aa, Homo sapiens
MGAYARASGVCARGCLDSAGPWTMSRALRPPLPPLCFFLLLLAAAGARAGGYETCPTVQPNMLNVHLLPHTHDDVGWLKTVDQYFYGIKNDIQHAGVQYILDSVISALLADPTRRFIYVEIAFFSRWWHQQTNATQEVVRDLVRQGRLEFANGGWVMNDEAATHYGAIVDQMTLGLRFLEDTFGNDGRPRVAWHIDPFGHSREQASLFAQMGFDGFFFGRLDYQDKWVRMQKLEMEQVWRASTSLKPPTADLFTGVLPNGYNPPRNLCWDVLCVDQPLVEDPRSPEYNAKELVDYFLNVATAQGRYYRTNHTVMTMGSDFQYENANMWFKNLDPANITLEPMEIRTFLASVQWKEVDG

SEQ ID NO: 863985 - protein, 277 aa, Homo sapiens
KKKKKRVGEPDPKPDQLTPNPRRDYRPTWKLNQTEPVAGNYYPVNTRIYITDGNMQLTVLTDRSQGGSSLRDGSLELMVHRRLLKDDGRGVSEPLMENGSGAWVRGRHLVLLDTAQAAAAGHRLLAEQEVLAPQVVLAPGGGAAYNLGAPPRTQFSGLRRDLPPSVHLLTLASWGPEMVLLRLEHQFAVGEDSGRNLSAPVTLNLRDLFSTFTITRLQETTLVANQLREAASRLKWTTNTGPTPHQTPYQLDPANITLEPMEIRTFLASVQWKEVDG

SEQ ID NO: 863986 - protein, 171 aa, Homo sapiens
LFLSVFLHLLPRLPPRSGVPYPGPPVRHLPPSGLVPMPTWILPLLGLPYQTLTFILIRSSHPLISFDIPTRPYPVSGPRTPTNPRLSPPPGHSPPQVHRRLLKDDGRGVSEPLMENGSGAWVRGRHLVLLDTAQAAAAGHRLLAEQEVLAPQVVLAPGGGAAYNLGAPPRT

SEQ ID NO: 863987 - protein, 1011 aa, Homo sapiens; identical to SEQ ID NO: 863975

SEQ ID NO: 863988 - protein, 875 aa, Homo sapiens
MRRSVKHDDFFPYADGPHQFWTGYFSSRPALKRYERLSYNFLQVCNQLEALVGLAANVGPYGSGDSAPLNEAMAVLQHHDAVSGTSRQHVANDYARQLAAGWGPCEVLLSNALARLRGFKDHFTFCQQLNISICPLSQTAARFQVIVYNPLGRKVNWMVRLPVSEGVFVVKDPNGRTVPSDVSPNNEYSPAGTPPPVGISSSPPWISPASMNTSHSCISLPPSCIFSLCPLISVSPWEHMPPVSGPPFFFFFGDGVSLCHPGWSAVARSWLTSNSACWIIGMSHRAWLVLHFNTPLPQENLLLFMDISFIPENVLPQTSSSPENLPQGFLPLLPPSLPRLHGLSTLPVGFFFHLVNLLCKSFPWNLTVPPPHTPPFPFPISGLFSFLEFFVSMHVQLSMGTLDSVSLLLYPEVVIFPSSDSQAHPPELLFSASLPALGFSTYSVAQVPRWKPQARAPQPIPRRSWSPALTIENEHIRATFDPDTGLLMEIMNMNQQLLLPVRQTFFWYNASIGDNESDQASGAYIFRPNQQKPLPVSRWAQIHLVKTPLVQEVHQNFSAWCSQVVRLYPGQRHLELEWSVGPIPVGDTWGKEVISRFDTPLETKGRFYTDSNGREILERRRDYRPTWKLNQTEPVAGNYYPVNTRIYITDGNMQLTVLTDRSQGGSSLRDGSLELMVHRRLLKDDGRGVSEPLMENGSGAWVRGRHLVLLDTAQAAAAGHRLLAEQEVLAPQVVLAPGGGAAYNLGAPPRTQFSGLRRDLPPSVHLLTLASWGPEMVLLRLEHQFAVGEDSGRNLSAPVTLNLRDLFSTFTITRLQETTLVANQLREAASRLKWTTNTGPTPHQTPYQLDPANITLEPMEIRTFLASVQWKEVDG

SEQ ID NO: 863989 - protein, 1024 aa, Homo sapiens
  misc_feature (1009)..(1009): Xaa can be any naturally occurring amino acid
MGAYARASGVCARGCLDSAGPWTMSRALRPPLPPLCFFLLLLAAAGARAGGYETCPTVQPNMLNVHLLPHTHDDVGWLKTVDQYFYGIKNDIQHAGVQYILDSVISALLADPTRRFIYVEIAFFSRWWHQQTNATQEVVRDLVRQGRLEFANGGWVMNDEAATHYGAIVDQMTLGLRFLEDTFGNDGRPRVAWHIDPFGHSREQASLFAQMGFDGFFFGRLDYQDKWVRMQKLEMEQVWRASTSLKPPTADLFTGVLPNGYNPPRNLCWDVLCVDQPLVEDPRSPEYNAKELVDYFLNVATAQGRYYRTNHTVMTMGSDFQYENANMWFKNLDKLIRLVNAQQAKGSSVHVLYSTPACYLWELNKANLTWSVKHDDFFPYADGPHQFWTGYFSSRPALKRYERLSYNFLQVCNQLEALVGLAANVGPYGSGDSAPLNEAMAVLQHHDAVSGTSRQHVANDYARQLAAGWGPCEVLLSNALARLRGFKDHFTFCQQLNISICPLSQTAARFQVIVYNPLGRKVNWMVRLPVSEGVFVVKDPNGRTVPSDVVIFPSSDSQAHPPELLFSASLPALGFSTYSVAQVPRWKPQARAPQPIPRRSWSPALTIENEHIRATFDPDTGLLMEIMNMNQQLLLPVRQTFFWYNASIGDNESDQASGAYIFRPNQQKPLPVSRWAQIHLVKTPLVQEVHQNFSAWCSQVVRLYPGQRHLELEWSVGPIPVGDTWGKEVISRFDTPLETKGRFYTDSNGREILERRRDYRPTWKLNQTEPVAGNYYPVNTRIYITDGNMQLTVLTDRSQGGSSLRDGSLELMVHRRLLKDDGRGVSEPLMENGSGAWVRGRHLVLLDTAQAAAAGHRLLAEQEVLAPQVVLAPGGGAAYNLGAPPRTQFSGLRRDLPPSVHLLTLASWGPEMVLLRLEHQFAVGEDSGRNLSAPVTLNLRDLFSTFTITRLQETTLVANQLREAASRLKWTTNTGPTPHQTPYQLDPANITLEPMEIRTFLASVQWKEXKDFDSLWGCGIKTLY

SEQ ID NO: 863990 - protein, 481 aa, Homo sapiens
  misc_feature (7)..(7): Xaa can be any naturally occurring amino acid
  misc_feature (14)..(14): Xaa can be any naturally occurring amino acid
KLGNAWXKDPNGRXVPSDVVIFPSSDSQAHPPELLFSASLPALGFSTYSVAQVPRWKPQARAPQPIPRRSWSPALTIENEHIRATFDPDTGLLMEIMNMNQQLLLPVRQTFFWYNASIGDNESDQASGAYIFRPNQQKPLPVSRWAQIHLVKTPLVQEVHQNFSAWCSQVVRLYPGQRHLELEWSVGPIPVGDTWGKEVISRFDTPLETKGRFYTDSNGREILERRRDYRPTWKLNQTEPVAGNYYPVNTRIYITDGNMQLTVLTDRSQGGSSLRDGSLELMVHRRLLKDDGRGVSEPLMENGSGAWVRGRHLVLLDTAQAAAAGHRLLAEQEVLAPQVVLAPGGGAAYNLGAPPRTQFSGLRRDLPPSVHLLTLASWGPEMVLLRLEHQFAVGEDSGRNLSAPVTLNLRDLFSTFTITRLQETTLVANQLREAASRLKWTTNTGPTPHQTPYQLDPANITLEPMEIRTFLASVQWKEVDG

SEQ ID NO: 863991 - protein, 723 aa, Homo sapiens
MGAYARASGVCARGCLDSAGPWTMSRALRPPLPPLCFFLLLLAAAGARAGGYETCPTVQPNMLNVHLLPHTHDDVGWLKTVDQYFYGIKNDIQHAGVQYILDSVISALLADPTRRFIYVEIAFFSRWWHQQTNATQEVVRDLVRQGRLEFANGGWVMNDEAATHYGAIVDQMTLGLRFLEDTFGNDGRPRVAWHIDPFGHSREQASLFAQMGFDGFFFGRLDYQDKWVRMQKLEMEQVWRASTSLKPPTADLFTGVLPNGYNPPRNLCWDVLCVDQPLVEDPRSPEYNAKELVDYFLNVATAQGRYYRTNHTVMTMGSDFQYENANMWFKNLDKLIRLVNAQQAKGSSVHVLYSTPACYLWELNKANLTWSVKHDDFFPYADGPHQFWTGYFSSRPALKRYERLSYNFLQVCNQLEALVGLAANVGPYGSGDSAPLNEAMAVLQHHDAVSGTSRQHVANDYARQLAAGWGPCEVLLSNALARLRGFKDHFTFCQQLNISICPLSQTAARFQVIVYNPLGRKVNWMVRLPVSEGVFVVKDPNGRTVPSDVVIFPSSDSQAHPPELLFSASLPALGFSTYSVAQVPRWKPQARAPQPIPRRSWSPALTIENEHIRATFDPDTGLLMEIMNMNQQLLLPVRQTFFWYNASIGDNESDQAPPGSSGQQTQAPHPTKLRTSWTRPTSRWNPWKSALSWPQFNGRRWMVRSAGMGPPSPSLLLRGQTRL

SEQ ID NO: 863992 - protein, 810 aa, Homo sapiens
MGAYARASGVCARGCLDSAGPWTMSRALRPPLPPLCFFLLLLAAAGARAGGYETCPTVQPNMLNVHLLPHTHDDVGWLKTVDQYFYGIKNDIQHAGVQYILDSVISALLADPTRRFIYVEIAFFSRWWHQQTNATQEVVRDLVRQGRLEFANGGWVMNDEAATHYGAIVDQMTLGLRFLEDTFGNDGRPRVAWHIDPFGHSREQASLFAQMGFDGFFFGRLDYQDKWVRMQKLEMEQVWRASTSLKPPTADLFTGVLPNGYNPPRNLCWDVLCVDQPLVEDPRSPEYNAKELVDYFLNVATAQGRYYRTNHTVMTMGSDFQYENANMWFKNLDKLIRLVNAQQAKGSSVHVLYSTPACYLWELNKANLTWSVKHDDFFPYADGPHQFWTGYFSSRPALKRYERLSYNFLQVCNQLEALVGLAANVGPYGSGDSAPLNEAMAVLQHHDAVSGTSRQHVANDYARQLAAGWGPCEVLLSNALARLRGFKDHFTFCQQLNISICPLSQTAARFQVIVYNPLGRKVNWMVRLPVSEGVFVVKDPNGRTVPSDVVIFPSSDSQAHPPELLFSASLPALGFSTYSVAQVPRWKPQARAPQPIPRRSWSPALTIENEHIRATFDPDTGLLMEIMNMNQQLLLPVRQTFFWYNASIGDNESDQASGAYIFRPNQQKPLPVSRWAQIHLVKTPLVQEVHQNFSAWCSQVVRLYPGQRHLELEWSVGPIPVGDTWGKEVISRFDTPLETKGRFYTDSNGREILERRRDYRPTWKLNQTGSARWRVPHTFSISFPFHSESQEKAGSRKFCVTFSGMFSDSH

SEQ ID NO: 863993 - protein, 339 aa, Homo sapiens
MGAYARASGVCARGCLDSAGPWTMSRALRPPLPPLCFFLLLLAAAGARAGGYETCPTVQPNMLNVHLLPHTHDDVGWLKTVDQYFYGIKNDIQHAGVQYILDSVISALLADPTRRFIYVEIAFFSRWWHQQTNATQEVVRDLVRQGRLEFANGGWVMNDEAATHYGAIVDQMTLGLRFLEDTFGNDGRPRVAWHIDPFGHSREQASLFAQMGFDGFFFGRLDYQDKWVRMQKLEMEQVWRASTSLKPPTADLFTGVLPNGYNPPRNLCWDVLCVDQPLVEDPRSPEYNAKELVDYFLNVATAQTHSSLSNRMKLYLKQKQKQTPQNFQIWKRKNEYEDP

SEQ ID NO: 863994 - protein, 101 aa, Homo sapiens
LLKIVLIQDLFPSTPLPSSVHSGDYGDSGQDPSGTRNTFRRFCSPSFPPSCQLPRPEAHTHANTRNPPPSPHLLSFHIRALNLRGVKSLFEKPKVGRCHYP

SEQ ID NO: 863995 - protein, 1172 aa, Homo sapiens
MFGLKNFEELPRMASDCFPSENRHLEFLLLVFIYVQINLYIYIYTHTYQYKYSFDSRKTRIWRVQLRNLVAHGCWGSSLCWRDTSALGSWGGPGCSHLRVSEKPPSASPPDPAGITSRALHALAEELVCGEDFLGYLYVTVNLQPKQQNTVGGQVHAGPTVTQPWALAHLSGGKVQCCLPWYVFLIDVSPAQQPGLHYKRQECPCKEPSSLDRSFFLCCWMRVSEYALDLILERRSKAMMREAVITQVLKEDIVGGTQGFGGKTLNPASRAQRHTHTSPVAVGDVGWQQPGMYPCHRTAHCGFAHCLRVKLCCCLQKKAFVGCRVESWVRLVSPEEKAYKKWLILSLFSVMQLDSSEIVKSSFSVFLLLMSCTHLFFTWGCEIEFSKVKPDDHSDKGNLNLIHMLCIFDYLFSFLTIKELFFLLRVYLGDFTSLTHHLQMCFCIKFKFSHITSILKVVICWRRKILKTHEGPHSQVFQGKASSPPRSGSQQGSVPLTPDTDPPLQGLLTQLPSLLLPESTDLSQQPAQTTGGYSHVVWGALDLRKAPLSEQMGSCGAQAFLLCSSPFPKQGFNLIYPPCSFLWPFKWGGRDMVGPCHTRAGEATSFDFDRVAGGKVAIKVLLGLLSVQMEPTGFCCNLCVPSARSHQEGWGRANQVVSELTERLHLVVKLMGVQRASGLGEGLRASFLVFIPELLPAHKSDLFEWGRSPSTEKFLWQRSFYLALDPAESSILTALKSRAGEGTQRLGMRLGRPWLPYGQGQGKAPPSQFLKVLSLGSQDFEDDKEHIGTSLLLLVQSFHSPENLAFVAALAAERREEGSRSGGDSEAPSLLSTWIGGEPQGTERSLSIYLPLVPLPSETGLKRVFMCACTHTHEHLYVLMNSFSWLMLFNFCSFPEVDDSKFNVTWLGAVAHTCNPSTLGGQEEADHLRSGVRDQPDRHGETPFLLKIQKLAGRGGARLESQLLRRLRKENHLNPGGGGCSELRSCHCTPAWATERNSVSKKKKKLNVTGVKSEMSGCLALNRELQVLGLSQESNLSRNTFKRKIYMVPMNPVICLGRSCHSSLVPAHTVWSRSCSLLGTGPEPHMRLSAGVRSASPTPQQGPSTAIRLFSVRLGRGQGRSSHPCVEGSRCASEQLLCSEVLGGSDCAIIVIKEKTRPPSFLPCWPLFIEFY

SEQ ID NO: 863996 - protein, 823 aa, Homo sapiens
MQLDSSEIVKSSFSVFLLLMSCTHLFFTWGCEIEFSKVKPDDHSDKGNLNLIHMLCIFCLLVFVFDYKGALFSCSEFDLGDFTSLTHHLQMCFCIKFKFSHITSILKVVICWRRKILKTHEGPHSQVFQGKASSPPRSGSQQGSVPLTPDTDPPLQGLLTQLPSLLLPESTDLSQQPAQTTGGYSHVVWGALDLRKAPLSEQMGSCGAQAFLLCSSPFPKQGFNLIYPPCSFLWPFKWGGRDMVGPCHTRAGEATSFDFDRVAGGKVAIKVLLGLLSVQMEPTGFCCNLCVPSARSHQEGWGRANQVVSELTERLHLVVKLMGVQRASGLGEGLRASFLVFIPELLPAHKSDLFEWGRSPSTEKFLWQRSFYLALDPAESSILTALKSRAGEGTQRLGMRLGRPWLPYGQGQGKAPPSQFLKVLSLGSQDFEDDKEHIGTSLLLLVQSFHSPENLAFVAALAAERREEGSRSGGDSEAPSLLSTWIGGEPQGTERSLSIYLPLVPLPSETGLKRVFMCACTHTHEHLYVLMNSFSWLMLFNFCSFPEVDDSKFNVTWLGAVAHTCNPSTLGGQEEADHLRSGVRDQPDRHGETPFLLKIQKLAGRGGARLESQLLRRLRKENHLNPGGGGCSELRSCHCTPAWATERNSVSKKKKKLNVTGVKSEMSGCLALNRELQVLGLSQESNLSRNTFKRKIYMVPMNPVICLGRSCHSSLVPAHTVWSRSCSLLGTGPEPHMRLSAGVRSASPTPQQGPSTAIRLFSVRLGRGQGRSSHPCVEGSRCASEQLLCSEVLGGSDCAIIVIKEKTRPPSFLPCWPLFIEFY

SEQ ID NO: 863997 - protein, 966 aa, Homo sapiens
MASKRKSTTPCMIPVKTVVLQDASMEAQPAETLPEGPQQDLPPEASAASSEAAQNPSSTDGSTLANGHRSTLDGYLYSCKYCDFRSHDMTQFVGHMNSEHTDFNKDPTFVCSGCSFLAKTPEGLSLHNATCHSGEASFVWNVAKPDNHVVVEQSIPESTSTPDLAGEPSAEGADGQAEIIITKTPIMKIMKGKAEAKKIHTLKENVPSQPVGEALPKLSTGEMEVREGDHSFINGAVPVSQASASSAKNPHAANGPLIGTVPVLPAGIAQFLSLQQQPPVHAQHHVHQPLPTAKALPKVMIPLSSIPTYSAAMDSNSFLKNSFHKFPYPTKAELCYLTVVTKYPEEQLKIWFTAQRLKQGISWSPEEIEDARKKMFNTVIQSVPQPTITVLNTPLVASAGNVQHLIQAALPGHVVGQPEGTGGGLLVTQPLMANGLQATSSPLPLTVTSVPKQPGVAPINTVCSNTTSAVKVVNAAQSLLTACPSITSQAFLDASIYKNKKSHEQLSALKGSFCRNQFPGQSEVEHLTKVTGLSTREVRKWFSDRRYHCRNLKGSRAMIPGDHSSIIIDSVPEVSFSPSSKVPEVTCIPTTATLATHPSAKRQSWHQTPDFTPTKYKERAPEQLRALESSFAQNPLPLDEELDRLRSETKMTRREIDSWFSERRKKVNAEETKKAEENASQEEEEAAEDEGGEEDLASELRVSGENGSLEMPSSHILAERKVSPIKINLKNLRVTEANGRNEIPGLGACDPEDDESNKLAEQLPGKVSCKKTAQQRHLLRQLFVQTQWPSNQDYDSIMAQTGLPRPEVVRWFGDSRYALKNGQLKWYEDYKRGNFPPGLLVIAPGNRELLQDYYMTHKMLYEEDLQNLCDKTQMSSQQVKQWFAEKMGEETRAVADTGSEDQGPGTGELTAVHKGMGDTYSEVSENSESWEPRVPEASSEPFDTSSPQAGRQLGKESTGAMAILCG

SEQ ID NO: 863998 - protein, 1418 aa, Homo sapiens
MSPFSTLISEPPMVWEGITHWPISKGEGWRDLLTSWNYQRRVVFSTKTCMQRSLAEHPECPWLPPQGLAGVLDACPRVLGITGPCEDAFKVLYLCPQTWKQELYFSLTLMSFFELRKLQEMVPLKIRKLAYRAVLNGKSSISPRPVALRVAGKEGRTKDLSTCSSAHFLETTCFPECQATSTRLRGHRHLLGWAELTVLEDPRERARALGKKHWWCFRDLSFSPTQGTGPGRAPCSCGSKDKHGGGPFCLPGEVLLLKPKSCSSKVSSSALPVPIGTTSYLSQTGTCEYLASFAAYFCILNLGSKDVWSQKPLRNCQEWRVIAFLQRTDTWNFSFECLYTCRLIYIYIYTHTHIQYKYSFDSRKTRIWRVQLRNLVAHGCWGSSLCWRDTSALGSWGGPGCSHLRVSEKPPSASPPDPAGITSRALHALAEELVCGEDFLGYLYVTVNLQPKQQNTVGGQVHAGPTVTQPWALAHLSGGKVQCCLPWYVFLIDVSPAQQPGLHYKRQECPCKEPSSLDRSFFLCCWMRVSEYALDLILERRSKAMMREAVITQVLKEDIVGGTQGFGGKTLNPASRAQRHTHTSPVAVGDVGWQQPGMEPCHRTAHCGFAHCLRVKLCCCLQYKAFVGCRVESWVRLVSPEEKAYKKWLNLIPFLCMQLDSSEIVKSSFSVFLLLMSCTHLFFTWGCEIEFSKVKPDDHSDKGNLNLIHMLCIFDYLFSFLTIKELFFLLRVYLGDFTSLTHHLQMCFCIKFKFSHITSILKVVICWRRKILKTHEGPHSQVFQGKASSPPRSGSQQGSVPLTPDTDPPLQGLLTQLPSLLLPESTDLSQQPAQTTGGYSHVVWGALDLRKAPLSEQMGSCGAQAFLLCSSPFPKQGFNLIYPPCSFLWPFKWGGRDMVGPCHTRAGEATSFDFDRVAGGKVAIKVLLGLLSVQMEPTGFCCNLCVPSARSHQEGWGRANQVVSELTERLHLVVKLMGVQRASGLGEGLRASFLVFIPELLPAHKSDLFEWGRSPSTEKFLWQRSFYLALDPAESSILTALKSRAGEGTQRLGMRLGRPWLPYGQGQGKAPPSQFLKVLSLGSQDFEDDKEHIGTSLLLLVQSFHSPENLAFVAALAAERREEGSRSGGDSEAPSLLSTWIGGEPQGTERSLSIYLPLVPLPSGDWLETCVHVACTHTHEHLYVLMNSFSWLMLFNFCSFPEVDDSKFNVTWLGAVAHTCNPSTLGGQEEADHLRSGVRDQPDRHGETPFLLKIQKLAGRGGARLESQLLRRLRKENHLNPGGGGCSELRSCHCTPAWATERNSVSKKKKKLNVTGVKSEMSGCLALNRELQVLGLSQESNLSRNTFKRKIYMVPMNPVICLGRSCHSSLVPAHTVWSRSCSLLGTGPEPHMRLSAGVRSASPYSSAGTQHSNPVVLG

SEQ ID NO: 863999 - protein, 1369 aa, Homo sapiens
MQRSLAEHPECPWLPPQGLAGVLDACPRVLGITGPCEDAFKVLYLCPQTWKQELYFSLTLMSFFELRKLQEMVPLKIRKLAYRAVLNGKSSISPRPVALRVAGKEGRTKDLSTCSSAHFLETTCFPECQATSTRLRGHRHLLGWAELTVLEDPRERARALGKKHWWCFRDRPSPLPRELDLAGHRAHVAPRTSMAVAPSAFQEEVLLLKPKSCSSKVSSSALPVPIGTTSYLSQTGTCEYLASFAAYFCILNLGSKDVWSQKPLRNCQEWRVIAFLQRTDTWNFSFYCLYTCRLIYIYIYTHTHIQYKYSFDSRKTRIWRVQLRNLVAHGCWGSSLCWRDTSALGSWGGPGCSHLRVSEKPPSASPPDPAGITSRALHALAEELVCGEDFLGYLYVTVNLQPKQQNTVGGQVHAGPTVTQPWALAHLSGGKVQCCLPWYVFLIDVSPAQQPGLHYKRQECPCKEPSSLDRSFFLCCWMRVSEYALDLILERRSKAMMREAVITQVLKEDIVGGTQGFGGKTLNPASRAQRHTHTSPVAVGDVGWQQPGMYPCHRTAHCGFAHCLRVKLCCCLQYKAFVGCRVESWVRLVSPEEKAYKKWLILSLFSVMQLDSSEIVKSSFSVFLLLMSCTHLFFTWGCEIEFSKVKPDDHSDKGNLNLIHMLCIFDYLFSFLTIKELFFLLRVYLGDFTSLTHHLQMCFCIKFKFSHITSILKVVICWRRKILKTHEGPHSQVFQGKASSPPRSGSQQGSVPLTPDTDPPLQGLLTQLPSLLLPESTDLSQQPAQTTGGYSHVVWGALDLRKAPLSEQMGSCGAQAFLLCSSPFPKQGFNLIYPPCSFLWPFKWGGRDMVGPCHTRAGEATSFDFDRVAGGKVAIKVLLGLLWVQMEPTGFCCNLCVPSARSHQEGWGRANQVVSELTERLHLVVKLMGVQRASGLGEGLRASFLVFIPELLPAHKSDLFEWGRSPSTEKFLWQRSFYLALDPAESSILTALKSRAGEGTQRLGMRLGRPWLPYGQGQGKAPPSQFLKVLSLGSQDFEDDKEHIGTSLLLLVQSFHSPENLAFVAALAAERREEGSRSGGDSEAPSLLSTWIGGEPQGTERSLSIYLPLVPLPSGDWLETCVHVRVHTHNEHLYVLMNSFSWLMLFNFCSFPEVDDSKFNVTWLGAVAHTCNPSTLGGQEEADHLRSGVRDQPDRHGETPFLLKIQKLAGRGGARLESQLLRRLRKENHLNPGGGGCSELRSCHCTPAWATERNSVSKKKKKLNVTGVKSEMSGCLALNRELQVLGLSQESNLSRNTFKRKIYMVPMNPVICLGRSCHSSLVPAHTVWSRSCSLLGTGPEPHMRLSAGVRSASPYSSAGTQHSNPVVLG

SEQ ID NO: 864000 - protein, 1369 aa, Homo sapiens
MQRSLAEHPECPWLPPQGLAGVLDACPRVLGITGPCEDAFKVLYLCPQTWKQELYFSLTLMSFFELRKLQEMVPLKIRKLAYRAVLNGKSSISPRPVALRVAGKEGRTKDLSTCSSAHFLETTCFPECQATSTRLRGHRHLLGWAELTVLEDPRERARALGKKHWWCFRDRPSPLPRELDLAGHRAHVAPRTSMAVAPSAFQERSVLLKPKSCSSKVSSSALPVPIGTTSYLSQTGTCEYLASFAAYFCILNLGSKDVWSQKPLRNCQEWRVIAFLQRTDTWNFSFECLYTCRLIYIYIYTHTHIQYKYSFDSRKTRIWRVQLRNLVAHGCWGSSLCWRDTSALGSWGGPGCSHLRVSEKPPSASPPDPAGITSRALHALAEELVCGEDFLGYLYVTVNLQPKQQNTVGGQVHAGPTVTQPWALAHLSGGKVQCCLPWYVFLIDVSPAQQPGLHYKRQECPCKEPSSLDRSFFLCCWMRVSEYALDLILERSSKAMMREAVITQVLKEDIVGGTQGFGGKTLNPASRAQRHTHTSPVAVGDVGWQQPGMYPCHRTAHCGFAHCLRVKLCCCLQKKAFVGCRVESWVRLVSPEEKAYKKWLILSLFSVMQLDSSEIVKSSFSVFLLLMSCTHLFFTWGCEIEFSKVKPDDHSDKGNLNLIHMLCIFDYLFSFLTIKELFFLLRVYLGDFTSLTHHLQMCFCIKFKFSHITSILKVVICWRRKILKTHEGPHSQVFQGKASSPPRSGSQQGSVPLTPDTDPPLQGLLTQLPSLLLPESTDLSQQPAQTTGGYSHVVWGALDLRKAPLSEQMGSCGAQAFLLCSSPFPKQGFNLIYPPCSFLWPFKWGGRDMVGPCHTRAGEATSFDFDRVAGGKVAIKVLLGLLSVQMEPTGFCCNLCVPSARSHQEGWGRANQVVSELTERLHLVVKLMGVQRASGLGEGLRASFLVFIPELLPAHKSDLFEWGRSPSTEKFLWQRSFYLALDPAESSILTALKSRAGEGTQRLGMRLGRPWLPYGQGQGKAPPSQFLKVLSLGSQDFEDDKEHIGTSLLLLVQSFHSPENLAFVAALAAERREEGSRSGGDSEAPSLLSTWIGGEPQGTERSLSIYLPLVPLPSETGLKRVFMCACTHTHEHLYVLMNSFSWLMLFNFCSFPEVDDSKFNVTWLGAVAHTCNPSTLGGQEEADHLRSGVRDQPDRHGETPFLLKIQKLAGRGGARLESQLLRRLRKENHLNPGGGGCSELRSCHCTPAWATERNSVSKKKKKLNVTGVKSEMSGCLALNRELQVLGLSQESNLSRNTFKRKIYMVPMNPVICLGRSCHSSLVPAHTVWSRSCSLLGTGPEPHMRLSAGVRSASPYSSAGTQHSNPVVLG

SEQ ID NO: 864001 - protein, 1076 aa, Homo sapiens
MLRVSEKPPSASPPDPAGITSRALHALAEELVCGEDFLGYLYVTVNLQPKQQNTVGGQVHAGPTVTQPWALAHLSGGKVQCCLPWYVFLIDVSPAQQPGLHYKRQECPCKEPSSLDRSFFLCCWMRVSEYALDLILERRSKAMMREAVITQVLKEDIVGGTQGFGGKTLNPASRAQRHTHTSPVAVGDVGWQQPGMEPCHRTAHCGFAHCLRVKLCCCLQKKAFVGCRVESWVRLVSPEEKAYKKWLILSLFSVMQLDSSEIVKSSFSVFLLLMSCTHLFFTWGCEIEFSKVKPDDHSDKGNLNLIHMLCIFDYLFSFLTIKELFFLLRVYLGDFTSLTHHLQMCFCIKFKFSHITSILKVVICWRRKILKTHEGPHSQVFQGKASSPPRSGSQQGSVPLTPDTDPPLQGLLTQLPSLLLPESTDLSQQPAQTTGGYSHVVWGALDLRKAPLSEQMGSCGAQAFLLCSSPFPKQGFNLIYPPCSFLWPFKWGGRDMVGPCHTRAGEATSFDFDRVAGGKVAIKVLLGLLSVQMEPTGFCCNLCVPSARSHQEGWGRANQVVSELTERLHLVVKLMGVQRASGLGEGLRASFLVFIPELLPAHKSDLFEWGRSPSTEKFLWQRSFYLALDPAESSILTALKSRAGEGTQRLGMRLGRPWLPYGQGQGKAPPSQFLKVLSLGSQDFEDDKEHIGTSLLLLVQSFHSPENLAFVAALAAERREEGSRSGGDSEAPSLLSTWIGGEPQGTERSLSIYLPLVPLPSETGLKRVFMCACTHTHEHLYVLMNSFSWLMLFNFCSFPEVDDSKFNVTWLGAVAHTCNPSTLGGQEEADHLRSGVRDQPDRHGETPFLLKIQKLAGRGGARLESQLLRRLRKENHLNPGGGGCSELRSCHCTPAWATERNSVSKKKKKLNVTGVKSEMSGCLALNRELQVLGLSQESNLSRNTFKRKIYMVPMNPVICLGRSCHSSLVPAHTVWSRSCSLLGTGPEPHMRLSAGVRSASPTPQQGPSTAIRLFSVRLGRGQGRSSHPCVEGSRCASEQLLCSEVLGGSDCAIIVIKEKTRPPSFLPCWPLFIEFY

SEQ ID NO: 864002 - protein, 986 aa, Homo sapiens
MLALPNSQGYTTKGKNAQCKEPSSLDRSFFLCCWMRVSEYALDLILERRSKAMMREAVITQVLKEDIVGGTQGFGGKTLNPASRAQRHTHTSPVAVGDVGWQQPGMEPCHRTAHCGFAHCLRVKLCCCLQYKAFVGCRVESWVRLVSPEEKAYKKWLILSLFSVMQLDSSEIVKSSFSVFLLLMSCTHLFFTWGCEIEFSKVKPDDHSDKGNLNLIHMLCIFDYLFSFLTIKELFFLLRVYLGDFTSLTHHLQMCFCIKFKFSHITSILKVVICWRRKILKTHEGPHSQVFQGKASSPPRSGSQQGSVPLTPDTDPPLQGLLTQLPSLLLPESTDLSQQPAQTTGGYSHVVWGALDLRKAPLSEQMGSCGAQAFLLCSSPFPKQGFNLIYPPCSFLWPFKWGGRDMVGPCHTRAGEATSFDFDRVAGGKVAIKVLLGLLSVQMEPTGFCCNLCVPSARSHQEGWGRANQVVSELTERLHLVVKLMGVQRASGLGEGLRASFLVLHSWLLPAHKSDLFEWGRSPSTEKFLWQRSFYLALDPAESSILTALKSRAGEGTQRLGMRLGRPWLPYGQGQGKAPPSQFLKVLSLGSQDFEDDKEHIGTSLLLLVQSFHSPENLAFVAALAAERREEGSRSGGDSEAPSLLSTWIGGEPQGTERSLSIYLPLVPLPSGDWLETCVHVRVHTHHEHLYVLMNSFSWLMLFNFCFLSVSGWFKINVTWLGAVAHTCNPSTLGGQEEADHLRSGVRDQPDRHGETPFLLKIQKLAGRGGARLESQLLRRLRKENHLNPGGGGCSELRSCHCTPAWATERNSVSKKKKKLNVTGVKSEMSGCLALNRELQVLGLSQESNLSRNTFKRKIYMVPMNPVICLGRSCHSSLVPAHTVWSRSCSLLGTGPEPHMRLSAGVRSASPTPQQGPSTAIRLFSVRLGRGQGRSSHPCVEGSRCASEQLLCSEVLGGSDCAIIVIKEKTRPPSFLPCWPLFIEFY

SEQ ID NO: 864003 - protein, 956 aa, Homo sapiens
MASKRKSTTPCMIPVKTVVLQDASMEAQPAETLPEGPQQDLPPEASAASSEAAQNPSSTDGSTLANGHRSTLDGYLYSCKYCDFRSHDMTQFVGHMNSEHTDFNKDPTFVCSGCSFLAKTPEGLSLHNATCHSGEASFVWNVAKPDNHVVVEQSIPESTSTPDLAGEPSAEGADGQAEIIITKTPIMKIMKGKAEAKKIHTLKENVPSQPVGEALPKLSTGEMEVREGDHSFINGAVPVSQASASSAKNPHAANGPLIGTVPVLPAGIAQFLSLQQQPPVHAQHHVHQPLPTAKALPKVMIPLSSIPTYSAAMDSNSFLKNSFHKFPYPTKAELCYLTVVTKYPEEQLKIWFTAQRLKQGISWSPEEIEDARKKMFNTVIQSVPQPTITVLNTPLVASAGNVQHLIQAALPGHVVGQPEGTGGGLLVTQPLMANGLQATSSPLPLTVTSVPKQPGVAPINTVCSNTTSAVKVVNAAQSLLTACPSITSQAFLDASIYKNKKSHEQLSALKGSFCRNQFPGQSEVEHLTKVTGLSTREVRKWFSDRRYHCRNLKGSRAMIPGDHSSIIIDSVPEVSFSPSSKVPEVTCIPTTATLATHPSAKRQSWHQTPDFTPTKYKERAPEQLRALESSFAQNPLPLDEELDRLRSETKMTRREIDSWFSERRKKVNAEETKKAEENASQEEEEAAEDEGGEEDLASELRVSGENGSLEMPSSHILAERKVSPIKINLKNLRVTEANGRNEIPGLGACDPEDDESNKLAEQLPGKVSCKKTAQQRHLLRQLFVQTQWPSNQDYDSIMAQTGLPRPEVVRWFGDSRYALKNGQLKWYEDYKRGNFPPGLLVIAPGNRELLQDYYMTHKMLYEEDLQNLCDKTQMSSQQVKQWFAEKMGEETRAVADTGSEDQGPGTGELTAVHKGMGDTYSEVSENSESWEPRVPEASSEPFDTSSPQAGRQLETD

SEQ ID NO: 864004 - protein, 956 aa, Homo sapiens; identical to SEQ ID NO: 864003

SEQ ID NO: 864005 - protein, 568 aa, Homo sapiens
MASKRKSTTPCMIPVKTVVLQDASMEAQPAETLPEGPQQDLPPEASAASSEAAQNPSSTDGSTLANGHRSTLDGYLYSCKYCDFRSHDMTQFVGHMNSEHTDFNKDPTFVCSGCSFLAKTPEGLSLHNATCHSGEASFVWNVAKPDNHVVVEQSIPESTSTPDLAGEPSAEGADGQAEIIITKTPIMKIMKGKAEAKKIHTLKENVPSQPVGEALPKLSTGEMEVREGDHSFINGAVPVSQASASSAKNPHAANGPLIGTVPVLPAGIAQFLSLQQQPPVHAQHHVHQPLPTAKALPKVMIPLSSIPTYSAAMDSNSFLKNSFHKFPYPTKAELCYLTVVTKYPEEQLKIWFTAQRLKQGISWSPEEIEDARKKMFNTVIQSVPQPTITVLNTPLVASAGNVQHLIQAALPGHVVGQPEGTGGGLLVTQPLMANGLQATSSPLPLTVTSVPKQPGVAPINTVCSNTTSAVKVVNAAQSLLTACPSITSQAFLDASIYKNKKSHEQLSALKGSFCRNQFPGQSEVEHLTKVRLGAEVRLGAEVRLGAEVRLGAEVRLGAEVRREQKAPG

SEQ ID NO: 864006 - protein, 266 aa, Homo sapiens
MKLRSSHNASKTLNANNMETLIECQSEGDIKEHPLLASCESEDSICQLIEVKKRKKVLSWPFLMRRLSPASDFSGALETDLKASLFDQPLSIICGDSDTLPRPIQDILTILCLKGPSTEGIFRRAANEKARKELKEELNSGDAVDLERLPVHLLAVVFKDFLRSIPRKLLSSDLFEEWMGALEMQDEEDRIEALKQVADKLPRPNLLLLKHLVYVLHLISKNSEVNRMDSSNLAICIGPNMLTLENDQSLSFEAQKDLNNKVCSAY

SEQ ID NO: 864007 - protein, 1009 aa, Homo sapiens
MSLAFKIFFPQTLRALSRKELCLFRKHHWRDVRQFSQWSETDLLHGHPLFLRRKPVLSFQGSHLRSRATYLVFLPGLHVGLCSGPCEMAEQRFCVDYAKRGTAGCKKCKEKIVKGVCRIGKVVPNPFSESGGDMKEWYHIKCMFEKLERARATTKKIEDLTELEGWEELEDNEKEQITQHIADLSSKAAGTPKKKAVVQAKLTTTGQVTSPVKGASFVTSTNPRKFSGFSAKPNNSGEAPSSPTPKRSLSSSKCDPRHKDCLLREFRKLCAMVADNPSYNTKTQIIQDFLRKGSAGDGFHGDVYLTVKLLLPGVIKTVYNLNDKQIVKLFSRIFNCNPDDMARDLEQGDVSETIRVFFEQSKSFPPAAKSLLTIQEVDEFLLRLSKLTKEDEQQQALQDIASRCTANDLKCIIRLIKHDLKMNSGAKHVLDALDPNAYEAFKASRNLQDVVERVLHNAQEVEKEPGQRRALSVQASLMTPVQPMLAEACKSVEYAMKKCPNGMFSEIKYDGERVQVHKNGDHFSYFSRSLKPVLPHKVAHFKDYIPQAFPGGHSMILDSEVLLIDNKTGKPLPFGTLGVHKKAAFQDANVCLFVFDCIYFNDVSLMDRPLCERRKFLHDNMVEIPNRIMFSEMKRVTKALDLADMITRVIQEGLEGLVLKDVKGTYEPGKRHWLKVKKDYLNEGAMADTADLVVLGAFYGQGSKGGMMSIFLMGCYDPGSQKWCTVTKCAGGHDDATLARLQNELDMVKISKDPSKIPSWLKVNKIYYPDFIVPDPKKAAVWEITGAEFSKSEAHTADGISIRFPRCTRIRDDKDWKSATNLPQLKELYQLSKEKADFTVVAGDEGSSTTGGSSEENKGPSGSAVSRKAPSKPSASTKKAEGKLSNSNSKDGNMQTAKPSAMKVGEKLATKSSPVKVGEKRKAADETLCQTKVLLDIFTGVRLYLPPSTPDFSRLRRYFVAFDGDLVQEFDMTSATHVLGSRDKNPAAQQVSPEWIWACIRKRRLVAPC

SEQ ID NO: 864008 - protein, 1009 aa, Homo sapiens; identical to SEQ ID NO: 864007

SEQ ID NO: 864009 - protein, 738 aa, Homo sapiens
MVADNPSYNTKTQIIQDFLRKGSAGDGFHGDVYLTVKLLLPGVIKTVYNLNDKQIVKLFSRIFNCNPDDMARDLEQGDVSETIRVFFEQSKSFPPAAKSLLTIQEVDEFLLRLSKLTKEDEQQQALQDIASRCTANDLKCIIRLIKHDLKMNSGAKHVLDALDPNAYEAFKASRNLQDVVERVLHNAQEVEKEPGQRRALSVQASLMTPVQPMLAEACKSVEYAMKKCPNGMFSEIKYDGERVQVHKNGDHFSYFSRSLKPVLPHKVAHFKDYIPQAFPGGHSMILDSEVLLIDNKTGKPLPFGTLGVHKKAAFQDANVCLFVFDCIYFNDVSLMDRPLCERRKFLHDNMVEIPNRIMFSEMKRVTKALDLADMITRVIQEGLEGLVLKDVKGTYEPGKRHWLKVKKDYLNEGAMADTADLVVLGAFYGQGSKGGMMSIFLMGCYDPGSQKWCTVTKCAGGHDDATLARLQNELDMVKISKDPSKIPSWLKVNKIYYPDFIVPDPKKAAVWEITGAEFSKSEAHTADGISIRFPRCTRIRDDKDWKSATNLPQLKELYQLSKEKADFTVVAGDEGSSTTGGSSEENKGPSGSAVSRKAPSKPSASTKKAEGKLSNSNSKDGNMQTAKPSAMKVGEKLATKSSPVKVGEKRKAADETLCQTKVLLDIFTGVRLYLPPSTPDFSRLRRYFVAFDGDLVQEFDMTSATHVLGSRDKNPAAQQVSPEWIWACIRKRRLVAPC

SEQ ID NO: 864010 - protein, 1046 aa, Homo sapiens
CACALPPALGPGFKETGAPTVVGCPRPVMSKFRGLRYMSLAFKIFFPQTLRALSRKELCLFRKHHWRDVRQFSQWSETDLLHGHPLFLRRKPVLSFQGSHLRSRATYLVFLPGLHVGLCSGPCEMAEQRFCVDYAKRGTAGCKKCKEKIVKGVCRIGKVVPNPFSESGGDMKEWYHIKCMFEKLERARATTKKIEDLTELEGWEELEDNEKEQITQHIADLSSKAAGTPKKKAVVQAKLTTTGQVTSPVKGASFVTSTNPRKFSGFSAKPNNSGEAPSSPTPKRSLSSSKCDPRHKDCLLREFRKLCAMVADNPSYNTKTQIIQDFLRKGSAGDGFHGDVYLTVKLLLPGVIKTVYNLNDKQIVKLFSRIFNCNPDDMARDLEQGDVSETIRVFFEQSKSFPPAAKSLLTIQEVDEFLLRLSKLTKEDEQQQALQDIASRCTANDLKCIIRLIKHDLKMNSGAKHVLDALDPNAYEAFKASRNLQDVVERVLHNAQEVEKEPGQRRALSVQASLMTPVQPMLAEACKSVEYAMKKCPNGMFSEIKYDGERVQVHKNGDHFSYFSRSLKPVLPHKVAHFKDYIPQAFPGGHSMILDSEVLLIDNKTGKPLPFGTLGVHKKAAFQDANVCLFVFDCIYFNDVSLMDRPLCERRKFLHDNMVEIPNRIMFSEMKRVTKALDLADMITRVIQEGLEGLVLKDVKGTYEPGKRHWLKVKKDYLNEGAMADTADLVVLGAFYGQGSKGGMMSIFLMGCYDPGSQKWCTVTKCAGGHDDATLARLQNELDMVKISKDPSKIPSWLKVNKIYYPDFIVPDPKKAAVWEITGAEFSKSEAHTADGISIRFPRCTRIRDDKDWKSATNLPQLKELYQLSKEKADFTVVAGDEGSSTTGGSSEENKGPSGSAVSRKAPSKPSASTKKAEGKLSNSNSKDGNMQTAKPSAMKVGEKLATKSSPVKVGEKRKAADETLCQTKVLLDIFTGVRLYLPPSTPDFSRLRRYFVAFDGDLVQEFDMTSATHVLGSRDKNPAAQQVSPEWIWACIRKRRLVAPC

SEQ ID NO: 864011 - protein, 922 aa, Homo sapiens
MAEQRFCVDYAKRGTAGCKKCKEKIVKGVCRIGKVVPNPFSESGGDMKEWYHIKCMFEKLERARATTKKIEDLTELEGWEELEDNEKEQITQHIADLSSKAAGTPKKKAVVQAKLTTTGQVTSPVKGASFVTSTNPRKFSGFSAKPNNSGEAPSSPTPKRSLSSSKCDPRHKDCLLREFRKLCAMVADNPSYNTKTQIIQDFLRKGSAGDGFHGDVYLTVKLLLPGVIKTVYNLNDKQIVKLFSRIFNCNPDDMARDLEQGDVSETIRVFFEQSKSFPPAAKSLLTIQEVDEFLLRLSKLTKEDEQQQALQDIASRCTANDLKCIIRLIKHDLKMNSGAKHVLDALDPNAYEAFKASRNLQDVVERVLHNAQEVEKEPGQRRALSVQASLMTPVQPMLAEACKSVEYAMKKCPNGMFSEIKYDGERVQVHKNGDHFSYFSRSLKPVLPHKVAHFKDYIPQAFPGGHSMILDSEVLLIDNKTGKPLPFGTLGVHKKAAFQDANVCLFVFDCIYFNDVSLMDRPLCERRKFLHDNMVEIPNRIMFSEMKRVTKALDLADMITRVIQEGLEGLVLKDVKGTYEPGKRHWLKVKKDYLNEGAMADTADLVVLGAFYGQGSKGGMMSIFLMGCYDPGSQKWCTVTKCAGGHDDATLARLQNELDMVKISKDPSKIPSWLKVNKIYYPDFIVPDPKKAAVWEITGAEFSKSEAHTADGISIRFPRCTRIRDDKDWKSATNLPQLKELYQLSKEKADFTVVAGDEGSSTTGGSSEENKGPSGSAVSRKAPSKPSASTKKAEGKLSNSNSKDGNMQTAKPSAMKVGEKLATKSSPVKVGEKRKAADETLCQTKVLLDIFTGVRLYLPPSTPDFSRLRRYFVAFDGDLVQEFDMTSATHVLGSRDKNPAAQQVSPEWIWACIRKRRLVAPC

SEQ ID NO: 864012 - protein, 1015 aa, Homo sapiens
MSLAFKIFFPQTLRALSRKELCLFRKHHWRDVRQFSQWSETDLLHGHPLFLRRKPVLSFQGSHLRSRATYLVFLPGLHVGLCSGPCEMAEQRFCVDYAKRGTAGCKKCKEKIVKGVCRIGKVVPNPFSESGGDMKEWYHIKCMFEKLERARATTKKIEDLTELEGWEELEDNEKEQITQHIADLSSKAAGTPKKKAVVQAKLTTTGQVTSPVKGASFVTSTNPRKFSGFSAKPNNSGEAPSSPTPKRSLSSSKCDPRHKDCLLREFRKLCAMVADNPSYNTKTQIIQDFLRKGSAGDGFHGDVYLTVKLLLPGVIKTVYNLNDKQIVKLFSRIFNCNPDDMARDLEQGDVSETIRVFFEQSKSFPPAAKSLLTIQEVDEFLLRLSKLTKEDEQQQALQDIASRCTANDLKCIIRLIKHDLKMNSGAKHVLDALDPNAYEAFKASRNLQDVVERVLHNAQEVEKEPGQRRALSVQASLMTPVQPMLAEACKSVEYAMKKCPNGMFSEIKYDGERVQVHKNGDHFSYFSRSLKPVLPHKVAHFKDYIPQAFPGGHSMILDSEVLLIDNKTGKPLPFGTLGVHKKAAFQDANVCLFVFDCIYFNDVSLMDRPLCERRKFLHDNMVEIPNRIMFSEMKRVTHLSVPQKALDLADMITRVIQEGLEGLVLKDVKGTYEPGKRHWLKVKKDYLNEGAMADTADLVVLGAFYGQGSKGGMMSIFLMGCYDPGSQKWCTVTKCAGGHDDATLARLQNELDMVKISKDPSKIPSWLKVNKIYYPDFIVPDPKKAAVWEITGAEFSKSEAHTADGISIRFPRCTRIRDDKDWKSATNLPQLKELYQLSKEKADFTVVAGDEGSSTTGGSSEENKGPSGSAVSRKAPSKPSASTKKAEGKLSNSNSKDGNMQTAKPSAMKVGEKLATKSSPVKVGEKRKAADETLCQTKVLLDIFTGVRLYLPPSTPDFSRLRRYFVAFDGDLVQEFDMTSATHVLGSRDKNPAAQQVSPEWIWACIRKRRLVAPC

SEQ ID NO: 864013 - protein, 389 aa, Homo sapiens [sequence omitted]

SEQ ID NO: 864014 - protein, 905 aa, Homo sapiens
MSLAFKIFFPQTLRALSRKELCLFRKHHWRDVRQFSQWSETDLLHGHPLFLRRKPVLSFQGSHLRSRATYLVFLPGLHVGLCSGPCEMAEQRFCVDYAKRGTAGCKKCKEKIVKGVCRIGKVVPNPFSESGGDMKEWYHIKCMFEKLERARATTKKIEDLTELEGWEELEDNEKEQITQHIADLSSKAAGTPKKKAVVQAKLTTTGQVTSPVKGASFVTSTNPRKFSGFSAKPNNSGEAPSSPTPKRSLSSSKCDPRHKDCLLREFRKLCAMVADNPSYNTKTQIIQDFLRKGSAGDGFHGDVYLTVKLLLPGVIKTVYNLNDKQIVKLFSRIFNCNPDDMARDLEQGDVSETIRVFFEQSKSFPPAAKSLLTIQEVDEFLLRLSKLTKEDEQQQALQDIASRCTANDLKCIIRLIKHDLKMNSGAKHVLDALDPNAYEAFKASRNLQDVVERVLHNAQEVEKEPGQRRALSVQASLMTPVQPMLAEACKSVEYAMKKCPNGMFSEIKYDGERVQVHKNGDHFSYFSRSLKPVLPHKVAHFKDYIPQAFPGGHSMILDSEVLLIDNKTGKPLPFGTLGVHKKAAFQDANVCLFVFDCIYFNDVSLMDRPLCERRKFLHDNMVEIPNRIMFSEMKRVTKALDLADMITRVIQEGLEGLVLKDVKGTYEPGKRHWLKVKKDYLNEGAMADTADLVVLGAFYGQGSKGGMMSIFLMGCYDPGSQKWCTVTKCAGGHDDATLARLQNELDMVKISKDPSKIPSWLKVNKIYYPDFIVPDPKKAAVWEITGAEFSKSEAHTADGISIRFPRCTRIRDDKDWKSATNLPQLKELYQLSKEKADFTVVAGDEGSSTTGGSSEENKGPSGSAVSRKAPSKPSASTKKAEGKLSNSNSKDGKDREGAGMVKRAV

SEQ ID NO: 864015 - protein, 949 aa, Homo sapiens
MSLAFKIFFPQTLRALSRKELCLFRKHHWRDVRQFSQWSETDLLHGHPLFLRRKPVLSFQGSHLRSRATYLVFLPGLHVGLCSGPCEMAEQRFCVDYAKRGTAGCKKCKEKIVKGVCRIGKVVPNPFSESGGDMKEWYHIKCMFEKLERARATTKKIEDLTELEGWEELEDNEKEQITQHIADLSSKAAGTPKKKAVVQAKLTTTGQVTSPVKGASFVTSTNPRKFSGFSAKPNNSGEAPSSPTPKRSLSSSKCDPRHKDCLLREFRKLCAMVADNPSYNTKTQIIQDFLRKGSAGDGFHGDVYLTVKLLLPGVIKTVYNLNDKQIVKLFSRIFNCNPDDMARDLEQGDVSETIRVFFEQSKSFPPAAKSLLTIQEVDEFLLRLSKLTKEDEQQQALQDIASRCTANDLKCIIRLIKHDLKMNSGAKHVLDALDPNAYEAFKASRNLQDVVERVLHNAQEVEKEPGQRRALSVQASLMTPVQPMLAEACKSVEYAMKKCPNGMFSEIKYDGERVQVHKNGDHFSYFSRSLKPVLPHKVAHFKDYIPQAFPGGHSMILDSEVLLIDNKTGKPLPFGTLGVHKKAAFQDANVCLFVFDCIYFNDVSLMDRPLCERRKFLHDNMVEIPNRIMFSEMKRVTKALDLADMITRVIQEGLEGLVLKDVKGTYEPGKRHWLKVKKDYLNEGAMADTADLVVLGAFYGQGSKGGMMSIFLMGCYDPGSQKWCTVTKCAGGHDDATLARLQNELDMVKISKDPSKIPSWLKVNKIYYPDFIVPDPKKAAVWEITGAEFSKSEAHTADGISIRFPRCTRIRDDKDWKSATNLPQLKELYQLSKEKADFTVVAGDEGSSTTGGSSEENKGPSGSAVSRKAPSKPSASTKKAEGKLSNSNSKDGNMQTAKPSAMKVGEKLATKSSPVKVGEKRKAADETLCQTKRRPASEQRGRTVPAGRR

SEQ ID NO: 864016 - protein, 1037 aa, Homo sapiens
MFSRPYVMFPTDEVSVLAVNEKFRGLRYMSLAFKIFFPQTLRALSRKELCLFRKHHWRDVRQFSQWSETDLLHGHPLFLRRKPVLSFQGSHLRSRATYLVFLPGLHVGLCSGPCEMAEQRFCVDYAKRGTAGCKKCKEKIVKGVCRIGKVVPNPFSESGGDMKEWYHIKCMFEKLERARATTKKIEDLTELEGWEELEDNEKEQITQHIADLSSKAAGTPKKKAVVQAKLTTTGQVTSPVKGASFVTSTNPRKFSGFSAKPNNSGEAPSSPTPKRSLSSSKCDPRHKDCLLREFRKLCAMVADNPSYNTKTQIIQDFLRKGSAGDGFHGDVYLTVKLLLPGVIKTVYNLNDKQIVKLFSRIFNCNPDDMARDLEQGDVSETIRVFFEQSKSFPPAAKSLLTIQEVDEFLLRLSKLTKEDEQQQALQDIASRCTANDLKCIIRLIKHDLKMNSGAKHVLDALDPNAYEAFKASRNLQDVVERVLHNAQEVEKEPGQRRALSVQASLMTPVQPMLAEACKSVEYAMKKCPNGMFSEIKYDGERVQVHKNGDHFSYFSRSLKPVLPHKVAHFKDYIPQAFPGGHSMILDSEVLLIDNKTGKPLPFGTLGVHKKAAFQDANVCLFVFDCIYFNDVSLMDRPLCERRKFLHDNMVEIPNRIMFSEMKRVTKALDLADMITRVIQEGLEGLVLKDVKGTYEPGKRHWLKVKKDYLNEGAMADTADLVVLGAFYGQGSKGGMMSIFLMGCYDPGSQKWCTVTKCAGGHDDATLARLQNELDMVKISKDPSKIPSWLKVNKIYYPDFIVPDPKKAAVWEITGAEFSKSEAHTADGISIRFPRCTRIRDDKDWKSATNLPQLKELYQLSKEKADFTVVAGDEGSSTTGGSSEENKGPSGSAVSRKAPSKPSASTKKAEGKLSNSNSKDGNMQTAKPSAMKVGEKLATKSSPVKVGEKRKAADETLCQTKVLLDIFTGVRLYLPPSTPDFSRLRRYFVAFDGDLVQEFDMTSATHVLGSRDKNPAAQQVSPEWIWACIRKRRLVAPC

SEQ ID NO: 864017 - protein, 738 aa, Homo sapiens; identical to SEQ ID NO: 864009

SEQ ID NO: 864018 - protein, 905 aa, Homo sapiens; identical to SEQ ID NO: 864014

SEQ ID NO: 864019 - protein, 961 aa, Homo sapiens
MSLAFKIFFPQTLRALSRKELCLFRKHHWRDVRQFSQWSETDLLHGHPLFLRRKPVLSFQGSHLRSRATYLVFLPGLHVGLCSGPCEMAEQRFCVDYAKRGTAGCKKCKEKIVKGVCRIGKVVPNPFSESGGDMKEWYHIKCMFEKLERARATTKKIEDLTELEGWEELEDNEKEQITQHIADLSSKAAGTPKKKAVVQAKLTTTGQVTSPVKGASFVTSTNPRKFSGFSAKPNNSGEAPSSPTPKRSLSSSKCDPRHKDCLLREFRKLCAMVADNPSYNTKTQIIQDFLRKGSAGDGFHGDVYLTVKLLLPGVIKTVYNLNDKQIVKLFSRIFNCNPDDMARDLEQGDVSETIRVFFEQSKSFPPAAKSLLTIQEVDEFLLRLSKLTKEDEQQQALQDIASRCTANDLKCIIRLIKHDLKMNSGAKHVLDALDPNAYEAFKASRNLQDVVERVLHNAQEVEKEPGQRRALSVQASLMTPVQPMLAEACKSVEYAMKKCPNGMFSEIKYDGERVQVHKNGDHFSYFSRSLKPVLPHKVAHFKDYIPQAFPGGHSMILDSEVLLIDNKTGKPLPFGTLGVHKKAAFQDANVCLFVFDCIYFNDVSLMDRPLCERRKFLHDNMVEIPNRIMFSEMKRVTKALDLADMITRVIQEGLEGLVLKDVKGTYEPGKRHWLKVKKDYLNEGAMADTADLVVLGAFYGQGSKGGMMSIFLMGCYDPGSQKWCTVTKCAGGHDDATLARLQNELDMVKISKDPSKIPSWLKVNKIYYPDFIVPDPKKAAVWEITGAEFSKSEAHTADGISIRFPRCTRIRDDKDWKSATNLPQLKELYQLSKEKADFTVVAGDEGSSTTGGSSEENKGPSGSAVSRKAPSKPSASTKKAEGKLSNSNSKDGNMQTAKPSAMKVGEKLATKSSPVKVGEKRKAADETLCQTKVRVKTATHHVGQFSPGCVPNLLYKKFERG

SEQ ID NO: 864020 - protein, 299 aa, Homo sapiens
MSLAFKIFFPQTLRALSRKELCLFRKHHWRDVRQFSQWSETDLLHGHPLFLRRKPVLSFQGSHLRSRATYLVFLPGLHVGLCSGPCEMAEQRFCVDYAKRGTAGCKKCKEKIVKGVCRIGKVVPNPFSESGGDMKEWYHIKCMFEKLERARATTKKIEDLTELEGWEELEDNEKEQITQHIADLSSKAAGTPKKKAVVQAKLTTTGQVTSPVKGASFVTSTNPRKFSGFSAKPNNSGEAPSSPTPKRSLSSSKCDPRHKDCLLREFRKLCAMVADNPSYNTKTQIIQDFLRKGSAGGVA

SEQ ID NO: 864021 - protein, 315 aa, Homo sapiens
LLLLGHASTSTGGGKRASKMATTKRVLYVGGLAEEVDDKVLHAAFIPFGDITDIQIPLDYETEKHRGFAFVEFELAEDAAAAIDNMNESELFGRTIRVNLAKPMRIKEGSSRPVWSDDDWLKKFSGKTLEENKEEEGSEPPKAETQEGEPIAKKARSNPQVYMDIKIGNKPAGRIQMLLRSDVVPMTAENFRCLCTHEKGFGFKGSSFHRIIPQFMCQGGDFTNHNGTGGKSIYGKKFDDENFILKHTGPGLLSMANSGPNTNGSQFFLTCDKTDWLDGKHVVFGEVTEGLDVLRQIEKQEESAITSQPRSWKLT

SEQ ID NO: 864022 - protein, 325 aa, Homo sapiens
KLTARYEAGWWQMATTKRVLYVGGLAEEVDDKVLHAAFIPFGDITDIQIPLDYETEKHRGFAFVEFELAEDAAAAIDNMNESELFGRTIRVNLAKPMRIKEGSSRPVWSDDDWLKKFSGKTLEENKEEEGSEPPKAETQEGEPIAKKARSNPQVYMDIKIGNKPAGRIQMLLRSDVVPMTAENFRCLCTHEKGFGFKGSSFHRIIPQFMCQGGDFTNHNGTGGKSIYGKKFDDENFILKHTGPGLLSMANSGPNTNGSQFFLTCDKTDWLDGKHVVFGEVTEGLDVLRQIEWGNEAGPDGTTKGPARGDVRDSFPRYVRGAQGPV

SEQ ID NO: 864023 - protein, 207 aa, Homo sapiens
MPLSKRPLIFSGERDIQMGNNPGRPGFQMRAGVFERPAPATRKGSSCRVPGTTSIEIGAFRPLRGMPKPSHPAVHSAPSLQCMPSPGELSALSPPIGHLGGQRVHFNAEEKFRMDGKSCIPSKVIYRGTKGLTIPSGPKLLGPPKPPQMGSSSFFLTCDKTDWLDGKHVVFGEVTEGLDVLRQIEAQGSKDGKPKQKVIIADCGEYV

SEQ ID NO: 864024 - protein, 319 aa, Homo sapiens
SRRHGCEKTTKGGKRASKMATTKRVLYVGGLAEEVDDKVLHAAFIPFGDITDIQIPLDYETEKHRGFAFVEFELAEDAAAAIDNMNESELFGRTIRVNLAKPMRIKEGSSRPVWSDDDWLKKFSGKTLEENKEEEGSEPPKAETQEGEPIAKKARSNPQVYMDIKIGNKPAGRIQMLLRSDVVPMTAENFRCLCTHEKGFGFKGSSFHRIIPQFMCQGGDFTNHNGTGGKSIYGKKFDDENFILKHTGPGLLSMANSGPNTNGSQFFLTCDKTDWLDGKHVVFGEVTEGLDVLRQIEAQGSKDGKPKQKVIIADCGEYV

SEQ ID NO: 864025 - protein, 309 aa, Homo sapiens
RLVQAGVIGRGTKRVLYVGGLAEEVDDKVLHAAFIPFGDITDIQIPLDYETEKHRGFAFVEFELAEDAAAAIDNMNESELFGRTIRVNLAKPMRIKEGSSRPVWSDDDWLKKFSGKTLEENKEEEGSEPPKAETQEGEPIAKKARSNPQVYMDIKIGNKPAGRIQMLLRSDVVPMTAENFRCLCTHEKGFGFKGSSFHRIIPQFMCQGGDFTNHNGTGGKSIYGKKFDDENFILKHTGPGLLSMANSGPNTNGSQFFLTCDKTDWLDGKHVVFGEVTEGLDVLRQIEAQGSKDGKPKQKVIIADCGEYV

SEQ ID NO: 864026 - protein, 313 aa, Homo sapiens
KLTARYEAGWWQMATTKRVLYVGGLAEEVDDKVLHAAFIPFGDITDIQIPLDYETEKHRGFAFVEFELAEDAAAAIDNMNESELFGRTIRVNLAKPMRIKEGSSRPVWSDDDWLKKFSGKTLEENKEEEGSEPPKAETQEGEPIAKKARSNPQVYMDIKIGNKPAGRIQMLLRSDVVPMTAENFRCLCTHEKGFGFKGSSFHRIIPQFMCQGGDFTNHNGTGGKSIYGKKFDDENFILKHTGPGLLSMANSGPNTNGSQFFLTCDKTDWLDGKHVVFGEVTEGLDVLRQIEAQGSKDGKPKQKVIIADCGEYV

SEQ ID NO: 864027 - protein, 345 aa, Homo sapiens
DPQGSGRGVGRISEPGGRRAAVKAGSLAVVLAIALAVLKLLPRFPTVLRKKLQTCGLAEEVDDKVLHAAFIPFGDITDIQIPLDYETEKHRGFAFVEFELAEDAAAAIDNMNESELFGRTIRVNLAKPMRIKEGSSRPVWSDDDWLKKFSGKTLEENKEEEGSEPPKAETQEGEPIAKKARSNPQVYMDIKIGNKPAGRIQMLLRSDVVPMTAENFRCLCTHEKGFGFKGSSFHRIIPQFMCQGGDFTNHNGTGGKSIYGKKFDDENFILKHTGPGLLSMANSGPNTNGSQFFLTCDKTDWLDGKHVVFGEVTEGLDVLRQIEAQGSKDGKPKQKVIIADCGEYV

SEQ ID NO: 864028 - protein, 322 aa, Homo sapiens
RLVQAGVIGRGTKRVLYVGGLAEEVDDKVLHAAFIPFGDITDIQIPLDYETEKHRGFAFVEFELAEDAAAAIDNMNESELFGRTIRVNLAKPMRIKEGSSRPVWSDDDWLKKFSGKTLEENKEEEGSEPPKAETQEGEPIAKKARSNPQVYMDIKIGNKPAGRIQMLLRSDVVPMTAENFRCLCTHEKGFGFKGSSFHRIIPQFMCQGGDFTNHNGTGGKSIYGKKFDDENFILKHTGPGLLSMANSGPNTNGSQFFLTCDKTDWLDGKHVVFGEVTEGLDVLRQIEVAPDTKASKARGSRKNKDGQERNWGKSQKVESHTI

SEQ ID NO: 864029 - protein, 321 aa, Homo sapiens
RLVQAGVIGRGTKRVLYVGGLAEEVDDKVLHAAFIPFGDITDIQIPLDYETEKHRGFAFVEFELAEDAAAAIDNMNESELFGRTIRVNLAKPMRIKEGSSRPVWSDDDWLKKFSGKTLEENKEEEGSEPPKAETQEGEPIAKKARSNPQVYMDIKIGNKPAGRIQMLLRSDVVPMTAENFRCLCTHEKGFGFKGSSFHRIIPQFMCQGGDFTNHNGTGGKSIYGKKFDDENFILKHTGPGLLSMANSGPNTNGSQFFLTCDKTDWLDGKHVVFGEVTEGLDVLRQIEWGNEAGPDGTTKGPARGDVRDSFPRYVRGAQGPV

SEQ ID NO: 864030 - protein, 356 aa, Homo sapiens
SRRHGCEKTTKGGKRASKMATTKRVLYVGGLAEEVDDKVLHAAFIPFGDITDIQIPLDYETEKHRGFAFVEFELAEDAAAAIDNMVWLGILILTKVAFWWYRGSLFIYQCSGLPKLQGCMEENESELFGRTIRVNLAKPMRIKEGSSRPVWSDDDWLKKFSGKTLEENKEEEGSEPPKAETQEGEPIAKKARSNPQVYMDIKIGNKPAGRIQMLLRSDVVPMTAENFRCLCTHEKGFGFKGSSFHRIIPQFMCQGGDFTNHNGTGGKSIYGKKFDDENFILKHTGPGLLSMANSGPNTNGSQFFLTCDKTDWLDGKHVVFGEVTEGLDVLRQIEAQGSKDGKPKQKVIIADCGEYV

SEQ ID NO: 864031 - protein, 306 aa, Homo sapiens
SRRHGCEKTTKGGKRASKMATTKRVLYVGGLAEEVDDKVLHAAFIPFGDITDIQIPLDYETEKHRGFAFVEFELAEDAAAAIDNMNESELFGRTIRVNLAKPMRIKEGSSRPVWSDDDWLKKFSGKTLEENKEEEGSEPPKAETQEVYMDIKIGNKPAGRIQMLLRSDVVPMTAENFRCLCTHEKGFGFKGSSFHRIIPQFMCQGGDFTNHNGTGGKSIYGKKFDDENFILKHTGPGLLSMANSGPNTNGSQFFLTCDKTDWLDGKHVVFGEVTEGLDVLRQIEAQGSKDGKPKQKVIIADCGEYV

SEQ ID NO: 864032 - protein, 268 aa, Homo sapiens
SRRHGCEKTTKGGKRASKMATTKRVLYVGGLAEEVDDKVLHAAFIPFGDITDIQIPLDYETVWSDDDWLKKFSGKTLEENKEEEGSEPPKAETQEGEPIAKKARSNPQVYMDIKIGNKPAGRIQMLLRSDVVPMTAENFRCLCTHEKGFGFKGSSFHRIIPQFMCQGGDFTNHNGTGGKSIYGKKFDDENFILKHTGPGLLSMANSGPNTNGSQFFLTCDKTDWLDGKHVVFGEVTEGLDVLRQIEAQGSKDGKPKQKVIIADCGEYV

SEQ ID NO: 864033 - protein, 196 aa, Homo sapiens
KLTARYEAGWWQMATTKRVLYVGGLAEEVDDKVLHAAFIPFGDITDIQIPLDYETEKHRGFAFVEFELAEDAAAAIDNMNESELFGRTIRVNLAKPMRIKEGSSRPVWSDDDWLKKFSGKTLEENKEEEGSEPPKAETQEGEPIAKKARSNPQVYMDIKIGNKPAGRIQMLLRSDVVPMTAARCMVHACSPSYSRG

SEQ ID NO: 864034 - protein, 105 aa, Homo sapiens
MCQGGDFTNHNGTGGKSIYGKKFDDENFILKHTGPGLLSMANSGPNTNGSQFFLTCDKTDWLDGKHVVFGEVTEGLDVLRQIEAQGSKDGKPKQKVIIADCGEYV

SEQ ID NO: 864035 - protein, 303 aa, Homo sapiens
SRRHGCEKTTKGGKRASKMATTKRVLYVGGLAEEVDDKVLHAAFIPFGDITDIQIPLDYETEKHRGFAFVEFELAEDAAAAIDNMNESELFGRTIRVNLAKPMRIKEGSSRPVWSDDDWLKKFSGKTLEENKEEEGSEPPKAETQEGEPIAKKARSNPQVYMDIKIGNKPAGRIQMLLRSDVVPMTAENFRCLCTHEKGFGFKGSSFHRIIPQFMCQGGDFTNHNGTGGKSIYGKKFDDENFILKHTGPVYIMAILAKQCIHFRALTPAGCCTLCRRPRKSGDKPVHAEQPHNTGTVRSALTT

SEQ ID NO: 864036 - protein, 85 aa, Homo sapiens
GRVDTAARRRQKGESARARWPPPSASCTWVDWQRKWTTKFFMLRSFLLETSQIFRFLWIMKQKSTEDLLLLNLSWQRMLQQLSTT

SEQ ID NO: 864037 - protein, 320 aa, Homo sapiens
LLLLGHASTSTGGGKRASKMATTKRVLYVGGLAEEVDDKVLHAAFIPFGDITDIQIPLDYETEKHRGFAFVEFELAEDAAAAIDNMNESELFGRTIRVNLAKPMRIKEGSSRPVWSDDDWLKKFSGKTLEENKEEEGSEPPKAETQEGEPIAKKARSNPQVYMDIKIGNKPAGRIQMLLRSDVVPMTAENFRCLCTHEKGFGFKGSSFHRIIPQFMCQGGDFTNHNGTGGKSIYGKKFDDENFILKHTGPGLLSMANSGPNTNGSQFFLTCDKTDWLDGKHVVFGEVTEGLDVLRQIEAQGSKDGKPKQKVIIADCGEYV

SEQ ID NO: 864038 - protein, 292 aa, Homo sapiens
RLGTRLGVTRPRRVLYVGGLAEEVDDKVLHAAFIPFGDITDIQIPLDYETEKHRGFAFVEFELAEDAAAAIDNMNESELFGRTIRVNLAKPMRIKEGSSRPVWSDDDWLKKFSGKTLEENKEEEGSEPPKAETQEGEPIAKKARSNPQVYMDIKIGNKPAGRIQMLLRSDVVPMTAENFRCLCTHEKGFGFKGSSFHRIIPQFMCQGGDFTNHNGTGGKSIYGKKFDDENFILKHTGPVYIMAILAKQCIHFRALTPAGCCTLCRRPRKSGDKPVHAEQPHNTGTVRSALTT

SEQ ID NO: 864039 - protein, 309 aa, Homo sapiens; identical to SEQ ID NO: 864025

SEQ ID NO: 864040 - protein, 309 aa, Homo sapiens; identical to SEQ ID NO: 864025

SEQ ID NO: 864041 - protein, 308 aa, Homo sapiens
RLGTRLGVTRPRRVLYVGGLAEEVDDKVLHAAFIPFGDITDIQIPLDYETEKHRGFAFVEFELAEDAAAAIDNMNESELFGRTIRVNLAKPMRIKEGSSRPVWSDDDWLKKFSGKTLEENKEEEGSEPPKAETQEGEPIAKKARSNPQVYMDIKIGNKPAGRIQMLLRSDVVPMTAENFRCLCTHEKGFGFKGSSFHRIIPQFMCQGGDFTNHNGTGGKSIYGKKFDDENFILKHTGPGLLSMANSGPNTNGSQFFLTCDKTDWLDGKHVVFGEVTEGLDVLRQIEAQGSKDGKPKQKVIIADCGEYV

SEQ ID NO: 864042 - protein, 314 aa, Homo sapiens
SRRHGCEKTTKGGKRASKMATTKRVLYVGGLAEEVDDKVLHAAFIPFGDITDIQIPLDYETEKHRGFAFVEFELAEDAAAAIDNMNESELFGRTIRVNLAKPMRIKEGSSRPVWSDDDWLKKFSGKTLEENKEEEGSEPPKAETQEGEPIAKKARSNPQVYMDIKIGNKPAGRIQMLLRSDVVPMTAENFRCLCTHEKGFGFKGSSFHRIIPQFMCQGGDFTNHNGTGGKSIYGKKFDDENFILKHTGPGLLSMANSGPNTNGSQFFLTCDKTDWLDGKHVVFGEVTEGLDVLRQIEKQEESAITSQPRSWKLT

SEQ ID NO: 864043 - protein, 217 aa, Homo sapiens
MRIKEGSSRPVWSDDDWLKKFSGKTLEENKEEEGSEPPKAETQEGEPIAKKARSNPQVYMDIKIGNKPAGRIQMLLRSDVVPMTAENFRCLCTHEKGFGFKGSSFHRIIPQFMCQGGDFTNHNGTGGKSIYGKKFDDENFILKHTGPGLLSMANSGPNTNGSQFFLTCDKTDWLDGKHVVFGEVTEGLDVLRQIEAQGSKDGKPKQKVIIADCGEYV

SEQ ID NO: 864044 - protein, 301 aa, Homo sapiens
SRRHGCEKTTKGGKRASKMATTKRVLYVGGLAEEVDDKVLHAAFIPFGDITDIQIPLDYETEKHRGFAFVEFELAEDAAAAIDNMNESELFGRTIRVNLAKPMRIKEGSSRPVWSDDDWLKKFSGKTLEENKEEEGSEPPKAETQEGEPIAKKARSNPQVYMDIKIGNKPAGRIQMLLRSDVVPMTAENFRCLCTHEKGFGFKGSSFHRIIPQFMCQGGDFTNHNGTGGKSIYGKKFDDGPNTNGSQFFLTCDKTDWLDGKHVVFGEVTEGLDVLRQIEAQGSKDGKPKQKVIIADCGEYV

SEQ ID NO: 864045 - protein, 202 aa, Homo sapiens
SRRHGCEKTTKGGKRASKMATTKRVLYVGGLAEEVDDKVLHAAFIPFGDITDIQIPLDYETEKHRGFAFVEFELAEDAAAAIDNMNESELFGRTIRVNLAKPMRIKEGSSRPVWSDDDWLKKFSGKTLEENKEEEGSEPPKAETQEGEPIAKKARSNPQVYMDIKIGNKPAGRIQMLLRSDVVPMTAARCMVHACSPSYSRG

SEQ ID NO: 864046 - protein, 134 aa, Homo sapiens
MAENFRCLCTHEKGFGFKGSSFHRIIPQFMCQGGDFTNHNGTGGKSIYGKKFDDENFILKHTGPGLLSMANSGPNTNGSQFFLTCDKTDWLDGKHVVFGEVTEGLDVLRQIEAQGSKDGKPKQKVIIADCGEYV

SEQ ID NO: 864047 - protein, 226 aa, Homo sapiens
SRRHGCEKTTKGGKRASKMATTKRVLYVGGLAEEVDDKVLHAAFIPFGDITDIQIPLDYETEKHRGFAFVEFELAEDAAAAIDNMNESELFGRTIRVNLAKPMRIKEGSSRPVWSDDDWLKKFSGKTLEENKEEEGSEPPKAETQERISAACALMKRALALREAASTASSPSSCARAVISQTTMALGASPSMGRSSMMKTLSSSIRDQVYYPWPTLAQTPMALSSS

SEQ ID NO: 864048 - protein, 376 aa, Homo sapiens
MGLLAFLKTQFVLHLLVGFVFVVSGLVINFVQLCTLALWPVSKQLYRRLNCRLAYSLWSQLVMLLEWWSCTECTLFTDQATVERFGKEHAVIILNHNFEIDFLCGWTMCERFGVLGSSKVLAKKELLYVPLIGWTWYFLEIVFCKRKWEEDRDTVVEGLRRLSDYPEYMWFLLYCEGTRFTETKHRVSMEVAAAKGLPVLKYHLLPRTKGFTTAVKCLRGTVAAVYDVTLNFRGNKNPSLLGILYGKKYEADMCVRRFPLEDIPLDEKEAAQWLHKLYQEKDALQEIYNQKGMFPGEQFKPARRPWTLLNFLSWATILLSPLFSFVLGVFASGSPLLILTFLGFVGAASFGVRRLIGVTEIEKGSSYGNQEFKKKE

SEQ ID NO: 864049 - protein, 44 aa, Homo sapiens
MCITALSVAPKGWVPAAVGRERITVARPCRGGHSAATDAPWVLS

SEQ ID NO: 864050 - protein, 376 aa, Homo sapiens; identical to SEQ ID NO: 864048

SEQ ID NO: 864051 - protein, 314 aa, Homo sapiens
MLLEWWSCTECTLFTDQATVERFGKEHAVIILNHNFEIDFLCGWTMCERFGVLGSSKVLAKKELLYVPLIGWTWYFLEIVFCKRKWEEDRDTVVEGLRRLSDYPEYMWFLLYCEGTRFTETKHRVSMEVAAAKGLPVLKYHLLPRTKGFTTAVKCLRGTVAAVYDVTLNFRGNKNPSLLGILYGKKYEADMCVRRFPLEDIPLDEKEAAQWLHKLYQEKDALQEIYNQKGMFPGEQFKPARRPWTLLNFLSWATILLSPLFSFVLGVFASGSPLLILTFLGFVGAASFGVRRLIGVTEIEKGSSYGNQEFKKKE

SEQ ID NO: 864052 - protein, 480 aa, Homo sapiens
VDWKDTLSAAPCHHHTLLEPLPPRPVLTPERVKARSLPTDGCPQRGAVHPLLSSAMGLLAFLKTQFVLHLLVGFVFVVSGLVINFVQLCTLALWPVSKQLYRRLNCRLAYSLWSLAQNKKQPKHLSLETNYAAPIQGPSAAIMESLHLARTVLSEKEVYNKVHKLVMLLEWWSCTECTLFTDQATVERFGKEHAVIILNHNFEIDFLCGWTMCERFGVLGSSKVLAKKELLYVPLIGWTWYFLEIVFCKRKWEEDRDTVVEGLRRLSDYPEYMWFLLYCEGTRFTETKHRVSMEVAAAKGLPVLKYHLLPRTKGFTTAVKCLRGTVAAVYDVTLNFRGNKNPSLLGILYGKKYEADMCVRRFPLEDIPLDEKEAAQWLHKLYQEKDALQEIYNQKGMFPGEQFKPARRPWTLLNFLSWATILLSPLFSFVLGVFASGSPLLILTFLGFVGAASFGVRRLIGVTEIEKGSSYGNQEFKKKE

SEQ ID NO: 864053 - protein, 540 aa, Homo sapiens
ADTWSFDFWLGLFCECGAWSYPLGQCLCDDENGKTATVPTLAGLSPLAGAGSAAVSGRRHCPGPSCGCSQPCCWLLLPSWLAETLGHAGKRAESSSLLRQERIQQDFFLPTLLPLPVWAADKSQGPTLLATSCCSHTPARDLPPGSNKDGCPQRGAVHPLLSSAMGLLAFLKTQFVLHLLVGFVFVVSGLVINFVQLCTLALWPVSKQLYRRLNCRLAYSLWSQLVMLLEWWSCTECTLFTDQATVERFGKEHAVIILNHNFEIDFLCGWTMCERFGVLGSSKVLAKKELLYVPLIGWTWYFLEIVFCKRKWEEDRDTVVEGLRRLSDYPEYMWFLLYCEGTRFTETKHRVSMEVAAAKGLPVLKYHLLPRTKGFTTAVKCLRGTVAAVYDVTLNFRGNKNPSLLGILYGKKYEADMCVRRFPLEDIPLDEKEAAQWLHKLYQEKDALQEIYNQKGMFPGEQFKPARRPWTLLNFLSWATILLSPLFSFVLGVFASGSPLLILTFLGFVGAASFGVRRLIGVTEIEKGSSYGNQEFKKKE

SEQ ID NO: 864054 - protein, 376 aa, Homo sapiens; identical to SEQ ID NO: 864048

SEQ ID NO: 864055 - protein, 376 aa, Homo sapiens; identical to SEQ ID NO: 864048

SEQ ID NO: 864056 - protein, 376 aa, Homo sapiens; identical to SEQ ID NO: 864048

SEQ ID NO: 864057 - protein, 337 aa, Homo sapiens
LPDHPRRRGPTSANALPLSAELVMLLEWWSCTECTLFTDQATVERFGKEHAVIILNHNFEIDFLCGWTMCERFGVLGSSKVLAKKELLYVPLIGWTWYFLEIVFCKRKWEEDRDTVVEGLRRLSDYPEYMWFLLYCEGTRFTETKHRVSMEVAAAKGLPVLKYHLLPRTKGFTTAVKCLRGTVAAVYDVTLNFRGNKNPSLLGILYGKKYEADMCVRRFPLEDIPLDEKEAAQWLHKLYQEKDALQEIYNQKGMFPGEQFKPARRPWTLLNFLSWATILLSPLFSFVLGVFASGSPLLILTFLGFVGAASFGVRRLIGVTEIEKGSSYGNQEFKKKE

SEQ ID NO: 864058 - protein, 376 aa, Homo sapiens; identical to SEQ ID NO: 864048

SEQ ID NO: 864059 - protein, 376 aa, Homo sapiens; identical to SEQ ID NO: 864048

SEQ ID NO: 864060 - protein, 517 aa, Homo sapiens
ADTWSFDFWLGLFCECGAWSYPLGQCLCDDENGKTATVPTLAGLSPLAGAGSAAVSGRRHCPGPSCGCSQPCCWLLLPSWLAETLGHAGKRAESSSLLRQERIQQDFFLPTLLPLPVWAADKSQGPTLLATSCCSHTPARDLPPGSNKDGCPQRGAVHPLLSSAMGLLAFLKTQFVLHLLVGFVFVVSGLVINFVQLCTLALWPVSKQLYRRLNCRLAYSLWSQLVMLLEWWSCTECTLFTDQATVERFGKEHAVIILNHNFEIDFLCGWTMCERFGVLGSSKVLAKKELLYVPLIGWTWYFLEIVFCKRKWEEDRDTVVEGLRRLSDYPEYMWFLLYCEGTRFTETKHRVSMEVAAAKGLPVLKYHLLPRTKGFTTAVKCLRGTVAAVYDVTLNFRGNKNPSLLGILYGKKYEADMCVRRFPLEDIPLDEKEAAQWLHKLYQEKDALQEIYNQKGMFPGEQFKPARRPWTLLNFLSWATILLSPLFSFVLGVFASGSPLLILTFLGFVGAGNGHCR

SEQ ID NO: 864061 - protein, 406 aa, Homo sapiens
ADTWSFDFWLGLFCECGAWSYPLGQCLCDDENGKTATVPTLAGLSPLAGAGSAAVSGRRHCPGPSCGCSQPCCWLLLPSWLAETLGHAGKRAESSSLLRQERIQQDFFLPTLLPLPVWAADKSQGPTLLATSCCSHTPARDLPPGSNKDGCPQRGAVHPLLSSAMGLLAFLKTQFVLHLLVGFVFVVSGLVINFVQLCTLALWPVSKQLYRRLNCRLAYSLWSQLVMLLEWWSCTECTLFTDQATVERFGKEHAVIILNHNFEIDFLCGWTMCERFGVLGSSKVLAKKELLYVPLIGWTWYFLEIVFCKRKWEEDRDTVVEGLRRLSDYPEYMWFLLYCEGTRFTETKHRVSMEVAAAKGLPVLKYHLLPRTKGFTTAVKCLRGTGRPQTARAGATAMLTENSDFF

SEQ ID NO: 864062 - protein, 199 aa, Homo sapiens
VHCAVIRPWELSTSLHLPPNITTLRPVRPSQHPRGDKFWSSESWEGSCWCDLSCSPDPKGIWDLPPSTNGVGLLSSRLWFHAPTVAPAPSDTASSPREGRTTKVMDLQDVEVDDPGRWPSAREHVKRLWAVQTAGGHRPGCDLGPHGRVVDLLLELGSRAEASPSDLALAGSIHPFWGLLPQRLPLRRAGPKTPEFRGH

SEQ ID NO: 864063 - protein, 160 aa, Homo sapiens
GPLCSHQALGAFHIPPPPTQHHHSPASETVTAPQRRQILELRELGVAPAPSDTASSPREGRTTKVMDLQDVEVDDPGRWPSAREHVKRLWAVQTAGGHRPGCDLGPHGRVVDLLLELGSRAEASPSDLALAGSIHPFWGLLPQRLPLRRAGPKTPEFRGH

SEQ ID NO: 864064 - protein, 314 aa, Homo sapiens; identical to SEQ ID NO: 864051

SEQ ID NO: 864065 - protein, 376 aa, Homo sapiens; identical to SEQ ID NO: 864048

SEQ ID NO: 864066 - protein, 376 aa, Homo sapiens; identical to SEQ ID NO: 864048

SEQ ID NO: 864067 - protein, 376 aa, Homo sapiens; identical to SEQ ID NO: 864048

SEQ ID NO: 864068 - protein, 83 aa, Homo sapiens
DSYLHHYLQYSRGLSYCSFSMALQVQVGLQAREEAPPGQGRAGVKRGTLHMGEGRPGPSAAWQTQTCGSHVNLRTSGSHPPCF

SEQ ID NO: 864069 - protein, 381 aa, Homo sapiens
MLLSIGMLMLSATQVYTILTVQLFAFLNLLPVEADILAYNFENASQTFDDLPARFGYRLPAEGLKGFLINSKPENACEPIVPPPVKDNSSGTFIVLIRRLDCNFDIKVLNAQRAGYKAAIVHNVDSDDLISMGSNDIEVLKKIDIPSVFIGESSANSLKDEFTYEKGGHLILVPEFSLPLEYYLIPFLIIVGICLILIVIFMITKFVQDRHRARRNRLRKDQLKKLPVHKFKKGDEYDVCAICLDEYEDGDKLRILPCSHAYHCKCVDPWLTKTKKTCPVCKQKVVPSQGDSDSDTDSSQEENEVTEHTPLLRPLASVSAQSFGALSESRSHQNMTESSDYEEDDNEDTDSSDAENEINEHDVVVQLQPNGERDYNIANTV

SEQ ID NO: 864070 - protein, 381 aa, Homo sapiens; identical to SEQ ID NO: 864069

SEQ ID NO: 864071 - protein, 168 aa, Homo sapiens
MLLSIGMLMLSATQVYTILTVQLFAFLNLLPVEADILAYNFENASQTFDDLPARFGYRLPAEGLKGFLINSKPENACEPIVPPPVKDNSSGTFIVLIRRLDCNFDIKVLNAQRAGYKAAIVHNVDSDDLISMGSNDIEVLKKIDIPSVFIGESSANSLKDEFTYEKGT

SEQ ID NO: 864072 - protein, 250 aa, Homo sapiens
MGSNDIEVLKKIDIPSVFIGESSANSLKDEFTYEKGGHLILVPEFSLPLEYYLIPFLIIVGICLILIVIFMITKFVQDRHRARRNRLRKDQLKKLPVHKFKKGDEYDVCAICLDEYEDGDKLRILPCSHAYHCKCVDPWLTKTKKTCPVCKQKVVPSQGDSDSDTDSSQEENEVTEHTPLLRPLASVSAQSFGALSESRSHQNMTESSDYEEDDNEDTDSSDAENEINEHDVVVQLQPNGERDYNIANTV

SEQ ID NO: 864073 - protein, 225 aa, Homo sapiens
GTARKLRDEKGGHLILVPEFSLPLEYYLIPFLIIVGICLILIVIFMITKFVQDRHRARRNRLRKDQLKKLPVHKFKKGDEYDVCAICLDEYEDGDKLRILPCSHAYHCKCVDPWLTKTKKTCPVCKQKVVPSQGDSDSDTDSSQEENEVTEHTPLLRPLASVSAQSFGALSESRSHQNMTESSDYEEDDNEDTDSSDAENEINEHDVVVQLQPNGERDYNIANTV

SEQ ID NO: 864074 - protein, 381 aa, Homo sapiens; identical to SEQ ID NO: 864069

SEQ ID NO: 864075 - protein, 381 aa, Homo sapiens; identical to SEQ ID NO: 864069

SEQ ID NO: 864076 - protein, 358 aa, Homo sapiens
MLLSIGMLMLSATQVYTILTVQLFAFLNLLPVEADILAYNFENASQTFDDLPARFGYRLPAEGLKGFLINSKPENACEPIVPPPVLNAQRAGYKAAIVHNVDSDDLISMGSNDIEVLKKIDIPSVFIGESSANSLKDEFTYEKGGHLILVPEFSLPLEYYLIPFLIIVGICLILIVIFMITKFVQDRHRARRNRLRKDQLKKLPVHKFKKGDEYDVCAICLDEYEDGDKLRILPCSHAYHCKCVDPWLTKTKKTCPVCKQKVVPSQGDSDSDTDSSQEENEVTEHTPLLRPLASVSAQSFGALSESRSHQNMTESSDYEEDDNEDTDSSDAENEINEHDVVVQLQPNGERDYNIANTV

SEQ ID NO: 864077 - protein, 129 aa, Homo sapiens [sequence omitted]

SEQ ID NO: 864078 - protein, 81 aa, Homo sapiens
GHRPFQCRYCPYSASQKGNLKTHVLCVHRMPFDNSQYPDRRFKRSRVDSEASGNFEEPTAVKAGSSADLTEEGGKGQEETN

SEQ ID NO: 864079 - protein, 432 aa, Homo sapiens
MILLRASEVRQLLHNKFVVILGDSVHRAVYKDLVLLLQKDRLLTPGQLRARGELNFEQDELVDGGQRGHMHNGLNYREVREFRSDHHLVRFYFLTRVYSDYLQTILKELQSGEHAPDLVIMNSCLWDISRYGPNSWRSYLENLENLFQCLGQVLPESCLLVWNTAMPVGEEVTGGFLPPKLRRQKATFLKNEVVKANFHSATEARKHNFDVLDLHFHFRHARENLHWDGVHWNGRVHRCLSQLLLAHVADAWGVELPHRHPVGEWIKKKKPGPRVEGPPQANRNHPALPLSPPLPSPTYRPLLGFPPQRLPLLPLLSPQPPPPILHHQGMPRFPQGPPDACFSSDHTFQSDQFYCHSDVPSSAHAGFFVEDNFMVGPQLPMPFFPTPRYQRPAPVVHRGFGRYRPRGPYTPWGQRPRPSKRRAPANPEPRPQ

SEQ ID NO: 864080 - protein, 432 aa, Homo sapiens; identical to SEQ ID NO: 864079

SEQ ID NO: 864081 - protein, 125 aa, Homo sapiens
MILLRASEVRQLLHNKFVVILGDSVHRAVYKDLVLLLQKDRLLTPGQLRARGELNFEQDELVDGGQRGHMHNGLNYREVREFRSDHHLVRFYFLTRVYSDYLQTILKELQSGEHAPDLVIMNSCL

SEQ ID NO: 864082 - protein, 432 aa, Homo sapiens; identical to SEQ ID NO: 864079

SEQ ID NO: 864083 - protein, 312 aa, Homo sapiens
MNSCLWDISRYGPNSWRSYLENLENLFQCLGQVLPESCLLVWNTAMPVGEEVTGGFLPPKLRRQKATFLKNEVVKANFHSATEARKHNFDVLDLHFHFRHARENLHWDGVHWNGRVHRCLSQLLLAHVADAWGVELPHRHPVGEWIKKKKPGPRVEGPPQANRNHPALPLSPPLPSPTYRPLLGFPPQRLPLLPLLSPQPPPPILHHQGMPRFPQGPPDACFSSDHTFQSDQFYCHSDVPSSAHAGFFVEDNFMVGPQLPMPFFPTPRYQRPAPVVHRGFGRYRPRGPYTPWGQRPRPSKRRAPANPEPRPQ

SEQ ID NO: 864084 - protein, 1298 aa, Homo sapiens
MAAETQTLNFGPEWLRALSSGGSITSPPLSPALPKYKLADYRYGREEMLALFLKDNKIPSDLLDKEFLPILQEEPLPPLALVPFTEEEQRNFSMSVNSAAVLRLTGRGGGGTVVGAPRGRSSSRGRGRGRGECGFYQRSFDEVEGVFGRGGGREMHRSQSWEERGDRRFEKPGRKDVGRPNFEEGGPTSVGRKHEFIRSESENWRIFREEQNGEDEDGGWRLAGSRRDGERWRPHSPDGPRSAGWREHMERRRRFEFDFRDRDDERGYRRVRSGSGSIDDDRDSLPEWCLEDAEEEMGTFDSSGAFLSLKKVQKEPIPEEQEMDFRPVDEGEECSDSEGSHNEEAKEPDKTNKKEGEKTDRVGVEASEETPQTSSSSARPGTPSDHQSQEASQFERKDEPKTEQTEKAEEETRMENSLPAKVPSRGDEMVADVQQPLSQIPSDTASPLLILPPPVPNPSPTLRPVETPVVGAPGMGSVSTEPDDEEGLKHLEQQAEKMVAYLQDSALDDERLASKLQEHRAKGVSIPLMHEAMQKWYYKDPQGEIQGPFNNQEMAEWFQAGYFTMSLLVKRACDESFQPLGDIMKMWGRVPFSPGPAPPPHMGELDQERLTRQQELTALYQMQHLQYQQFLIQQQYAQVLAQQQKAALSSQQQQQLALLLQQFQTLKMRISDQNIIPSVTRSVSVPDTGSIWELQPTASQPTVWEGGSVWDLPLDTTTPGPALEQLQQLEKAKAAKLEQERREAEMRAKREEEERKRQEELRRQQEEILRRQQEEERKRREEEELARRKQEEALRRQREQEIALRRQREEEERQQQEEALRRLEERRREEEERRKQEELLRKQEEEAAKWAREEEEAQRRLEENRLRMEEEAARLRHEEEERKRKELEVQRQKELMRQRQQQQEALRRLQQQQQQQQLAQMKLPSSSTWGQQSNTTACQSQATLSLAEIQKLEEERERQLREEQRRQQRELMKALQQQQQQQQQKLSGWGNVSKPSGTTKSLLEIQQEEARQMQKQQQQQQQHQQPNRARNNTHSNLHTSIGNSVWGSINTGPPNQWASDLVSSIWSNADTKNSNMGFWDDAVKEVGPRNSTNKNKNNASLSKSVGVSNRQNKKVEEEEKLLKLFQGVNKAQDGFTQWCEQMLHALNTANNLDVPTFVSFLKEVESPYEVHDYIRAYLGDTSEAKEFAKQFLERRAKQKANQQRQQQQLPQQQQQPPQQPPQQPQQQDSVWGMNHSTLHSVFQTNQSNNQQSNFEAVQSGKKKKKQKMVRADPSLLGFSVNASSERLNMGEIETLDDY

SEQ ID NO: 864085 - protein, 1298 aa, Homo sapiens; identical to SEQ ID NO: 864084

SEQ ID NO: 864086 - protein, 1144 aa, Homo sapiens [sequence omitted]

SEQ ID NO: 864087 - protein, 1298 aa, Homo sapiens; identical to SEQ ID NO: 864084

SEQ ID NO: 864088 - protein, 1048 aa, Homo sapiens
RIADLLADLFSLLLSYLSYRVRSGSGSIDDDRDSLPEWCLEDAEEEMGTFDSSGAFLSLKKVQKEPIPEEQEMDFRPVDEGEECSDSEGSHNEEAKEPDKTNKKEGEKTDRVGVEASEETPQTSSSSARPGTPSDHQSQEASQFERKDEPKTEQTEKAEEETRMENSLPAKVPSRGDEMVADVQQPLSQIPSDTASPLLILPPPVPNPSPTLRPVETPVVGAPGMGSVSTEPDDEEGLKHLEQQAEKMVAYLQDSALDDERLASKLQEHRAKGVSIPLMHEAMQKWYYKDPQGEIQGPFNNQEMAEWFQAGYFTMSLLVKRACDESFQPLGDIMKMWGRVPFSPGPAPPPHMGELDQERLTRQQELTALYQMQHLQYQQFLIQQQYAQVLAQQQKAALSSQQQQQLALLLQQFQTLKMRISDQNIIPSVTRSVSVPDTGSIWELQPTASQPTVWEGGSVWDLPLDTTTPGPALEQLQQLEKAKAAKLEQERREAEMRAKREEEERKRQEELRRQQEEILRRQQEEERKRREEEELARRKQEEALRRQREQEIALRRQREEEERQQQEEALRRLEERRREEEERRKQEELLRKQEEEAAKWAREEEEAQRRLEENRLRMEEEAARLRHEEEERKRKELEVQRQKELMRQRQQQQEALRRLQQQQQQQQLAQMKLPSSSTWGQQSNTTACQSQATLSLAEIQKLEEERERQLREEQRRQQRELMKALQQQQQQQQQKLSGWGNVSKPSGTTKSLLEIQQEEARQMQKQQQQQQQHQQPNRARNNTHSNLHTSIGNSVWGSINTGPPNQWASDLVSSIWSNADTKNSNMGFWDDAVKEVGPRNSTNKNKNNASLSKSVGVSNRQNKKVEEEEKLLKLFQGVNKAQDGFTQWCEQMLHALNTANNLDVPTFVSFLKEVESPYEVHDYIRAYLGDTSEAKEFAKQFLERRAKQKANQQRQQQQLPQQQQQPPQQPPQQPQQQDSVWGMNHSTLHSVFQTNQSNNQQSNFEAVQSGKKKKKQKMVRADPSLLGFSVNASSERLNMGEIETLDDY

SEQ ID NO: 864089 - protein, 1298 aa, Homo sapiens; identical to SEQ ID NO: 864084

SEQ ID NO: 864090 - protein, 1298 aa, Homo sapiens; identical to SEQ ID NO: 864084

SEQ ID NO: 864091 - protein, 1401 aa, Homo sapiens
MAAETQTLNFGPEWLRALSSGGSITSPPLSPALPKYKLADYRYGREEMLALFLKDNKIPSDLLDKEFLPILQEEPLPPLALVPFTEEEQRNFSMSVNSAAVLRLTGRGGGGTVVGAPRGRSSSRGRGRGRGECGFYQRSFDEVEGVFGRGGGREMHRSQSWEERGDRRFEKPGRKDVGRPNFEEGGPTSVGRKHEFIRSESENWRIFREEQNGEDEDGGWRLAGSRRDGERWRPHSPDGPRSAGWREHMERRRRFEFDFRDRDDERGYRRVRSGSGSIDDDRDSLPEWCLEDAEEEMGTFDSSGAFLSLKKVQKEPIPEEQEMDFRPVDEGEECSDSEGSHNEEAKEPDKTNKKEGEKTDRVGVEASEETPQTSSSSARPGTPSDHQSQEASQFERKDEPKTEQTEKAEEETRMENSLPAKVPSRGDEMVADVQQPLSQIPSDTASPLLILPPPVPNPSPTLRPVETPVVGAPGMGSVSTEPDDEEGLKHLEQQAEKMVAYLQDSALDDERLASKLQEHRAKGVSIPLMHEAMQKWYYKDPQGEIQGPFNNQEMAEWFQAGYFTMSLLVKRACDESFQPLGDIMKMWGRVPFSPGPAPPPHMGELDQERLTRQQELTALYQMQHLQYQQFLIQQQYAQVLAQQQKAALSSQQQQQLALLLQQFQTLKMRISDQNIIPSVTRSVSVPDTGSIWELQPTASQPTVWEGGSVWDLPLDTTTPGPALEQLQQLEKAKAAKLEQERREAEMRAKREEEERKRQEELRRQQEEILRRQQEEERKRREEEELARRKQEEALRRQREQEIALRRQREEEERQQQEEALRRLEERRREEEERRKQEELLRKQEEEAAKWAREEEEAQRRLEENRLRMEEEAARLRHEEEERKRKELEVQRQKELMRQRQQQQEALRRLQQQQQQQQLAQMKLPSSSTWGQQSNTTACQSQATLSLAEIQKLEEERERQLREEQRRQQRELMKALQQQQQQQQQKLSGWGNVSKPSGTTKSLLEIQQEEARQMQKQQQQQQQHQQPNRARNNTHSNLHTSIGNSVWGSINTGPPNQWASDLVSSIWSNADTKNSNMGFWDDAVKEVGPRNSTNKNKNNASLSKSVGVSNRQNKKVEEEEKLLKLFQGVNKAQDGFTQWCEQMLHALNTANNLDVPTFVSFLKEVESPYEVHDYIRAYLGDTSEAKEFAKQFLERRAKQKANQQRQQQQLPQQQQQPPQQPPQQPQQQDSVWGMNHSTLHSVFQQLEKAKAAKLEQERREAEMRAKREEEERKRQEDLRRQQEEILRRQQEEERKWREEEELARRKQEEALRRQREQEIALRRQREEEERQQQEEALRRLEERRREEEERRKQEELLRKQEEGRPQLRQTALSVSGVLQVEAQIRSHVEARPWLFLPLWKPP

SEQ ID NO: 864092 - protein, 157 aa, Homo sapiens
MLHALNTANNLDVPTFVSFLKEVESPYEVHDYIRAYLGDTSEAKEFAKQFLERRAKQKANQQRQQQQLPQQQQQPPQQPPQQPQQQDSVWGMNHSTLHSVFQTNQSNNQQSNFEAVQSGKKKKKQKMVRADPSLLGFSVNASSERLNMGEIETLDDY

SEQ ID NO: 864093 - protein, 79 aa, Homo sapiens
NVSISPMLSRSDDAWVKSRRWMTTEHLPVDWPSLSCLPTMESPPLDTTLTHHLLFITLQQITEPIISGFFFWPFVSKIL

SEQ ID NO: 864094 - protein, 356 aa, Homo sapiens
MAAETQTLNFGPEWLRALSSGGSITSPPLSPALPKYKLADYRYGREEMLALFLKDNKIPSDLLDKEFLPILQEEPLPPLALVPFTEEEQRNFSMSVNSAAVLRLTGRGGGGTVVGAPRGRSSSRGRGRGRGECGFYQRSFDEVEGVFGRGGGREMHRSQSWEERGDRRFEKPGRKDVGRPNFEEGGPTSVGRKHEFIRSESENWRIFREEQNGEDEDGGWRLAGSRRDGERWRPHSPDGPRSAGWREHMERRRRFEFDFRDRDDERGYRRVRSGSGSIDDDRDSLPEWCLEDAEEEMGTFDSSGAFLSLKKVQKEPIPEEQEMDFRPVDEGEECSDSEGSHNEEAKDADKLANMGK

SEQ ID NO: 864095 - protein, 1298 aa, Homo sapiens; identical to SEQ ID NO: 864084

SEQ ID NO: 864096 - protein, 1298 aa, Homo sapiens; identical to SEQ ID NO: 864084

SEQ ID NO: 864097 - protein, 1298 aa, Homo sapiens; identical to SEQ ID NO: 864084

SEQ ID NO: 864098 - protein, 1129 aa, Homo sapiens
MTKLPDDPGRPNFEEGGPTSVGRKHEFIRSESENWRIFREEQNGEDEDGGWRLAGSRRDGERWRPHSPDGPRSAGWREHMERRRRFEFDFRDRDDERGYRRVRSGSGSIDDDRDSLPEWCLEDAEEEMGTFDSSGAFLSLKKVQKEPIPEEQEMDFRPVDEGEECSDSEGSHNEEAKEPDKTNKKEGEKTDRVGVEASEETPQTSSSSARPGTPSDHQSQEASQFERKDEPKTEQTEKAEEETRMENSLPAKVPSRGDEMVADVQQPLSQIPSDTASPLLILPPPVPNPSPTLRPVETPVVGAPGMGSVSTEPDDEEGLKHLEQQAEKMVAYLQDSALDDERLASKLQEHRAKGVSIPLMHEAMQKWYYKDPQGEIQGPFNNQEMAEWFQAGYFTMSLLVKRACDESFQPLGDIMKMWGRVPFSPGPAPPPHMGELDQERLTRQQELTALYQMQHLQYQQFLIQQQYAQVLAQQQKAALSSQQQQQLALLLQQFQTLKMRISDQNIIPSVTRSVSVPDTGSIWELQPTASQPTVWEGGSVWDLPLDTTTPGPALEQLQQLEKAKAAKLEQERREAEMRAKREEEERKRQEELRRQQEEILRRQQEEERKRREEEELARRKQEEALRRQREQEIALRRQREEEERQQQEEALRRLEERRREEEERRKQEELLRKQEEEAAKWAREEEEAQRRLEENRLRMEEEAARLRHEEEERKRKELEVQRQKELMRQRQQQQEALRRLQQQQQQQQLAQMKLPSSSTWGQQSNTTACQSQATLSLAEIQKLEEERERQLREEQRRQQRELMKALQQQQQQQQQKLSGWGNVSKPSGTTKSLLEIQQEEARQMQKQQQQQQQHQQPNRARNNTHSNLHTSIGNSVWGSINTGPPNQWASDLVSSIWSNADTKNSNMGFWDDAVKEVGPRNSTNKNKNNASLSKSVGVSNRQNKKVEEEEKLLKLFQGVNKAQDGFTQWCEQMLHALNTANNLDVPTFVSFLKEVESPYEVHDYIRAYLGDTSEAKEFAKQFLERRAKQKANQQRQQQQLPQQQQQPPQQPPQQPQQQDSVWGMNHSTLHSVFQTNQSNNQQSNFEAVQSGKKKKKQKMVRADPSLLGFSVNASSERLNMGEIETLDDY

SEQ ID NO: 864099 - protein, 1280 aa, Homo sapiens
MAAETQTLNFGPEWLRALSSGGSITSPPLSPALPKYKLADYRYGREEMLALFLKDNKIPSDLLDKEFLPILQEEPLPPLALVPFTEEEQRNFSMSVNSAAVLRLTGRGGGGTVVGAPRGRSSSRGRGRGRGECGFYQRSFDEVEGVFGRGGGREMHRSQSWEERGDRRFEKPGRKDVGRPNFEEGGPTSVGRKHEFIRSESENWRIFREEQNGEDEDGGWRLAGSRRDGERWRPHSPDGPRSAGWREHMERRRRFEFDFRDRDDERGYRRVRSGSGSIDDDRDSLPEWCLEDAEEEMGTFDSSGAFLSLKKVQKEPIPEEQEMDFRPVDEGEECSDSEGSHNEEAKEPDKTNKKEGEKTDRVGVEASEETPQTSSSSARPGTPSDHQSQEASQFERKDEPKTEQTEKAEEETRMENSLPAKVPSRGDEMVADVQQPLSQIPSDTASPLLILPPPVPNPSPTLRPVETPVVGAPGMGSVSTEPDDEEGLKHLEQQAEKMVAYLQDSALDDERLASKLQEHRAKGVSIPLMHEAMQKWYYKDPQGEIQGPFNNQEMAEWFQAGYFTMSLLVKRACDESFQPLGDIMKMWGRVPFSPGPAPPPHMGELDQERLTRQQELTALYQMQHLQYQQFLIQQQYAQVLAQQQKAALSSQQQQQLALLLQQFQTLKMRISDQNIIPSVTRSVSVPDTGSIWELQPTASQPTVWEGGSVWDLPLDTTTPGPALEQLQQLEKAKAAKLEQERREAEMRAKREEEERKRQEELRRQQEEILRRQQEEERKRREEEELARRKQEEALRRQREQEIALRRQREEEERQQQEEALRRLEERRREEEERRKQEELLRKQEEEAAKWAREEEEAQRRLEENRLRMEEEAARLRHEEEERKRKELEVQRQKELMRQRQQQQEALRRLQQQQQQQQLAQMKLPSSSTWGQQSNTTACQSQATLSLAEIQKLEEERERQLREEQRRQQRELMKALQQQQQQQQQKLSGWGNVSKPSGTTKSLLEIQQEEARQMQKQQQQQQQHQQPNRARNNTHSNLHTSIGNSVWGSINTGPPNQWASDLVSSIWSNADTKNSNMGFWDDAVKEVGPRNSTNKNKNNASLSKSVGVSNRQNKKVEEEEWCEQMLHALNTANNLDVPTFVSFLKEVESPYEVHDYIRAYLGDTSEAKEFAKQFLERRAKQKANQQRQQQQLPQQQQQPPQQPPQQPQQQDSVWGMNHSTLHSVFQTNQSNNQQSNFEAVQSGKKKKKQKMVRADPSLLGFSVNASSERLNMGEIETLDDY

SEQ ID NO: 864100 - protein, 475 aa, Homo sapiens
NSFLKQLFRSETQTSIQTPNEEEAAKWAREEEEAQRRLEENRLRMEEEAARLRHEEEERKRKELEVQRQKELMRQRQQQQEALRRLQQQQQQQQLAQMKLPSSSTWGQQSNTTACQSQATLSLAEIQKLEEERERQLREEQRRQQRELMKALQQQQQQQQQKLSGWGNVSKPSGTTKSLLEIQQEEARQMQKQQQQQQQHQQPNRARNNTHSNLHTSIGNSVWGSINTGPPNQWASDLVSSIWSNADTKNSNMGFWDDAVKEVGPRNSTNKNKNNASLSKSVGVSNRQNKKVEEEEKLLKLFQGVNKAQDGFTQWCEQMLHALNTANNLDVPTFVSFLKEVESPYEVHDYIRAYLGDTSEAKEFAKQFLERRAKQKANQQRQQQQLPQQQQQPPQQPPQQPQQQDSVWGMNHSTLHSVFQTNQSNNQQSNFEAVQSGKKKKKQKMVRADPSLLGFSVNASSERLNMGEIETLDDY

SEQ ID NO: 864101 - protein, 1298 aa, Homo sapiens; identical to SEQ ID NO: 864084

SEQ ID NO: 864102 - protein, 255 aa, Homo sapiens
LGRGRGYSAEAYQWASDLVSSIWSNADTKNSNMGFWDDAVKEVGPRNSTNKNKNNASLSKSVGVSNRQNKKVEEEEKLLKLFQGVNKAQDGFTQWCEQMLHALNTANNLDVPTFVSFLKEVESPYEVHDYIRAYLGDTSEAKEFAKQFLERRAKQKANQQRQQQQLPQQQQQPPQQPPQQPQQQDSVWGMNHSTLHSVFQTNQSNNQQSNFEAVQSGKKKKKQKMVRADPSLLGFSVNASSERLNMGEIETLDDY

SEQ ID NO: 864103 - protein, 737 aa, Homo sapiens
MAAETQTLNFGPEWLRALSSGGSITSPPLSPALPKYKLADYRYGREEMLALFLKDNKIPSDLLDKEFLPILQEEPLPPLALVPFTEEEQRNFSMSVNSAAVLRLTGRGGGGTVVGAPRGRSSSRGRGRGRGECGFYQRSFDEVEGVFGRGGGREMHRSQSWEERGDRRFEKPGRKDVGRPNFEEGGPTSVGRKHEFIRSESENWRIFREEQNGEDEDGGWRLAGSRRDGERWRPHSPDGPRSAGWREHMERRRRFEFDFRDRDDERGYRRVRSGSGSIDDDRDSLPEWCLEDAEEEMGTFDSSGAFLSLKKVQKEPIPEEQEMDFRPVDEGEECSDSEGSHNEEAKEPDKTNKKEGEKTDRVGVEASEETPQTSSSSARPGTPSDHQSQEASQFERKDEPKTEQTEKAEEETRMENSLPAKVPSRGDEMVADVQQPLSQIPSDTASPLLILPPPVPNPSPTLRPVETPVVGAPGMGSVSTEPDDEEGLKHLEQQAEKMVAYLQDSALDDERLASKLQEHRAKGVSIPLMHEAMQKWYYKDPQGEIQGPFNNQEMAEWFQAGYFTMSLLVKRACDESFQPLGDIMKMWGRVPFSPGPAPPPHMGELDQERLTRQQELTALYQMQHLQYQQFLIQQQYAQVLAQQQKAALSSQQQQQLALLLQQFQTLKMRISDQNIIPSVTRSVSVPDTGSIWELQPTASQPTVWEGGSVWDLPLDTTTPGPALEQLQQLEKAKAAKV

SEQ ID NO: 864104 - protein, 127 aa, Homo sapiens
MAAETQTLNFGPEWLRALSSGGSITSPPLSPALPKYKLADYRYGREEMLALFLKDNKIPSDLLDKEFLPILQEEPLPPLALVPFTEEEQRNFSMSVNSAAVLRLTGRGGGGTVVGAPRGRSSSRGRG

SEQ ID NO: 864105 - protein, 311 aa, Homo sapiens
RTRGSTHASSNVYITPAGSQGLPPHYDDVEVFILQLEGEKHWRLYHPTVPLAREYSVEAEERIGRPVHEFMLKPGDLLYFPRGTIHQADTPAGLAHSTHVTISTYQNNSWGDFLLDTISGLVFDTAKEDVELRTGIPRQLLLQVESTTVATRRLSGFLRTLADRLEGTKELLSSDMKKDFIMHRLPPYSAGDGAELSTPGGKLPRLDSVVRLQFKDHIVLTVLPDQDQSDETQEKMVYIYHSLKNSRETHMMGNEEETEFHGLRFPLSHLDALKQIWNSPAISVKDLKLTTDEEKESLVLSLWTECLIQVV

SEQ ID NO: 864106 - protein, 496 aa, Homo sapiens
AAAPQRSGLAAASNRPCRVCISLLLCLEDRTMPKKAKPTGSGKEEGPAPCKQMKLEAAGGPSALNFDSPSSLFESLISPIKTETFFKEFWEQKPLLIQRDDPALATYYGSLFKLTDLKSLCSRGMYYGRDVNVCRCVNGKKKVLNKDGKAHFLQLRKDFDQKRATIQFHQPQRFKDELWRIQEKLECYFGSLVGSNVYITPAGSQGLPPHYDDVEVFILQLEGEKHWRLYHPTVPLAREYSVEAEERIGRPVHEFMLKPGDLLYFPRGTIHQADTPAGLAHSTHVTISTYQNNSWGDFLLDTISGLVFDTAKEDVELRTGIPRQLLLQVESTTVATRRLSGFLRTLADRLEGTKELLSSDMKKDFIMHRLPPYSAGDGAELSTPGGKLPRLDSVVRLQFKDHIVLTVLPDQDQSDETQEKMVYIYHSLKNSRETHMMGNEEETEFHGLRFPLSHLDALKQIWNSPAISVKDLKLTTDEEKESLVLSLWTECLIQVV

SEQ ID NO: 864107 - protein, 465 aa, Homo sapiens
MPKKAKPTGSGKEEGPAPCKQMKLEAAGGPSALNFDSPSSLFESLISPIKTETFFKEFWEQKPLLIQRDDPALATYYGSLFKLTDLKSLCSRGMYYGRDVNVCRCVNGKKKVLNKDGKAHFLQLRKDFDQKRATIQFHQPQRFKDELWRIQEKLECYFGSLVGSNVYITPAGSQGLPPHYDDVEVFILQLEGEKHWRLYHPTVPLAREYSVEAEERIGRPVHEFMLKPGDLLYFPRGTIHQADTPAGLAHSTHVTISTYQNNSWGDFLLDTISGLVFDTAKEDVELRTGIPRQLLLQVESTTVATRRLSGFLRTLADRLEGTKELLSSDMKKDFIMHRLPPYSAGDGAELSTPGGKLPRLDSVVRLQFKDHIVLTVLPDQDQSDETQEKMVYIYHSLKNSRETHMMGNEEETEFHGLRFPLSHLDALKQIWNSPAISVKDLKLTTDEEKESLVLSLWTECLIQVV

SEQ ID NO: 864108 - protein, 448 aa, Homo sapiens
AAAPQRSGLAAASNRPCRVCISLLLCLEDRTMPKKAKPTGSGKEEGPAPCKQMKLEAAGGPSALNFDSPSSLFESLISPIKTETFFKEFWEQKPLLIQRDDPALATYYGSLFKLTDLKSLCSRGMYYGRDVNVCRCVNGKKKVLNKDGKAHFLQLRKDFDQKRATIQFHQPQRFKDELWRIQEKLECYFGSLVGSNVYITPAGSQGLPPHYDDVEVFILQLEGEKHWRLYHPTVPLAREYSVEAEERIGRPVHEFMLKPGDLLYFPRGTIHQADTPAGLAHSTHVTISTYQNNSWGDFLLDTISGLVFDTAKEDVELRTGIPRQLLLQVESTTVATRRLSGFLRTLADRLEGTKELLSSDMKKDFIMHRLPPYSAGDGAELSTPGGKLPRLDSVVRLQFKDHIVLTVLPDQDQSDETQEKMVYIYHSLKNSRETHMMGNEEETEVCFN

SEQ ID NO: 864109 - protein, 117 aa, Homo sapiens
MKKDFIMHRLPPYSAGDGAELSTPGGKLPRLDSVVRLQFKDHIVLTVLPDQDQSTHMMGNEEETEFHGLRFPLSHLDALKQIWNSPAISVKDLKLTTDEEKESLVLSLWTECLIQVV

SEQ ID NO: 864110 - protein, 116 aa, Homo sapiens
KKKKKLFSTKRWQHHHPYLMYKSVGLQMAHPDLLTIAHTSPCLPKCCCLPHKAPTLCGPVFQLCPHEDPWEGRTQAPLGCFPAVLWTPHRGVTSNWSLHLSLKACLGTFLSGNIIF

SEQ ID NO: 864111 - protein, 89 aa, Homo sapiens
SQSESNQILCLLMEVHIPPMKQFCQKSHLIMMKPPDLTTPSLEIQGTEGQIIYKGLNQQNPDSGKLQDIWSCFNNRNAKRKDNDGLKET

SEQ ID NO: 864112 - protein, 238 aa, Homo sapiens
GDAEAGRRQHAEERGRRNPKTGLTLERVGPESSPYLSRRHRGQGQEGEHYHSCVQLAPTRGLEELGHGPLSLAGGPRVGGVAAAATEAPRMEWKVKVRSDGTRYVAKRPVRDRLLKARALKIREERSGMTTDDDAVSEMKMGRYWSKEERKQHLIRAREQRKRREFMMQSRLECLREQQNGDSKPELNIIALSHRKTMKKRNKKILDNWITIQEMLAHGARSADGKRVYNPLLSVTTV

SEQ ID NO: 864113 - protein, 622 aa, Homo sapiens
GAGRGLGAGREAVTSSRRRKNMAGASELGTGPGAAGGDGDDSLYPIAVLIDELRNEDVQLRLNSIKKLSTIALALGVERTRSELLPFLTDTIYDEDEVLLALAEQLGNFTGLVGGPDFAHCLLPPLENLATVEETVVRDKAVESLRQISQEHTPVALEAYFVPLVKRLASGDWFTSRTSACGLFSVCYPRASNAVKAEIRQQFRSLCSDDTPMVRRAAASKLGEFAKVLELDSVKSEIVPLFTSLASDEQDSVRLLAVEACVSIAQLLSQDDLETLVMPTLRQAAEDKSWRVRYMVADRFSELQKAMGPKITLNDLIPAFQNLLKDCEAEVRAAAAHKVKELGENLPIEDRETIIMNQILPYIKELVSDTNQHVKSALASVIMGLSTILGKENTIEHLLPLFLAQLKDECPDVRLNIISNLDCVNEVIGIRQLSQSLLPAIVELAEDAKWRVRLAIIEYMPLLAGQLGVEFFDEKLNSLCMAWLVDHVYAIREAATNNLMKLVQKFGTEWAQNTIVPKVLVMANDPNYLHRMTTLFCINALSEACGQEITTKQMLPIVLKMAGDQVANVRFNVAKSLQKIGPILDTNALQGEVKPVLQKLGQDEDMDVKYFAQEAISVLALA

SEQ ID NO: 864114 - protein, 587 aa, Homo sapiens
GAGRGLGAGREAVTSSRRRKNMAGASELGTGPGAAGGDGDDSLYPIAVLIDELRNEDVQLRLNSIKKLSTIALALGVERTRSELLPFLTDTIYDEDEVLLALAEQLGNFTGLVGGPDFAHCLLPPLENLATVEETVVRDKAVESLRQISQEHTPVALEAYFVPLVKRLASGDWFTSRTSACGLFSVCYPRASNAVKAEIRQQFRSLCSDDTPMVRRAAASKLGEFAKVLELDSVKSEIVPLFTSLASDEQDSVRLLAVEACVSIAQLLSQDDLETLVMPTLRQAAEDKSWRVRYMVADRFSELQKAMGPKITLNDLIPAFQNLLKDCEAEVRAAAAHKVKELGENLPIEDRETIIMNQILPYIKELVSDTNQHVKSALASVIMGLSTILGKENTIEHLLPLFLAQLKDECPDVRLNIISNLDCVNEVIGIRQLSQSLLPAIVELAEDAKWRVRLAIIEYMPLLAGQLGVEFFDEKLNSLCMAWLVDHVYAIREAATNNLMKLVQKFGTEWAQNTIVPKVLVMANDPNYLHRMTTLFCINALSEACGQEITTKQMLPIVLKMAGDQVANVRFNVAKSLQKIGPILDTK

SEQ ID NO: 864115 - protein, 622 aa, Homo sapiens; identical to SEQ ID NO: 864113

SEQ ID NO: 864116 - protein, 481 aa, Homo sapiens
GAGRGLGAGREAVTSSRRRKNMAGASELGTGPGAAGGDGDDSLYPIAVLIDELRNEDVQLRLNSIKKLSTIALALGVERTRSELLPFLTDTIYDEDEVLLALAEQLGNFTGLVGGPDFAHCLLPPLENLATVEETVVRDKAVESLRQISQEHTPVALEAYFVPLVKRLASGDWFTSRTSACGLFSVCYPRASNAVKAEIRQQFRSLCSDDTPMVRRAAASKLGEFAKVLELDSVKSEIVPLFTSLASDEQDSVRLLAVEACVSIAQLLSQDDLETLVMPTLRQAAEDKSWRVRYMVADRFSELQKAMGPKITLNDLIPAFQNLLKDCEAEVRAAAAHKVKELGENLPIEDRETIIMNQILPYIKELVSDTNQHVKSALASVIMGLSTILGKENTIEHLLPLFLAQLKDECPDVRLNIISNLDCVNEVIGIRQLSQSLLPAIVELAEDAKWRVRLAIIEYMPLLAGQLLGIAELVHFSQSTD

SEQ ID NO: 864117 - protein, 341 aa, Homo sapiens
GAGRGLGAGREAVTSSRRRKNMAGASELGTGPGAAGGDGDDSLYPIAVLIDELRNEDVQLRLNSIKKLSTIALALGVERTRSELLPFLTDTIYDEDEVLLALAEQLGNFTGLVGGPDFAHCLLPPLENLATVEETVVRDKAVESLRQISQEHTPVALEAYFVPLVKRLASGDWFTSRTSACGLFSVCYPRASNAVKAEIRQQFRSLCSDDTPMVRRAAASKLGEFAKVLELDSVKSEIVPLFTSLASDEQDSVRLLAVEACVSIAQLLSQDDLETLVMPTLRQAAEDKSWRVRYMVADRFSELQKAMGPKITLNDLIPAFQNLLKDCEAEVRAAAAHKVKG

SEQ ID NO: 864118 - protein, 550 aa, Homo sapiens
GAGRGLGAGREAVTSSRRRKNMAGASELGTGPGAAGGDGDDSLYPIAVLIDELRNEDVQLRLNSIKKLSTIALALGVERTRSELLPFLTDTIYDEDEVLLALAEQLGNFTGLVGGPDFAHCLLPPLENLATVEETVVRDKAVESLRQISQEHTPVALEAYFVPLVKRLASGDWFTSRTSACGLFSVCYPRASNAVKAEIRQQFRSLCSDDTPMVRRAAASKLGEFAKVLELDSVKSEIVPLFTSLASDEQDSVRLLAVEACVSIAQLLSQDDLETLVMPTLRQAAEDKSWRVRYMVADRFSELQKAMGPKITLNDLIPAFQNLLKDCEAEVRAAAAHKVKELGENLPIEDRETIIMNQILPYIKELVSDTNQHVKSALASVIMGLSTILGKENTIEHLLPLFLAQLKDECPDVRLNIISNLDCVNEVIGIRQLSQSLLPAIVELAEDAKWRVRLAIIEYMPLLAGQLALSEACGQEITTKQMLPIVLKMAGDQVANVRFNVAKSLQKIGPILDTNALQGEVKPVLQKLGQDEDMDVKYFAQEAISVLALA

SEQ ID NO: 864119 - protein, 267 aa, Homo sapiens [sequence omitted]

SEQ ID NO: 864120 - protein, 688 aa, Homo sapiens
GAGRGLGAGREAVTSSRRRKNMAGASELGTGPGAAGGDGDDSLYPIAVLIDELRNEDVQLRLNSIKKLSTIALALGVERTRSELLPFLTDTIYDEDEVLLALAEQLGNFTGLVGGPDFAHCLLPPLENLATVEETVVRDKAVESLRQISQEHTPVALEAYFVPLVKRLASGDWFTSRTSACGLFSVCYPRASNAVKAEIRQQFRSLCSDDTPMVRRAAASKLGEFAKVLELDSVKSEIVPLFTSLASDEQDSVRLLAVEACVSIAQLLSQDDLETLVMPTLRQAAEDKSWRVRYMVADRFSELQKAMGPKITLNDLIPAFQNLLKDCEAEVRAAAAHKVKELGENLPIEDRETIIMNQILPYIKELVSDTNQHVKSALASVIMGLSTILGKENTIEHLLPLFLAQLKDECPDVRLNIISNLDCVNEVIGIRQLSQSLLPAIVELAEDAKWRVRLAIIEYMPLLAGQLGVEFFDEKLNSLCMAWLVDHVYAIREAATNNLMKLVQKFGTEWAQNTIVPKVLVMANDPNYLHRMTTLFCINALSEACGQEITTKQMLPIVLKMAGDQVANVRFNVAKSLQKIGPILDTNALQGEVKPVLQKLGQDEDMDVKYFAQEAISVVAQRLRKLEFPVKDSGEPSVPRADKNHFPRPTVPGEDMGKGPVYQLRGDTRDTLAQLGIAELVHFSQSTD

SEQ ID NO: 864121 - protein, 258 aa, Homo sapiens
GNRGGHFPSPRGGSGVASLERAESWSTEPAKAIKPIDRKSVHQICSGPVVLSLSTAVKKMVENSLDAGATNIDLKLKDYGMDLIEVSGNGCGVEEENFEGLTLKHHTSKIQEFADLTQVETFGFRGEALSSLCALSDVTISTCHVSAKVGTRLVFDHDGKIIQKTPYPHPRGTTVSVKQLFSTLPVRHKEFQRNIKKKRACFPFAFCRDCQFLEGSPAMLPVQPAKLTPRSTPPHPCSLEDNVITVFSSVKNGPGSSR

SEQ ID NO: 864122 - protein, 203 aa, Homo sapiens
VGTVEGTFPVPEADPVLHPWRELRAGGELGSRSPLSRALFENHGFQPPWKWGEHGRGAWRGHLVEAPERHPQRPSDPVPIRCALKPSTEPAKAIKPIDRKSVHQICSGPVVLSLSTAVKKMVENSLDAGATNIDLKLKDYGMDLIEVSGNGCGVEEENFEGLMMSPFLPATYRRRLGLDWCLITMGKSSRKPPTPTPEGPQSA

SEQ ID NO: 864123 - protein, 203 aa, Homo sapiens; identical to SEQ ID NO: 864122

SEQ ID NO: 864124 - protein, 197 aa, Homo sapiens
VGTVEGTFPVPEADPVLHPWRELRAGGELGSRSPLSRALFENHGFQPPWKWGEHGRGAWRGHLVEAPERHPQRPSDPVPISTEPAKAIKPIDRKSVHQICSGPVVLSLSTAVKKMVENSLDAGATNIDLKLKDYGMDLIEVSGNGCGVEEENFEGLMMSPFLPATYRRRLGLDWCLITMGKSSRKPPTPTPEGPQSA

SEQ ID NO: 864125 - protein, 142 aa, Homo sapiens
GNRGGHFPSPRGGSGVASLERAESWSTEPAKAIKPIDRKSVHQICSGPVVLSLSTAVKKMVENSLDAGATNIDLKLKDYGMDLIEVSGNGCGVEEENFEGLMMSPFLPATYRRRLGLDWCLITMGKSSRKPPTPTPEGPQSA

SEQ ID NO: 864126 - protein, 123 aa, Homo sapiens
MHFYLLGTEPAKAIKPIDRKSVHQICSGPVVLSLSTAVKKMVENSLDAGATNIDLKLKDYGMDLIEVSGNGCGVEEENFEGLMMSPFLPATYRRRLGLDWCLITMGKSSRKPPTPTPEGPQSA

SEQ ID NO: 864127 - protein, 197 aa, Homo sapiens; identical to SEQ ID NO: 864124

SEQ ID NO: 864128 - protein, 287 aa, Homo sapiens
MEVMEGPLNLAHQQSRRADRLLAAGKYEEAISCHKKAAAYLSEAMKLTQSEQAHLSLELQRDSHMKQLLLIQERWKRAQREERLKAQQNTDKDAAAHLQTSHKPSAEDAEGQSPLSQKYSPSTEKCLPEIQGIFDRDPDTLLYLLQQKSEPAEPCIGSKAPKDDKTIIEEQATKIADLKRHVEFLVAENERLRKENKQLKAEKARLLKGPIEKELDVDADFVETSELWSLPPHAETATASSTWQKFAANTGKAKDIPIPNLPPLDFPSPELPLMELSEDILKGFMNN

SEQ ID NO: 864129 - protein, 251 aa, Homo sapiens
MEVMEGPLNLAHQQSRRADRLLAAGKYEEAISCHKKAAAYLSEAMKLTQSEQAHLSLELQRDSHMKQLLLIQERWKRAQREERLKAQQNTDKDAAAHLQTSHKPSAEDAEGQSPLSQKYSPSTEKCLPEIQGIFDRDPDTLLYLLQQKSEPAEPCIGSKAPKDDKTIIEEQATKIADLKRHVEFLVAENERLRKENKQLKAEKARLLKGPIEKELDVDADFVETSELWSLPPHAETATASSTWHGPVVPAT

SEQ ID NO: 864130 - protein, 260 aa, Homo sapiens
MEVMEGPLNLAHQQSRRADRLLAAGKYEEAISCHKKAAAYLSEAMKLTQSEQAHLSLELQRDSHMKQLLLIQERWKRAQREERLKAQQNTDKDAAAHLQTSHKPSAEDAEGQSPLSQKYSPSTEKCLPEIQGIFDRDPDTLLYLLQQKSEPAEPCIGSKAPKDDKTIIEEQATKIADLKRHVEFLVAENERLRKENKQLKAEKARLLKGPIELATTCRNCYSLLNLAEVRSKYWESQGHSNPQSSSLGFSISRTSSYGAL

SEQ ID NO: 864131 - protein, 107 aa, Homo sapiens
RRGRARGAAPEEEVVRLLLLQRLSLALGAQRGAAVSAAASSSLAVPSMFPGATTPLPKAAAYPGVYGSNGRTPQPGSSTEQTSRPFISCRQIRRGYFLSQKGCSISF

SEQ ID NO: 864132 - protein, 132 aa, Homo sapiens
RRGRARGAAPEEEVVRLLLLQRLSLALGAQRGAAVSAAASSSLAVPSMFPGATTPLPKAAAYPGVYGSNGRTPQPGSSTEQTSRPFISCRQIRRGYFLSQKGCSRDGVSPCWPGWSRTPDLRRSTSLSLPKC

SEQ ID NO: 864133 - protein, 103 aa, Homo sapiens
TTTPRVLRVLAAVAAAETKMAARVGAFLKNAWDKEPVLVVSFVVGGLAVILPPLSPYFKYSVMINKATPYNYPVPVRDDGNMPDVPSHPQDPQGPSLEWLKKL

SEQ ID NO: 864134 - protein, 105 aa, Homo sapiens
FAAASTRRRQKGAAVAAAETKMAARVGAFLKNAWDKEPVLVVSFVVGGLAVILPPLSPYFKYSVMINKATPYNYPVPVRDDGNMPDVPSHPQDPQGPSLEWLKKL

SEQ ID NO: 864135 - protein, 100 aa, Homo sapiens
  misc_feature (10)..(10): Xaa can be any naturally occurring amino acid
LLLLNSRPVXAAAETKMAARVGAFLKNAWDKEPVLVVSFVVGGLAVILPPLSPYFKYSVMINKATPYNYPVPVRDDGNMPDVPSHPQDPQGPSLEWLKKL

SEQ ID NO: 864136 - protein, 105 aa, Homo sapiens; identical to SEQ ID NO: 864134

SEQ ID NO: 864137 - protein, 105 aa, Homo sapiens; identical to SEQ ID NO: 864134

SEQ ID NO: 864138 - protein, 84 aa, Homo sapiens
TTTPRVLRVLAAVAAAETKMAARVGAFLKNAWDKEPVLVVSFVVGGLEQSHDTTPRMLHDDPTLKRAHSMTNPTAASSRPHVSL

SEQ ID NO: 864139 - protein, 86 aa, Homo sapiens
FAAASTRRRQKGAAVAAAETKMAARVGAFLKNAWDKEPVLVVSFVVGGLEQSHDTTPRMLHDDPTLKRAHSMTNPTAASSRPHVSL

SEQ ID NO: 864140 - protein, 86 aa, Homo sapiens; identical to SEQ ID NO: 864139

SEQ ID NO: 864141 - protein, 100 aa, Homo sapiens
TTTPRVLRVLAAVAAAETKMAARVGAFLKNAWDKEPVLVVSFVVGGLAVILPPLSPYFKYSVMINKATPYNYPAAGEKGHRIELSSHSTQRQSCPGARRS

SEQ ID NO: 864142 - protein, 105 aa, Homo sapiens; identical to SEQ ID NO: 864134

SEQ ID NO: 864143 - protein, 107 aa, Homo sapiens
  misc_feature (1)..(1): Xaa can be any naturally occurring amino acid
  misc_feature (3)..(3): Xaa can be any naturally occurring amino acid
XAXTRPRDTAARRRQKGAAAETKMAARVGAFLKNAWDKEPVLVVSFVVGGLAVILPPLSPYFKYSVMINKATPYNYPVPVRDDGNMPDVPSHPQDPQGPSLEWLKKL

SEQ ID NO: 864144 - protein, 107 aa, Homo sapiens; identical to SEQ ID NO: 864143
  misc_feature (1)..(1): Xaa can be any naturally occurring amino acid
  misc_feature (3)..(3): Xaa can be any naturally occurring amino acid

SEQ ID NO: 864145 - protein, 105 aa, Homo sapiens; identical to SEQ ID NO: 864134

SEQ ID NO: 864146 - protein, 105 aa, Homo sapiens; identical to SEQ ID NO: 864134

SEQ ID NO: 864147 - protein, 103 aa, Homo sapiens; identical to SEQ ID NO: 864133

SEQ ID NO: 864148 - protein, 91 aa, Homo sapiens
TTTPRVLRVLAAVAAAETKMAARVGAFLKNAWDKEPVLVVSFVVGGLAVILPPLSPYFKYSVMINKATPYNYPVEAGFHRVSQDCLDLLTL

SEQ ID NO: 864149 - protein, 70 aa, Homo sapiens
FAAASTRRRQKGAAVAAAETKMAARVGAFLKNAWDKEPVLVVSFVVGGLAVILPPLSPYFKYSVNWEFPG

SEQ ID NO: 864150 - protein, 133 aa, Homo sapiens
AYTELQCKAGMEAVDCAIFSVSSAITNWYDEIQDYDFKTRICKKVCGHYTQVVWADSYKVGCAVQFCPKVSGFDALSNGAHFICNYGPGGNYPTWPYKRGATCSACPNNDKCLDNLCVNRQRDQVKRTYINLK

SEQ ID NO: 864151 - protein, 266 aa, Homo sapiens
MRVTLATIAWMVSFVSNYSHTANILPDIENEDFIKDCVRIHNKFRSEVKPTASDMLYMTWDPALAQIAKAWASNCQFSHNTRLKPPHKLHPNFTSLGENIWTGSVPIFSVSSAITNWYDEIQDYDFKTRICKKVCGHYTQVVWADSYKVGCAVQFCPKVSGFDALSNGAHFICNYGPGGNYPTWPYKRGATCSACPNNDKCLDNLCVNRQRDQVKRYYSVVYPGWPIYPRNRYTSLFLIVNSVILILSVIITILVQHKYPNLVLLD

SEQ ID NO: 864152 - protein, 266 aa, Homo sapiens; identical to SEQ ID NO: 864151

SEQ ID NO: 864153 - protein, 266 aa, Homo sapiens; identical to SEQ ID NO: 864151

SEQ ID NO: 864154 - protein, 266 aa, Homo sapiens; identical to SEQ ID NO: 864151

SEQ ID NO: 864155 - protein, 248 aa, Homo sapiens
MRVTLATIAWMVSFVSNYSHTANILPDIENEDFIKDCVRIHNKFRSEVKPTASDMLYMTWDPALAQIAHKLHPNFTSLGENIWTGSVPIFSVSSAITNWYDEIQDYDFKTRICKKVCGHYTQVVWADSYKVGCAVQFCPKVSGFDALSNGAHFICNYGPGGNYPTWPYKRGATCSACPNNDKCLDNLCVNRQRDQVKRYYSVVYPGWPIYPRNRYTSLFLIVNSVILILSVIITILVQHKYPNLVLLD

SEQ ID NO: 864156 - protein, 229 aa, Homo sapiens
MRVTLATIAWMVSFVSNYSHTANILPDIENEDFIKDCVRIHNKFRSEVKPTASDMLYMTWDPALAQIAKAWASNCQFSHNTRLKPPHKLHPNFTSLGENIWTGSVPIFSVSSAITNWYDEIQDYDFKTRICKKVCGHYTQVVWADSYKVGCAVQFCPKVSGFDALSNGAHFICNYGPGGNYPTWPYKRGATCSACPNNDKCLDNLCGNRRRTSPPLLLCCISRLAHIST

SEQ ID NO: 864157 - protein, 230 aa, Homo sapiens
  misc_feature (221)..(221): Xaa can be any naturally occurring amino acid
MRVTLATIAWMVSFVSNYSHTANILPDIENEDFIKDCVRIHNKFRSEVKPTASDMLYMTWDPALAQIAKAWASNCQFSHNTRLKPPHKLHPNFTSLGENIWTGSVPIFSVSSAITNWYDEIQDYDFKTRICKKVCGHYTQVVWADSYKVGCAVQFCPKVSGFDALSNGAHFICNYGPGGNYPTWPYKRGATCSACPNNDKCLDNLCVTNSETKSNVTTLLXYQVGPYRGY

SEQ ID NO: 864158 - protein, 125 aa, Homo sapiens
MTKSRTMTSRLGYAKKSVATTLRLFGQIVTKLAAQFNFALKFLALTLFPMEHILYATTDQEGITQLGHIREEPPAVPAPIMTSVWTISVLTDSETKSNVTTLLYIQAGPYIHVTDTLLSFSLLIQ

SEQ ID NO: 864159 - protein, 266 aa, Homo sapiens; identical to SEQ ID NO: 864151

SEQ ID NO: 864160 - protein, 266 aa, Homo sapiens; identical to SEQ ID NO: 864151

SEQ ID NO: 864161 - protein, 266 aa, Homo sapiens; identical to SEQ ID NO: 864151

SEQ ID NO: 864162 - protein, 266 aa, Homo sapiens; identical to SEQ ID NO: 864151

SEQ ID NO: 864163 - protein, 265 aa, Homo sapiens
MRVTLATIAWMVSFVSNYSHTANILPDIENEDFIKDCVRIHNKFRSEVKPTASDMLYMTWDPALAQIAKAWASNCQFSHNTRLKPPHKLHPNFTSLGENIWTGSVPIFSVSSAITNWYDEIQDYDFKTRICKKVCGHYTQVVWADSYKVGCAVQFCPKVSGFDALSNGAHFICNYGPGGNYPTWPYKRGATCSACPNNDKCLDNLCVTEGEQVHRYYSVVYPGWPIYPRNRYTSLFLIVNSVILILSVIITILVQHKYPNLVLLD

SEQ ID NO: 864164 - protein, 125 aa, Homo sapiens; identical to SEQ ID NO: 864158

SEQ ID NO: 864165 - protein, 116 aa, Homo sapiens
MRVTLATIAWMVSFVSNYSHTANILPDIENEDFIKDCVRIHNKFRSEVKPTASDMLYMTWDPALAQIAKAWASNCQFSHNTRLKPPHKLHPNFTSLMGRRLAQSSSIRKAVLMIRT

SEQ ID NO: 864166 - protein, 110 aa, Homo sapiens
  misc_feature (27)..(27): Xaa can be any naturally occurring amino acid
MVHLTVNCVLDSNMAHGFAGSHLTSCXIRARGFGLGNGAEMWFEILPGLSVMGVCLLIPGLATAYIHRFTNGGKEKRVAHFGYHWSLMERDRRISGVDRYYVSKGLENID

SEQ ID NO: 864167 - protein, 88 aa, Homo sapiens
MWWGRGGAQEGTVEHQWGHTAVSPPKERPLASTDQRRVGVSFPTVKKKPPGGGNQDPCFWNKFPNGGARRGTTGIQPTGVSKEKPRIS

SEQ ID NO: 864168 - protein, 153 aa, Homo sapiens
MCYVVLNKNKMKKPHTPTTPNTTTPPPTHTTPATHHEQATTTQKADTTKHNTHTRGPRRAHNNNTTRGGDETKYRDERSNTRRQRTATEDRGLLTQKTAGGRSCNNKWRRRGQRTNEAADNPRRRETRRTRTKDEHEKKTTDKRGADNRTKQT

SEQ ID NO: 864169 - protein, 79 aa, Homo sapiens
LVPNSARAEMWFEILPGLSVMGVCLLIPGLATAYIHRFTNGGKEKRVAHFGYHWSLMERDRRISGVDRYYVSKGLENID

SEQ ID NO: 864170 - protein, 86 aa, Homo sapiens
MWFEILPGLSVMGVCLLIPGLATAYIHRFTNGGKEKRVAHFGYHWSLMERDVVRDSPRTLRHGRVLVDSTDLATAYIHSFTSWQRY

SEQ ID NO: 864171 - protein, 193 aa, Homo sapiens
MPNWGGGKKCGVCQKTVYFAEEVQCEGNSFHKSCFLCMVCKKNLDSTTVAVHGEEIYCKSCYGKKYGPKGYGYGQGAGTLSTDKGESLGIKHEEAPGHRPTTNPNASKFAQKIGGSERCPRCSQAVYAAEKVIGAGKSWHKACFRCAKCGKGLESTTLADKDGEIYCKGCYAKNFGPKGFGFGQGAGALVHSE

SEQ ID NO: 864172 - protein, 215 aa, Homo sapiens
RPLQHQNGNSACRPCAAEPAARMPNWGGGKKCGVCQKTVYFAEEVQCEGNSFHKSCFLCMVCKKNLDSTTVAVHGEEIYCKSCYGKKYGPKGYGYGQGAGTLSTDKGESLGIKHEEAPGHRPTTNPNASKFAQKIGGSERCPRCSQAVYAAEKVIGAGKSWHKACFRCAKCGKGLESTTLADKDGEIYCKGCYAKNFGPKGFGFGQGAGALVHSE

SEQ ID NO: 864173 - protein, 193 aa, Homo sapiens; identical to SEQ ID NO: 864171

SEQ ID NO: 864174 - protein, 193 aa, Homo sapiens; identical to SEQ ID NO: 864171

SEQ ID NO: 864175 - protein, 193 aa, Homo sapiens; identical to SEQ ID NO: 864171

SEQ ID NO: 864176 - protein, 193 aa, Homo sapiens; identical to SEQ ID NO: 864171

SEQ ID NO: 864177 - protein, 193 aa, Homo sapiens; identical to SEQ ID NO: 864171

SEQ ID NO: 864178 - protein, 115 aa, Homo sapiens
CQGGGLKAFATLGTSKAGLMPGLPNPNASKFAQKIGGSERCPRCSQAVYAAEKVIGAGKSWHKACFRCAKCGKGLESTTLADKDGEIYCKGCYAKNFGPKGFGFGQGAGALVHSE

SEQ ID NO: 864179 - protein, 193 aa, Homo sapiens; identical to SEQ ID NO: 864171

SEQ ID NO: 864180 - protein, 193 aa, Homo sapiens; identical to SEQ ID NO: 864171

SEQ ID NO: 864181 - protein, 193 aa, Homo sapiens; identical to SEQ ID NO: 864171

SEQ ID NO: 864182 - protein, 173 aa, Homo sapiens
MPNWGGGKKCGVCQKTVYFAEEVQCEGNSFHKSCFLCMVCKKNLDSTTVAVHGEEIYCKSCYGKKYGPKGYGYGQGAGTLSTDKGESLGIKHEEAPGHRPTTNPNASKFAQKIGGSERCPRCSQAVYAAEKVIGAGKSWHKACFRCAKCGKGLESTTLADKDGEIYCKGMLNA

SEQ ID NO: 864183 - protein, 116 aa, Homo sapiens
RPLQHQNGNSACRPCAAEPAARMPNWGGGKKCGVCQKTVYFAEEVQCEGNSFHKSCFLCMVCKKNLDSTTVAVHGEEIYCKSCYGKKYGPKGYGYGQGAGTLSTDKGESLGIKHEE

SEQ ID NO: 864184 - protein, 101 aa, Homo sapiens
RPLQHQNGNSACRPCAAEPAARMPNWGGGKKCGVCQKTVYFAEEVQCEGNSFHKSCFLCSEYAPGPIAVALDTLDGPAPTGWACQHPRELIPWDVNSLTFG

SEQ ID NO: 864185 - protein, 81 aa, Homo sapiens
KKLAMSKKVTPASTQCVRFPFPSTVVCKKNLDSTTVAVHGEEIYCKSCYGKKYGPKGYGYGQGAGTLSTDKGESLGIKHEE

SEQ ID NO: 864186 - protein, 193 aa, Homo sapiens; identical to SEQ ID NO: 864171

SEQ ID NO: 864187 - protein, 193 aa, Homo sapiens; identical to SEQ ID NO: 864171

SEQ ID NO: 864188 - protein, 193 aa, Homo sapiens; identical to SEQ ID NO: 864171

SEQ ID NO: 864189 - protein, 193 aa, Homo sapiens; identical to SEQ ID NO: 864171

SEQ ID NO: 864190 - protein, 114 aa, Homo sapiens
RLYLVSRLYLVSRLYLVSRLYLVSRLYLVSRLYLVSRLYLVSRLYLVSRLYLVSRLYLVSRLYLVSRLYLAWDLTPSPVGDLSVLGLGESRPLSPHLAPQSSVLSLLCCVSIIS

SEQ ID NO: 864191 - protein, 66 aa, Homo sapiens
GRVGRPTRPARRSRVHHQLTKTPEDTSWHPEEQQQQAGGRGKQDQDEEGGRLGFLDLRDSPLWERG

SEQ ID NO: 864192 - protein, 193 aa, Homo sapiens; identical to SEQ ID NO: 864171

SEQ ID NO: 864193 - protein, 161 aa, Homo sapiens
  misc_feature (140)..(141): Xaa can be any naturally occurring amino acid
  misc_feature (160)..(160): Xaa can be any naturally occurring amino acid
MPNWGGGKKCGVCQKTVYFAEEVQCEGNSFHKSCFLCMVCKKNLDSTTVAVHGEEIYCKSCYGKKYGPKGYGYGQGAGTLSTDKGESLGIKHEEAPGHRPTTNPNASKFAQKIGGSERCPRCSQAVYAAEKVIGAGKSGXXLLSSASVASWSHWRQVAVXA

SEQ ID NO: 864194 - protein, 135 aa, Homo sapiens
MPNWGGGKKCGVCQKTVYFAEEVQCEGNSFHKSCFLCMVCKKNLDSTTVAVHGEEIYCKSCYGKKYGPKGYGYGQGAGTLSTDKGESLGIKHEEAPGHRPTTNHLLRSIDCLAASGAALSHQSSGEICCIGTELD

SEQ ID NO: 864195 - protein, 140 aa, Homo sapiens
GPGLPPVLQICCPRSLRGVTAPTAMSALPGSESPLANTTVVRPQRHWQGARGLPLMSLLPPFSRTGRELAWVLHIDGQTLTKWRDEMSTPKDPTEEQRCREGREPADGWLSCWRLKVHSFQAACQACAILPDFLPAPKLR

SEQ ID NO: 864196 - protein, 1174 aa, Homo sapiens
SAGPDMAEEEVAKLEKHLMLLRQEYVKLQKKLAETEKRCALLAAQANKESSSESFISRLLAIVADLYEQEQYSDLKIKVGDRHISAHKFVLAARSDSWSLANLSSTKELDLSDANPEVTMTMLRWIYTDELEFREDDVFLTELMKLANRFQLQLLRERCEKGVMSLVNVRNCIRFYQTAEELNASTLMNYCAEIIASHWDDLRKEDFSSMSAQLLYKMIKSKTEYPLHKAIKVEREDVVFLYLIEMDSQLPGKLNEADHNGDLALDLALSRRLESIATTLVSHKADVDMVDKSGWSLLHKGIQRGDLFAATFLIKNGAFVNAATLGAQETPLHLVALYSSKKHSADVMSEMAQIAEALLQAGANPNMQDSKGRTPLHVSIMAGNEYVFSQLLQCKQLDLELKDHEGSTALWLAVQHITVSSDQSVNPFEDVPVVNGTSFDENSFAARLIQRGSHTDAPDTATGNCLLQRAAGAGNEAAALFLATNGAHVNHRNKWGETPLHTACRHGLANLTAELLQQGANPNLQTEEALPLPKEAASLTSLADSVHLQTPLHMAIAYNHPDVVSVILEQKANALHATNNLQIIPDFSLKDSRDQTVLGLALWTGMHTIAAQLLGSGAAINDTMSDGQTLLHMAIQRQDSKSALFLLEHQADINVRTQDGETALQLAIRNQLPLVVDAICTRGADMSVPDEKGNPPLWLALANNLEDIASTLVRHGCDATCWGPGPGGCLQTLLHRAIDENNEPTACFLIRSGCDVNSPRQPGANGEGEEEARDGQTPLHLAASWGLEETVQCLLEFGANVNAQDAEGRTPIHVAISSQHGVIIQLLVSHPDIHLNVRDRQGLTPFACAMTFKNNKSAEAILKRESGAAEQVDNKGRNFLHVAVQNSDIESVLFLISVHANVNSRVQDASKLTPLHLAVQAGSEIIVRNLLLAGAKVNELTKHRQTALHLAAQQDLPTICSVLLENGVDFAAVDENGNNALHLAVMHGRLNNIRVLLTECTVDAEAFNLRGQSPLHILGQYGKENAAAIFDLFLECMPGYPLDKPDADGSTVLLLAYMKGNANLCRAIVRSGARLGVNNNQGVNIFNYQVATKQLLFRLLDMLSKEPPWCDGSYCYECTARFGVTTRKHHCRHCGRLLCHKCSTKEIPIIKFDLNKPVRVCNICFDVLTLGGVS

SEQ ID NO: 864197 - protein, 1174 aa, Homo sapiens; identical to SEQ ID NO: 864196

SEQ ID NO: 864198 - protein, 1174 aa, Homo sapiens; identical to SEQ ID NO: 864196

SEQ ID NO: 864199 - protein, 621 aa, Homo sapiens
MAIAYNHPDVVSVILEQKANALHATNNLQIIPDFSLKDSRDQTVLGLALWTGMHTIAAQLLGSGAAINDTMSDGQTLLHMAIQRQDSKSALFLLEHQADINVRTQDGETALQLAIRNQLPLVVDAICTRGADMSVPDEKGNPPLWLALANNLEDIASTLVRHGCDATCWGPGPGGCLQTLLHRAIDENNEPTACFLIRSGCDVNSPRQPGANGEGEEEARDGQTPLHLAASWGLEETVQCLLEFGANVNAQDAEGRTPIHVAISSQHGVIIQLLVSHPDIHLNVRDRQGLTPFACAMTFKNNKSAEAILKRESGAAEQVDNKGRNFLHVAVQNSDIESVLFLISVHANVNSRVQDASKLTPLHLAVQAGSEIIVRNLLLAGAKVNELTKHRQTALHLAAQQDLPTICSVLLENGVDFAAVDENGNNALHLAVMHGRLNNIRVLLTECTVDAEAFNLRGQSPLHILGQYGKENAAAIFDLFLECMPGYPLDKPDADGSTVLLLAYMKGNANLCRAIVRSGARLGVNNNQGVNIFNYQVATKQLLFRLLDMLSKEPPWCDGSYCYECTARFGVTTRKHHCRHCGRLLCHKCSTKEIPIIKFDLNKPVRVCNICFDVLTLGGVS

SEQ ID NO: 864200 - protein, 1231 aa, Homo sapiens
SAGPDMAEEEVAKLEKHLMLLRQEYVKLQKKLAETEKRCALLAAQANKESSSESFISRLLAIVADLYEQEQYSDLKIKVGDRHISAHKFVLAARSDSWSLANLSSTKELDLSDANPEVTMTMLRWIYTDELEFREDDVFLTELMKLANRFQLQLLRERCEKGVMSLVNVRNCIRFYQTAEELNASTLMNYCAEIIASHWDDLRKEDFSSMSAQLLYKMIKSKTEYPLHKAIKVEREDVVFLYLIEMDSQLPGKLNEADHNGDLALDLALSRRLESIATTLVSHKADVDMVDKSGWSLLHKGIQRGDLFAATFLIKNGAFVNAATLGAQETPLHLVALYSSKKHSADVMSEMAQIAEALLQAGANPNMQDSKGRTPLHVSIMAGNEYVFSQLLQCKQLDLELKDHEGSTALWLAVQHITVSSDQSVNPFEDVPVVNGTSFDENSFAARLIQRGSHTDAPDTATGNCLLQRAAGAGNEAAALFLATNGAHVNHRNKWGETPLHTACRHGLANLTAELLQQGANPNLQTEEALPLPKEAASLTSLADSVHLQTPLHMAIAYNHPDVVSVILEQKANALHATNNLQIIPDFSLKDSRDQTVLGLALWTGMHTIAAQLLGSGAAINDTMSDGQTLLHMAIQRQDSKSALFLLEHQADINVRTQDGETALQLAIRNQLPLVVDAICTRGADMSVPDEKGNPPLWLALANNLEDIASTLVRHGCDATCWGPGPGGCLQTLLHRAIDENNEPTACFLIRSGCDVNSPRQPGANGEGEEEARDGQTPLHLAASWGLEETVQCLLEFGANVNAQDAEGRTPIHVAISSQHGVIIQLLVSHPDIHLNVRDRQGLTPFACAMTFKNNKSAEAILKRESGAAEQVDNKGRNFLHVAVQNSDIESVLFLISVHANVNSRVQDASKLTPLHLAVQAGSEIIVRNLLLAGAKVNELTKHRQTALHLAAQQDLPTICSVLLENGVDFAAVDENGNNALHLAVMHGRLNNIRVLLTECTVDAEAFNLRGQSPLHILGQYGKENAAAIFDLFLECMPGYPLDKPDADGSTVLLLAYMKGNANLCRAIVRSGARLGVNNNQGVNIFNYQVATKQLLFRLLDMLSKEPPWCDGSYCYECTARFGVTTRKHHVVRPQRHWQGARGLPLMSLLPPFSRTGRELAWVLHIDGQTLTKWRDEMSTPKDPTEEQRCREGREPADGWLSCWRLKVHSFQAACQACAILPDFLPAPKLR

SEQ ID NO: 864201 - protein, 1138 aa, Homo sapiens
SAGPDMAEEEVAKLEKHLMLLRQEYVKLQKKLAETEKRCALLAAQANKESSSESFISRLLAIVADLYEQEQYSDLKIKVGDRHISAHKFVLAARSDSWSLANLSSTKELDLSDANPEVTMTMLRWIYTDELEFREDDVFLTELMKLANRFQLQLLRERCEKGVMSLVNVRNCIRFYQTAEELNASTLMNYCAEIIASHWDDLRKEDFSSMSAQLLYKMIKSKTEYPLHKAIKVEREDVVFLYLIEMDSQLPGKLNEADHNGDLALDLALSRRLESIATTLVSHKADVDMVDKSGWSLLHKGIQRGDLFAATFLIKNGAFVNAATLGAQETPLHLVALYSSKKHSADVMSEMAQIAEALLQAGANPNMQDSKGRTPLHVSIMAGNEYVFSQLLQCKQLDLELKDHEGSTALWLAVQHITVSSDQSVNPFEDVPVVNGTSFDENSFAARLIQRGSHTDAPDTATGNCLLQRAAGAGNEAAALFLATNGAHVNHRNKWGETPLHTACRHGLANLTAELLQQGANPNLQTEEALPLPKEAASLTSLADSVHLQTPLHMAIAYNHPDVVSVILEQKANALHATNNLQIIPDFSLKDSRDQTVLGLALWTGMHTIAAQLLGSGAAINDTMSDGQTLLHMAIQRQDSKSALFLLEHQADINVRTQDGETALQLAIRNQLPLVVDAICTRGADMSVPDEKGNPPLWLALANNLEDIASTLVRHGCDATCWGPGPGGCLQTLLHRAIDENNEPTACFLIRSGCDVNSPRQPGANGEGEEEARDGQTPLHLAASWGLEETVQCLLEFGANVNAQDAEGRTPIHVAISSQHGVIIQLLVSHPDIHLNVRDRQGLTPFACAMTFKNNKSAEAILKRESGAAEQVDNKGRNFLHVAVQNSDIESVLFLISVHANVNSRVQDASKLTPLHLAVQAGSEIIVRNLLLAGAKVNELTKHRQTALHLAAQQDLPTICSVLLENGVDFAAVDENGNNALHLAVMHGRLNNIRVLLTECTVDAEAFNLRGQSPLHILGQYGKENAAAIFDLFLECMPGYPLDKPDADGSTVLLLAYMKGNANLCRAIVRSGARLGVNNNQGVNIFNYQVATKQLLFRLLDMLSKEPPWCDGSYCYECTARFGVTTRKHHCMPGLSCS

SEQ ID NO: 864202 - protein, 1174 aa, Homo sapiens; identical to SEQ ID NO: 864196

SEQ ID NO: 864203 - protein, 1174 aa, Homo sapiens; identical to SEQ ID NO: 864196

SEQ ID NO: 864204 - protein, 325 aa, Homo sapiens
MTFKNNKSAEAILKRESGAAEQVDNKGRNFLHVAVQNSDIESVLFLISVHANVNSRVQDASKLTPLHLAVQAGSEIIVRNLLLAGAKVNELTKHRQTALHLAAQQDLPTICSVLLENGVDFAAVDENGNNALHLAVMHGRLNNIRVLLTECTVDAEAFNLRGQSPLHILGQYGKENAAAIFDLFLECMPGYPLDKPDADGSTVLLLAYMKGNANLCRAIVRSGARLGVNNNQGVNIFNYQVATKQLLFRLLDMLSKEPPWCDGSYCYECTARFGVTTRKHHCRHCGRLLCHKCSTKEIPIIKFDLNKPVRVCNICFDVLTLGGVS

SEQ ID NO: 864205 - protein, 1174 aa, Homo sapiens; identical to SEQ ID NO: 864196

SEQ ID NO: 864206 - protein, 210 aa, Homo sapiens
SAGPDMAEEEVAKLEKHLMLLRQEYVKLQKKLAETEKRCALLAAQANKESSSESFISRLLAIVADLYEQEQYSDLKIKVGDRHISAHKFVLAARSDSWSLANLSSTKELDLSDANPEVTMTMLRWIYTDELEFREDDVFLTELMKLANRFQLQLLRERCEKGVMSLVNVRNCIRFYQTAEELNASTLMNYCAEIIASHWVSEVEGVNKAL

SEQ ID NO: 864207 - protein, 1211 aa, Homo sapiens
MKNLLTEKCISSHNFHQKVIKQRMEKKVDSRYFKDGAVKKPYSAKTLSNKKSSASFGIRRELPSTSHLVQYRGTHTCTRQGRLRELRIRCVARKFLYLWIRMTFGRVFPSKARFYYEQRLLRKVFEEWKEEWWVFQHEWKLCVRADCHYRYYLYNLMFQTWKTYVRQQQEMRNKYIRAEVHDAKQKMRQAWKSWLIYVVVRRTKLQMQTTALEFRQRIILRVWWSTWRQRLGQVRVSRALHASALKHRALSLQVQAWSQWREQLLYVQKEKQKVVSAVKHHQHWQKRRFLKAWLEYLQVRRVKRQQNEMAERFHHVTVLQIYFCDWQQAWERRESLYAHHAQVEKLARKMALRRAFTHWKHYMLLCAEEAAQFEMAEEHHRHSQLLLHRFWNLWRSQIEQKKERELLPLLHAAWDHYRIALLCKCIELWLQYTQKRRYKQLLQARADGHFQQRALPAAFHTWNRLWRWRHQENVLSARATRFHRETLEKQVFSLWRQKMFQHRENRLAERMAILHAERQLLYRSWFMWHQQAAARHQEQEWQTVACAHHRHGRLKKAFCLWRESAQGLRTERTGRVRAAEFHMAQLLRWAWSQWRECLALRGAERQKLMRADLHHQHSVLHRALQAWVTYQGRVRSILREVAARESQHNRQLLRGALRRWKENTMARVDEAKKTFQASTHYRRTICSKVLVQWREAVSVQMYYRQQEDCAIWEAQKVLDRGCLRTWFQRWWDCSRRSAQQRLQLERAVQHHHRQLLLEGLARWKTHHLQCVRKRLLHRQSTQLLAQRLSRTCFRQWRQQLAARRQEQRATVRALWFWAFSLQAKVWATWLAFVLERRRKKARLQWALQAYQGQLLQEGATRLLRFAASMKASRQQLQAQQQVQAAHSLHRAVRRCATLWKQKVLGRGGKPQPLAAIAPSRKVTFEGPLLNRIAAGAGDGTLETKRPQASRPLGALGRLAAEEPHALELNTAHSARKQPRRPHFLLEPAQSQRPQKPQEHGLGMAQPAAPSLTRPFLAEAPTALVPHSPLPGALSSAPGPKQPPTASTGPELLLLPLSSFMPCGAAAPARVSAQRATPRDKPPVPSSLASVPDPHLLLPGDFSATRAGPGLSTAGSLDLEAELEEIQQQLLHYQTTKQNLWSCRRQASSLRRWLELNREEPGPEDQEVEQQVQKELEQVEMQIQLLAEELQAQRQPIGACVARIQALRQALC

SEQ ID NO: 864208 - protein, 929 aa, Homo sapiens
MKNLLTEKCISSHNFHQKVIKQRMEKKVDSRYFKDGAVKKPYSAKTLSNKKSSASFGIRRELPSTSHLVQYRGTHTCTRQGRLRELRIRCVARKFLYLWIRMTFGRVFPSKARFYYEQRLLRKVFEEWKEEWWVFQHEWKLCVRADCHYRYYLYNLMFQTWKTYVRQQQEMRNKYIRAEVHDAKQKMRQAWKSWLIYVVVRRTKLQMQTTALEFRQRIILRVWWSTWRQRLGQVRVSRALHASALKHRALSLQVQAWSQWREQLLYVQKEKQKVVSAVKHHQHWQKRRFLKAWLEYLQVRRVKRQQNEMAERFHHVTVLQIYFCDWQQAWERRESLYAHHAQVEKLARKMALRRAFTHWKHYMLLCAEEAAQFEMAEEHHRHSQLYFCFRALKDNVTHAHLQQIRRNLAHQQHGVTLLHRFWNLWRSQIEQKKERELLPLLHAAWDHYRIALLCKCIELWLQYTQKRRYKQLLQARADGHFQQRALPAAFHTWNRLWRWRHQENVLSARATRFHRETLEKQVFSLWRQKMFQHRENRLAERMAILHAERQLLYRSWFMWHQQAAARHQEQEWQTVACAHHRHGRLKKAFCLWRESAQGLRTERTGRVRAAEFHMAQLLRWAWSQWRECLALRGAERQKLMRADLHHQHSVLHRALQAWVTYQGRVRSILREVAARESQHNRQLLRGALRRWKENTMARVDEAKKTFQASTHYRRTICSKVLVQWREAVSVQMYYRQQEDCAIWEAQKVLDRGCLRTWFQRWWDCSRRSAQQRLQLERAVQHHHRQLLLEGLARWKTHHLQCVRKRLLHRQSTQLLAQRLSRTCFRQWRQQLAARRQEQRATVRALWFWAFSLQAKVWATWLAFVLERRRKKARLQWALQAYQGQLLQEGATRLLRFAASMKASRQQLQAQQQVQVGPGPLPVGSRQGVA

SEQ ID NO: 864209 - protein, 1241 aa, Homo sapiens
MKNLLTEKCISSHNFHQKVIKQRMEKKVDSRYFKDGAVKKPYSAKTLSNKKSSASFGIRRELPSTSHLVQYRGTHTCTRQGRLRELRIRCVARKFLYLWIRMTFGRVFPSKARFYYEQRLLRKVFEEWKEEWWVFQHEWKLCVRADCHYRYYLYNLMFQTWKTYVRQQQEMRNKYIRAEVHDAKQKMRQAWKSWLIYVVVRRTKLQMQTTALEFRQRIILRVWWSTWRQRLGQVRVSRALHASALKHRALSLQVQAWSQWREQLLYVQKEKQKVVSAVKHHQHWQKRRFLKAWLEYLQVRRVKRQQNEMAERFHHVTVLQIYFCDWQQAWERRESLYAHHAQVEKLARKMALRRAFTHWKHYMLLCAEEAAQFEMAEEHHRHSQLYFCFRALKDNVTHAHLQQIRRNLAHQQHGVTLLHRFWNLWRSQIEQKKERELLPLLHAAWDHYRIALLCKCIELWLQYTQKRRYKQLLQARADGHFQQRALPAAFHTWNRLWRWRHQENVLSARATRFHRETLEKQVFSLWRQKMFQHRENRLAERMAILHAERQLLYRSWFMWHQQAAARHQEQEWQTVACAHHRHGRLKKAFCLWRESAQGLRTERTGRVRAAEFHMAQLLRWAWSQWRECLALRGAERQKLMRADLHHQHSVLHRALQAWVTYQGRVRSILREVAARESQHNRQLLRGALRRWKENTMARVDEAKKTFQASTHYRRTICSKVLVQWREAVSVQMYYRQQEDCAIWEAQKVLDRGCLRTWFQRWWDCSRRSAQQRLQLERAVQHHHRQLLLEGLARWKTHHLQCVRKRLLHRQSTQLLAQRLSRTCFRQWRQQLAARRQEQRATVRALWFWAFSLQAKVWATWLAFVLERRRKKARLQWALQAYQGQLLQEGATRLLRFAASMKASRQQLQAQQQVQVGPGPFLWGAGRVWHELTRGCVVAAHSLHRAVRRCATLWKQKVLGRGGKPQPLAAIAPSRKVTFEGPLLNRIAAGAGDGTLETKRPQASRPLGALGRLAAEEPHALELPQKPQEHGLGMAQPAAPSLTRPFLAEAPTALVPHSPLPGALSSAPGPKQPPTASTGPELLLLPLSSFMPCGAAAPARVSAQRATPRDKPPVPSSLASVPDPHLLLPGDFSATRAGPGLSTAGSLDLEAELEEIQQQLLHYQTTKQNLWSCRRQASSLRRWLELNREEPGPEDQEVEQQVQKELEQVEMQIQLLAEELQAQRQPIGACVARIQALRQALC

SEQ ID NO: 864210 - protein, 929 aa, Homo sapiens; identical to SEQ ID NO: 864208

SEQ ID NO: 864211 - protein, 334 aa, Homo sapiens [sequence omitted]

SEQ ID NO: 864212 - protein, 506 aa, Homo sapiens
MKNLLTEKCISSHNFHQKVIKQRMEKKVDSRYFKDGAVKKPYSAKTLSNKKSSASFGIRRELPSTSHLVQYRGTHTCTRQGRLRELRIRCVARKFLYLWIRMTFGRVFPSKARFYYEQRLLRKVFEEWKEEWWVFQHEWKLCVRADCHYRYYLYNLMFQTWKTYVRQQQEMRNKYIRAEVHDAKQKMRQAWKSWLIYVVVRRTKLQMQTTALEFRQRIILRVWWSTWRQRLGQVRVSRALHASALKHRALSLQVQAWSQWREQLLYVQKEKQKVVSAVKHHQHWQKRRFLKAWLEYLQVRRVKRQQNEMAERFHHVTVLQIYFCDWQQAWERRESLYAHHAQVEKLARKMALRRAFTHWKHYMLLCAEEAAQFEMAEEHHRHSQLLLHRFWNLWRSQIEQKKERELLPLLHAAWDHYRIALLCKCIELWLQYTQKRRYKQLLQARADGHFQQRALPAAFHTWNRLWRWRHQENVLSARATRFHRETLEKQVFSLWRQKMFQLLNLG

SEQ ID NO: 864213 - protein, 492 aa, Homo sapiens
MKNLLTEKCISSHNFHQKVIKQRMEKKVDSRYFKDGAVKKPYSAKTLSNKKSSASFGIRRELPSTSHLVQYRGTHTCTRQGRLRELRIRCVARKFLYLWIRMTFGRVFPSKARFYYEQRLLRKVFEEWKEEWWVFQHEWKLCVRADCHYRYYLYNLMFQTWKTYVRQQQEMRNKYIRAEVHDAKQKMRQAWKSWLIYVVVRRTKLQMQTTALEFRQRIILRVWWSTWRQRLGQVRVSRALHASALKHRALSLQVQAWSQWREQLLYVQKEKQKVVSAVKHHQHWQKRRFLKAWLEYLQVRRVKRQQNEMAERFHHVTVLQIYFCDWQQAWERRESLYAHHAQVEKLARKMALRRAFTHWKHYMLLCAEEAAQFEMAEEHHRHSQLYFCFRALKDNVTHAHLQQIRRNLAHQQHGVTLLHRFWNLWRSQIEQKKERELLPLLHAAWDHYRIALLCKCIELWLQYTQKRRYKQLLQARADVIFSKQLCPLLCIH

SEQ ID NO: 864214 - protein, 113 aa, Homo sapiens
LGNTATLHLKKKKKCRGDRPVTQLHSVVWGPFNMQQPQSFQGNRLAPHPWLCTGGERQGVCSCPGPPELLSAGEGGGDWERKKNKCLAPKQGPAVQVRGPTRPPLSTRYPHQN

SEQ ID NO: 864215 - protein, 1440 aa, Homo sapiens
  misc_feature (1)..(1): Xaa can be any naturally occurring amino acid
  misc_feature (57)..(57): Xaa can be any naturally occurring amino acid
  misc_feature (62)..(62): Xaa can be any naturally occurring amino acid
XDTPVQQCYSVVVPGSMQEGEQLSFLFLLNLRPPEVPEPVQQRDTMLLVSKIPSYLXEMSVXHIVFEGSKAKDTALEFRQRIILRVWWSTWRQRLGQVRVSRALHASALKHRALSLQVQAWSQWREQLLYVQKEKQKVVSAVKHHQHWQKRRFLKAWLEYLQVRRVKRQQNEMAERFHHVTVLQIYFCDWQQAWERRESLYAHHAQVEKLARKMALRRAFTHWKHYMLLCAEEAAQFEMAEEHHRHSQLYFCFRALKDNVTHAHLQQIRRNLAHQQHGVTLLHRFWNLWRSQIEQKKERELLPLLHAAWDHYRIALLCKCIELWLQYTQKRRYKQLLQARADGHFQQRALPAAFHTWNRLWRWRHQENVLSARATRFHRETLEKQVFSLWRQKMFQHRENRLAERMAILHAERQLLYRSWFMWHQQAAARHQEQEWQTVACAHHRHGRLKKAFCLWRESAQGLRTERTGRVRAAEFHMAQLLRWAWSQWRECLALRGAERQKLMRADLHHQHSVLHRALQAWVTYQGRVRSILREVAARESQHNRQLLRGALRRWKENTMARVDEAKKTFQASTHYRRTICSKVLVQWREAVSVQMYYRQQEDCAIWEAQKVLDRGCLRTWFQRWWDCSRRSAQQRLQLERAVQHHHRQLLLEGLARWKTHHLQCVRKRLLHRQSTQLLAQRLSRTCFRQWRQQLAARRQEQRATVRALWFWAFSLQAKVWATWLAFVLERRRKKARLQWALQAYQGQLLQEGATRLLRFAASMKASRQQLQAQQQVQVGPGPFLWGAGRVWHELTRGCVVAAHSLHRAVRRCATLWKQKVLGRGGKPQPLAAIAPSRKVTFEGPLLNRIAAGAGDGTLETKRPQASRPLGALGRLAAEEPHALELLSSLCSPCPRFHPGQKVGWHSREENSPDGMGRAGHGLVTAELLGTPSSPARSHPSHGKRERMEWDFQTLSPLPGQSSGNRCPLLCKTSYPLSVLLTRSFPGVIHVVDKGNKLSSYPCLPASLLLHHSQDTGFFVRSPSFLCELAPVPLPTPTMVSSNPNLPCPMLMKLVAPTATSTTREPWARGRCQVGAWGLGPGPCCAPHCLTDLDGILKSQRLLPCDMDPGDLYTSVTRVVLQVKRDNVGEAVPWRQVPFVGTAGSSMAQAHPSLLADLGLAFPDFQSPYKIGDPTEISDPPAAPGQPRGTDPMFLSSNTAHSARKQPRRPHFLLEPAQSQRPQKPQEHGLGMAQPAAPSLTRPFLAEAPTALVPHSPLPGALSSAPGPKQPPTASTGPELLLLPLSSFMPCGAAAPARVSAQRATPRDKPPVPSSLASVPDPHLLLPGDFSATRAGPGLSTAGSLDLEAELEEIQQQLLHYQTTKQNLWSCRRQASSLRRWLELNREEPGPEDQEVEQQVQKELEQVEMQIQLLAEELQAQRQPIGACVARIQALRQALC

SEQ ID NO: 864216 - protein, 334 aa, Homo sapiens [sequence omitted]

SEQ ID NO: 864217 - protein, 334 aa, Homo sapiens [sequence omitted]

SEQ ID NO: 864218 - protein, 514 aa, Homo sapiens
MKNLLTEKCISSHNFHQKVIKQRMEKKVDSRYFKDGAVKKPYSAKTLSNKKSSASFGIRRELPSTSHLVQYRGTHTCTRQGRLRELRIRCVARKFLYLWIRMTFGRVFPSKARFYYEQRLLRKVFEEWKEEWWVFQHEWKLCVRADCHYRYYLYNLMFQTWKTYVRQQQEMRNKYIRAEVHDAKQKMRQAWKSWLIYVVVRRTKLQMQTTALEFRQRIILRVWWSTWRQRLGQVRVSRALHASALKHRALSLQVQAWSQWREQLLYVQKEKQKVVSAVKHHQHWQKRRFLKAWLEYLQVRRVKRQQNEMAERFHHVTVLQIYFCDWQQAWERRESLYAHHAQVEKLARKMALRRAFTHWKHYMLLCAEEAAQFEMAEEHHRHSQLLLHRFWNLWRSQIEQKKERELLPLLHAAWDHYRIALLCKCIELWLQYTQKRRYKQLLQARADGHFQQRALPAAFHIMEQTLAMAPPGKCPQCKSNTFPQEDGQGAGSRIPHGAGLSGRPQATSRNRTQF

SEQ ID NO: 864219 - protein, 214 aa, Homo sapiens
MKNLLTEKCISSHNFHQKVIKQRMEKKVDSRYFKDGAVKKPYSAKTLSNKKSSASFGIRRELPSTSHLVQYRGTHTCTRQGRLRELRIRCVARKFLYLWIRMTFGRVFPSKARFYYEQRLLRKVFEEWKEEWWVFQHEWKLCVRADCHYRYYLYNLMFQTWKTYVRQQQEMRNKYIRAEVHGEKKKSMSEEDAHIYFAEGHRKDKHIVSEREEL

SEQ ID NO: 864220 - protein, 131 aa, Homo sapiens
PTDSFWAGPRPDIHSFCLSHYLWPVNSFLASVPLSYLIYSVLSFLSCLRPSFTQSDSFCIGLGSCGTSRQQHVTRSRSGKQWPVPTTATGGSRKLSASGGKVPKGSEQSEWPVLPYKPFHHRPALLVLAAP

SEQ ID NO: 864221 - protein, 440 aa, Homo sapiens
RGGRTRQLPALLASLLALGCAAGQAWEPRALSRRPHLSERRSEPRPGRAARRGTVLGMAGIPGLLFLLFFLLCAVGQVSPYSAPWKPTWPAYRLPVVLPQSTLNLAKPDFGAEAKLEVSSSCGPQCHKGTPLPTYEEAKQYLSYETLYANGSRTETQVGIYILSSSGDGAQHRDSGSSGKSRRKRQIYGYDSRFSIFGKDFLLNYPFSTSVKLSTGCTGTLVAEKHVLTAAHCIHDGKTYVKGTQKLRVGFLKPKFKDGGRGANDSTSAMPEQMKFQWIRVKRTHVPKGWIKGNANDIGMDYDYALLELKKPHKRKFMKIGVSPPAKQLPGGRIHFSGYDNDRPGNLVYRFCDVKDETYDLLYQQCDAQPGASGSGVYVRMWKRQQQKWERKIIGIFSGHQWVDMNGSPQDFNVAVRITPLKYAQICYWIKGNYLDCREG

SEQ ID NO: 864222 - protein, 440 aa, Homo sapiens; identical to SEQ ID NO: 864221

SEQ ID NO: 864223 - protein, 440 aa, Homo sapiens; identical to SEQ ID NO: 864221

SEQ ID NO: 864224 - protein, 405 aa, Homo sapiens
SFAWPLRKWAVEFPYDTGVHMKKILLIWLLFLLFFLLCAVGQVSPYSAPWKPTWPAYRLPVVLPQSTLNLAKPDFGAEAKLEVSSSCGPQCHKGTPLPTYEEAKQYLSYETLYANGSRTETQVGIYILSSSGDGAQHRDSGSSGKSRRKRQIYGYDSRFSIFGKDFLLNYPFSTSVKLSTGCTGTLVAEKHVLTAAHCIHDGKTYVKGTQKLRVGFLKPKFKDGGRGANDSTSAMPEQMKFQWIRVKRTHVPKGWIKGNANDIGMDYDYALLELKKPHKRKFMKIGVSPPAKQLPGGRIHFSGYDNDRPGNLVYRFCDVKDETYDLLYQQCDAQPGASGSGVYVRMWKRQQQKWERKIIGIFSGHQWVDMNGSPQDFNVAVRITPLKYAQICYWIKGNYLDCREG

SEQ ID NO: 864225 - protein, 440 aa, Homo sapiens; identical to SEQ ID NO: 864221

SEQ ID NO: 864226 - protein, 138 aa, Homo sapiens
AGGGPASCLRCSPACSHSAVRRGRHGSRALSPGAHTCLSGAASRGPGGLLGADGSLMSRMRPVCQPWPSPHAPTTVKREGSTVSNSIQPPPPEYQLGSRTWLEAETPGQKRQCSAFMEFTEESRRASHFSSILKIEPV

SEQ ID NO: 864227 - protein, 440 aa, Homo sapiens; identical to SEQ ID NO: 864221

SEQ ID NO: 864228 - protein, 383 aa, Homo sapiens
MAGIPGLLFLLFFLLCAVGQVSPYSAPWKPTWPAYRLPVVLPQSTLNLAKPDFGAEAKLEVSSSCGPQCHKGTPLPTYEEAKQYLSYETLYANGSRTETQVGIYILSSSGDGAQHRDSGSSGKSRRKRQIYGYDSRFSIFGKDFLLNYPFSTSVKLSTGCTGTLVAEKHVLTAAHCIHDGKTYVKGTQKLRVGFLKPKFKDGGRGANDSTSAMPEQMKFQWIRVKRTHVPKGWIKGNANDIGMDYDYALLELKKPHKRKFMKIGVSPPAKQLPGGRIHFSGYDNDRPGNLVYRFCDVKDETYDLLYQQCDAQPGASGSGVYVRMWKRQQQKWERKIIGIFSGHQWVDMNGSPQDFNVAVRITPLKYAQICYWIKGNYLDCREG

SEQ ID NO: 864229 - protein, 440 aa, Homo sapiens; identical to SEQ ID NO: 864221

SEQ ID NO: 864230 - protein, 440 aa, Homo sapiens; identical to SEQ ID NO: 864221

SEQ ID NO: 864231 - protein, 532 aa, Homo sapiens
CTRMALKWTSVLLLIHLSCYFSSGSCGKVLVWAAEYSHWMNMKTILKELVQRGHEVTVLASSASILFDPNDASTLKLEVYPTSLTKTEFENIIMQQVKRWSDIRKDSFWLYFSQEQEILWELYDIFRNFCKDVVSNKKVMKKLQESRFDIVFADAVFPCGELLAALLNIRFVYSLRFTPGYTIERHSGGLIFPPSYIPIVMSKLSDQMTFMERVKNMIYVLYFDFWFQMSDMKKWDQFYSEVLGRPTTLFETMGKADIWLMRNSWSFQFPHPFLPNVDFVGGFHCKPAKPLPKEMEEFVQSSGENGVVVFSLGSVISNMTAERANVIATALAKIPQKVLWRFDGNKPDALGLNTRLYKWIPQNDLLGHPKTRAFITHGGANGIYEAIYHGIPMVGIPLFWDQPDNIAHMKAKGAAVRLDFHTMSSTDLLNALKTVINDPLYKENVMKLSRIQHDQPVKPLDRAVFWIEFVMRHKGAKHLRVAARDLTWFQYHSLDVIGFLLACVATVIFIITKFCLFCFWKFARKGKKGKRD

SEQ ID NO: 864232 - protein, 415 aa, Homo sapiens
CTRMALKWTSVLLLIHLSCYFSSGSCGKVLVWAAEYSHWMNMKTILKELVQRGHEVTVLASSASILFDPNDASTLKLEVYPTSLTKTEFENIIMQQVKRWSDIRKDNFWFQMSDMKKWDQFYSEVLGRPTTLFETMGKADIWLMRNSWSFQFPHPFLPNVDFVGGFHCKPAKPLPKEMEEFVQSSGENGVVVFSLGSVISNMTAERANVIATALAKIPQKVLWRFDGNKPDALGLNTRLYKWIPQNDLLGHPKTRAFITHGGANGIYEAIYHGIPMVGIPLFWDQPDNIAHMKAKGAAVRLDFHTMSSTDLLNALKTVINDPLYKENVMKLSRIQHDQPVKPLDRAVFWIEFVMRHKGAKHLRVAARDLTWFQYHSLDVIGFLLACVATVIFIITKFCLFCFWKFARKGKKGKRD

SEQ ID NO: 864233 - protein, 440 aa, Homo sapiens
CTRMALKWTSVLLLIHLSCYFSSGSCGKVLVWAAEYSHWMNMKTILKELVQRGHEVTVLASSASILFDPNDASTLKLEVYPTSLTKTEFENIIMQQVKRWSDIRKDSFWLYFSQEQEILWELYDIFRNFCKDVVSNKKVMKKLQESRFDIVFADAVFPCGELLAALLNIRFVYSLRFTPGYTIERHSGGLIFPPSYIPIVMSKLSDQMTFMERVKNMIYVLYFDFWFQMSDMKKWDQFYSEVLGRPTTLFETMGKADIWLMRNSWSFQFPHPFLPNVDFVGGFHCKPAKPLPKEMEEFVQSSGENGVVVFSLGSVISNMTAERANVIATALAKIPQKVLWRFDGNKPDALGLNTRLYKWIPQNDLLGHPKTRAFITHGGANGIYEAIYHGIPMVGIPLFWDQPDNIAHMKAKGAAVRLDFHTMSSTDLLNALKTVINDPL

SEQ ID NO: 864234 - protein, 250 aa, Homo sapiens
CTRMALKWTSVLLLIHLSCYFSSGSCGKVLVWAAEYSHWMNMKTILKELVQRGHEVTVLASSASILFDPNDASTLKLEVYPTSLTKTEFENIIMQQVKRWSDIRKDSFWLYFSQEQEILWELYDIFRNFCKDVVSNKKVMKKLQESRFDIVFADAVFPCGELLAALLNIRFVYSLRFTPGYTIERHSGGLIFPPSYIPIVMSKLSDQMTFMERVKNMIYVLYFDFWFQMSDMKKWDQFYSEVLGKNLFNR

SEQ ID NO: 864235 - protein, 318 aa, Homo sapiens
MTSGFTSARNEGVRVRSSRGRAGGVWRFERDEDGTGAGCGQWTRFCREPKMAVNVYSTSVTSDNLSRHDMLAWINESLQLNLTKIEQLCSGAAYCQFMDMLFPGSIALKKVKFQAKLEHEYIQNFKILQAGFKRMGVDKIIPVDKLVKGKFQDNFEFVQWFKKFFDANYDGKDYDPVAARQGQETAVAPSLVAPALNKPKKPLTSSSAAPQRPISTQRTAAAPKAGPGVVRKNPGVGNGDDEAAELMQQVNVLKLTVEDLEKERDFYFGKLRNIELICQENEGENDPVLQRIVDILYATDEGFVIPDEGGPQEEQEEY

SEQ ID NO: 864236 - protein, 297 aa, Homo sapiens
SGPPLRCGPCAAATGGPRVVGPWEGVGEKMAVNVYSTSVTSDNLSRHDMLAWINESLQLNLTKIEQLCSGAAYCQFMDMLFPGSIALKKVKFQAKLEHEYIQNFKILQAGFKRMGVDKIIPVDKLVKGKFQDNFEFVQWFKKFFDANYDGKDYDPVAARQGQETAVAPSLVAPALNKPKKPLTSSSAAPQRPISTQRTAAAPKAGPGVVRKNPGVGNGDDEAAELMQQVNVLKLTVEDLEKERDFYFGKLRNIELICQENEGENDPVLQRIVDILYATDEGFVIPDEGGPQEEQEEY

SEQ ID NO: 864237 - protein, 242 aa, Homo sapiens
NLRLGTSAGVNPAEGAAYCQFMDMLFPGSIALKKVKFQAKLEHEYIQNFKILQAGFKRMGVDKIIPVDKLVKGKFQDNFEFVQWFKKFFDANYDGKDYDPVAARQGQETAVAPSLVAPALNKPKKPLTSSSAAPQRPISTQRTAAAPKAGPGVVRKNPGVGNGDDEAAELMQQVNVLKLTVEDLEKERDFYFGKLRNIELICQENEGENDPVLQRIVDILYATDEGFVIPDEGGPQEEQEEY

SEQ ID NO: 864238 - protein, 258 aa, Homo sapiens
MTSGFTSARNEGVRVRSSRGRAGGVWRFERDEDGTGAGCGQWTRFCREPKMAVNVYSTSVTSDNLSRHDMLAWINESLQLNLTKIEQLCSGAAYCQFMDMLFPGSIALKKVKFQAKLEHEYIQNFKILQAGFKRMGVDKIIPVDKLVKGKFQDNFEFVQWFKKFFDANYDGKDPGVGNGDDEAAELMQQVNVLKLTVEDLEKERDFYFGKLRNIELICQENEGENDPVLQRIVDILYATDEGFVIPDEGGPQEEQEEY

SEQ ID NO: 864239 - protein, 318 aa, Homo sapiens; identical to SEQ ID NO: 864235

SEQ ID NO: 864240 - protein, 114 aa, Homo sapiens
MTSGFTSARNEGVRVRSSRGRAGGVWRFERDEDGTGAGCGQWTRFCREPKMAVNVYSTSVTSDNLSRHDMLAWINESLQLNLTKIEQLCSGAAYCQFMDMLFPGSIALKKLKCV

SEQ ID NO: 864241 - protein, 156 aa, Homo sapiens
MTSGFTSARNEGVRVRSSRGRAGGVWRFERDEDGTGAGCGQWTRFCREPKMAVNVYSTSVTSDNLSRHDMLAWINESLQLNLTKIEQLCSGAAYCQFMDMLFPGSIALKKVKFQAKLEHEYIQNFKILQAGFKRMGVDKVSKRYLLLWLMFLNDRC

SEQ ID NO: 864242 - protein, 281 aa, Homo sapiens
MTSGFTSARNEGKMAVNVYSTSVTSDNLSRHDMLAWINESLQLNLTKIEQLCSGAAYCQFMDMLFPGSIALKKVKFQAKLEHEYIQNFKILQAGFKRMGVDKIIPVDKLVKGKFQDNFEFVQWFKKFFDANYDGKDYDPVAARQGQETAVAPSLVAPALNKPKKPLTSSSAAPQRPISTQRTAAAPKAGPGVVRKNPGVGNGDDEAAELMQQVNVLKLTVEDLEKERDFYFGKLRNIELICQENEGENDPVLQRIVDILYATDEGFVIPDEGGPQEEQEEY

SEQ ID NO: 864243 - protein, 181 aa, Homo sapiens
MTSGFTSARNEGVRVRSSRGRAGGVWRFERDEDGTGAGCGQWTRFCREPKMAVNVYSTSVTSDNLSRHDMLAWINESLQLNLTKIEQLCSGAAYCQFMDMLFPGSIALKKVKFQAKLEHEYIQNFKILQAGFKRMGVDKIIPVDKLVKGKFQDNFEFVQWFKKFFDANYDGKDFPCCSSSE

SEQ ID NO: 864244 - protein, 318 aa, Homo sapiens; identical to SEQ ID NO: 864235

SEQ ID NO: 864245 - protein, 318 aa, Homo sapiens; identical to SEQ ID NO: 864235

SEQ ID NO: 864246 - protein, 334 aa, Homo sapiens
HEAPCDHMEYAVNCHVITWERIISHFDIFAFGHFWGWAMKALLIRSYGLCWTISITWELTELFFMHLLPNFAECWWDQVILDILLCNGGGIWLGMVVCRFLEMRTYHWASFKDIHTTTGKIKRAVLQFTPASWTYVRWFDPKSSFQRVAGVYLFMIIWQLTELNTFFLKHIFVFQASHPLSWGRILFIGGITAPTVRQYYAYLTDTQCKRVGTQCWVFGVIGFLEAIVCIKFGQDLFSKTQILYVVLWLLCVAFTTFLCLYGMIWYAEHYGHREKTYSECEDGTYSPEISWHHRKGTKGSEDSPPKHAGNNESHSSRRRNRHSKSKVTNGVGKK

SEQ ID NO: 864247 - protein, 473 aa, Homo sapiens
MASCVGSRTLSKDDVNYKMHFRMINEQQVEDITIDFFYRPHTITLLSFTIVSLMYFAFTRDDSVPEDNIWRGILSVIFFFLIISVLAFPNGPFTRPHPALWRMVFGLSVLYFLFLVFLLFLNFEQVKSLMYWLDPNLRYATREADVMEYAVNCHVITWERIISHFDIFAFGHFWGWAMKALLIRSYGLCWTISITWELTELFFMHLLPNFAECWWDQVILDILLCNGGGIWLGMVVCRFLEMRTYHWASFKDIHTTTGKIKRAVLQFTPASWTYVRWFDPKSSFQRVAGVYLFMIIWQLTELNTFFLKHIFVFQASHPLSWGRILFIGGITAPTVRQYYAYLTDTQCKRVGTQCWVFGVIGFLEAIVCIKFGQDLFSKTQILYVVLWLLCVAFTTFLCLYGMIWYAEHYGHREKTYSECEDGTYSPEISWHHRKGTKGSEDSPPKHAGNNESHSSRRRNRHSKSKVTNGVGKK

SEQ ID NO: 864248 - protein, 371 aa, Homo sapiens [sequence omitted]

SEQ ID NO: 864249 - protein, 101 aa, Homo sapiens
LVAGQDGHRVVCVLIAPRLGFRFTCALTSGPHHHDHVHHTQDRCTHASGTTQTLGRYCVEPRATACAPSVLVLCLRASPSFMNEATRGSARIREGPVPRQA

SEQ ID NO: 864250 - protein, 358 aa, Homo sapiens
MASCVGSRTLSKDDVNYKMHFRMINEQQVEDITIDFFYRPHTITLLSFTIVSLMYFAFTRDDSVPEDNIWRGILSVIFFFLIISVLAFPNGPFTRPHPALWRMVFGLSVLYFLFLVFLLFLNFEQVKSLMYWLDPNLRYATREADVMEYAVNCHVITWERIISHFDIFAFGHFWGWAMKALLIRSYGLCWTISITWELTELFFMHLLPNFAECWWDQVILDILLCNGGGIWLGMVVCRFLEMRTYHWASFKDIHTTTGKIKRAVLQFTPASWTYVRWFDPKSSFQRVAGVYLFMIIWQLTELNTFFLKHIFVFQASHPLSWGRILFIGGITAPTVRQYYAYLTDTQCKRVGTQCWVFG

SEQ ID NO: 864251 - protein, 327 aa, Homo sapiens
MEYAVNCHVITWERIISHFDIFAFGHFWGWAMKALLIRSYGLCWTISITWELTELFFMHLLPNFAECWWDQVILDILLCNGGGIWLGMVVCRFLEMRTYHWASFKDIHTTTGKIKRAVLQFTPASWTYVRWFDPKSSFQRVAGVYLFMIIWQLTELNTFFLKHIFVFQASHPLSWGRILFIGGITAPTVRQYYAYLTDTQCKRVGTQCWVFGVIGFLEAIVCIKFGQDLFSKTQILYVVLWLLCVAFTTFLCLYGMIWYAEHYGHREKTYSECEDGTYSPEISWHHRKGTKGSEDSPPKHAGNNESHSSRRRNRHSKSKVTNGVGKK

SEQ ID NO: 864252 - protein, 473 aa, Homo sapiens; identical to SEQ ID NO: 864247

SEQ ID NO: 864253 - protein, 473 aa, Homo sapiens; identical to SEQ ID NO: 864247

SEQ ID NO: 864254 - protein, 552 aa, Homo sapiens
MASCVGSRTLSKDDVNYKMHFRMINEQQVEDITIDFFYRPHTITLLSFTIVSLMYFAFTRDDSVPEDNIWRGILSVIFFFLIISVLAFPNGPFTRPHPALWRMVFGLSVLYFLFLVFLLFLNFEQVKSLMYWLDPNLRYATREADVMEYAVNCHVITWERIISHFDIFAFGHFWGWAMKALLIRSYGLCWTISITWELTELFFMHLLPNFAECWWDQVILDILLCNGGGIWLGMVVCRFLEMRTYHWASFKDIHTTTGKIKRAVLQFTPASWTYVRWFDPKSSFQRVAGVYLFMIIWQLTELNTFFLKHIFVFQASHPLSWGRILFIGGITAPTVRQYYAYLTDTQCKRVGTQCWVFGVIGFLEAIVCIKFGQDLFSKTQILYVVLWLLCVAFTTFLCLYGMIWYAEHYGHREKTYSECEDGTYSPEISWHHRKGTKGSEGQPHPKHACATNESQFFPATQAHRAIPNVATKVHQLRVGTRNGHTPLVSSKACTQKHAVELTEAHMGNLHSGNHPPPKRPSDAPHRALPGQTRPNAPPARAHTPSPHSTTAT

SEQ ID NO: 864255 - protein, 167 aa, Homo sapiens
MASCVGSRTLSKDDVNYKMHFRMINEQQVEDITIDFFYRPHTITLLSFTIVSLMYFAFTRDDSVPEDNIWRGILSVIFFFLIISVLAFPNGPFTRPHPALWRMVFGLSVLYFLFLVFLLFLNFEQVKSLMYWLDPNLRYATREADVMVCTCQWPLGETRRLFLGCKR

SEQ ID NO: 864256 - protein, 713 aa, Homo sapiens
MARARGSPCPPLPPGRMSWPHGALLFLWLFSPPLGAGGGGVAVTSAAGGGSPPATSCPVACSCSNQASRVICTRRDLAEVPASIPVNTRYLNLQENGIQVIRTDTFKHLRHLEILQLSKNLVRKIEVGAFNGLPSLNTLELFDNRLTTVPTQAFEYLSKLRELWLRNNPIESIPSYAFNRVPSLRRLDLGELKRLEYISEAAFEGLVNLRYLNLGMCNLKDIPNLTALVRLEELELSGNRLDLIRPGSFQGLTSLRKLWLMHAQVATIERNAFDDLKSLEELNLSHNNLMSLPHDLFTPLHRLERVHLNHNPWHCNCDVLWLSWWLKETVPSNTTCCARCHAPAGLKGRYIGELDQSHFTCYAPVIVEPPTDLNVTEGMAAELKCRTGTSMTSVNWLTPNGTLMTHGSYRVRISVLHDGTLNFTNVTVQDTGQYTCMVTNSAGNTTASATLNVSAVDPVAAGGTGSGGGGPGGSGGVGGGSGGYTYFTTVTVETLETQPGEEALQPRGTEKEPPGPTTDGVWGGGRPGDAAGPASSSTTAPAPRSSRPTEKAFTVPITDVTENALKDLDDVMKTTKIIIGCFVAITFMAAVMLVAFYKLRKQHQLHKHHGPTRTVEIINVEDELPAASAVSVAAAAAAASGGGVGGDSHLALPALERDHLNHHHYVAAAFKAHYSSNPSGGGCGGKGPPGLNSIHEPLLFKSGSKENVQETQI

SEQ ID NO: 864257 - protein, 276 aa, Homo sapiens
MSWPHGALLFLWLFSPPLGAGGGGVAVTSAAGGGSPPATSCPVACSCSNQASRVICTRRDLAEVPASIPVNTRYLNLQENGIQVIRTDTFKHLRHLEILQLSKNLVRKIEVGAFNGLPSLNTLELFDNRLTTVPTQAFEYLSKLRELWLRNNPIESIPSYAFNRVPSLRRLDLGELKRLEYISEAAFEGLVNLRYLNLGMCNLKDIPNLTALVRLEELELSGNRLDLIRPGSFQGLTSLRKLWLMHAQVATIERNAFDDLKSLEELNLSHLPHRHF

SEQ ID NO: 864258 - protein, 697 aa, Homo sapiens
MSWPHGALLFLWLFSPPLGAGGGGVAVTSAAGGGSPPATSCPVACSCSNQASRVICTRRDLAEVPASIPVNTRYLNLQENGIQVIRTDTFKHLRHLEILQLSKNLVRKIEVGAFNGLPSLNTLELFDNRLTTVPTQAFEYLSKLRELWLRNNPIESIPSYAFNRVPSLRRLDLGELKRLEYISEAAFEGLVNLRYLNLGMCNLKDIPNLTALVRLEELELSGNRLDLIRPGSFQGLTSLRKLWLMHAQVATIERNAFDDLKSLEELNLSHNNLMSLPHDLFTPLHRLERVHLNHNPWHCNCDVLWLSWWLKETVPSNTTCCARCHAPAGLKGRYIGELDQSHFTCYAPVIVEPPTDLNVTEGMAAELKCRTGTSMTSVNWLTPNGTLMTHGSYRVRISVLHDGTLNFTNVTVQDTGQYTCMVTNSAGNTTASATLNVSAVDPVAAGGTGSGGGGPGGSGGVGGGSGGYTYFTTVTVETLETQPGEEALQPRGTEKEPPGPTTDGVWGGGRPGDAAGPASSSTTAPAPRSSRPTEKAFTVPITDVTENALKDLDDVMKTTKIIIGCFVAITFMAAVMLVAFYKLRKQHQLHKHHGPTRTVEIINVEDELPAASAVSVAAAAAAASGGGVGGDSHLALPALERDHLNHHHYVAAAFKAHYSSNPSGGGCGGKGPPGLNSIHEPLLFKSGSKENVQETQI

SEQ ID NO: 864259 - protein, 607 aa, Homo sapiens
IQLVSEHILQLSKNLVRKIEVGAFNGLPSLNTLELFDNRLTTVPTQAFEYLSKLRELWLRNNPIESIPSYAFNRVPSLRRLDLGELKRLEYISEAAFEGLVNLRYLNLGMCNLKDIPNLTALVRLEELELSGNRLDLIRPGSFQGLTSLRKLWLMHAQVATIERNAFDDLKSLEELNLSHNNLMSLPHDLFTPLHRLERVHLNHNPWHCNCDVLWLSWWLKETVPSNTTCCARCHAPAGLKGRYIGELDQSHFTCYAPVIVEPPTDLNVTEGMAAELKCRTGTSMTSVNWLTPNGTLMTHGSYRVRISVLHDGTLNFTNVTVQDTGQYTCMVTNSAGNTTASATLNVSAVDPVAAGGTGSGGGGPGGSGGVGGGSGGYTYFTTVTVETLETQPGEEALQPRGTEKEPPGPTTDGVWGGGRPGDAAGPASSSTTAPAPRSSRPTEKAFTVPITDVTENALKDLDDVMKTTKIIIGCFVAITFMAAVMLVAFYKLRKQHQLHKHHGPTRTVEIINVEDELPAASAVSVAAAAAAASGGGVGGDSHLALPALERDHLNHHHYVAAAFKAHYSSNPSGGGCGGKGPPGLNSIHEPLLFKSGSKENVQETQI

SEQ ID NO: 864260 - protein, 181 aa, Homo sapiens
YLASGKTKTIRHMVANVRGNHIASGSTDTWNGKTLKIPPVTPSILDCCIIRVDYSLAVYIHIPGAKKLMLELPLVIGTIPYNGFGSRNSSIASQFSMDMSWLTLTLPEQPEAPPNYADVVSEEEFSRHIPPYPQPPNCEGEVCCPVFACIQEFRFQPPPLYSEVDPHPSDVEESQPVSFIL

SEQ ID NO: 864261 - protein, 181 aa, Homo sapiens; identical to SEQ ID NO: 864260

SEQ ID NO: 864262 - protein, 181 aa, Homo sapiens; identical to SEQ ID NO: 864260

SEQ ID NO: 864263 - protein, 181 aa, Homo sapiens; identical to SEQ ID NO: 864260

SEQ ID NO: 864264 - protein, 73 aa, Homo sapiens
AWEKKKEVPAVPETLKKKRRNFAELKIKRLRKKFAQKMLRKARRKPLHLLAQGPSLCKQGAWAVVSPVCADLY

SEQ ID NO: 864265 - protein, 894 aa, Homo sapiens
MNSMNPMKPALPPAPHGDGSFAYESVPWQQSATQPAGSLSVVTTVWGVGNATQSQVLGNPMGPAGSPSGSSMMPGVAGGSSALTSPQCLGQQAFAEGGANKGYVQQGVYSRGGYPGAPGFTTGYAGGPGGLGLPSHAARPSTDFTQAAAAAAVAAAAATATATATATVAALQEKQSQELSQYGAMGAGQSFNSQFLQHGGPRGPSVPAGMNPTGIGGVMGPSGLSPLAMNPTRAAGMTPLYAGQRLPQHGYPGPPQAQPLPRQGVKRTYSEVYPGQQYLQGGQYAPSTAQFAPSPGQPPAPSPSYPGHRLPLQQGMTQSLSVPGPTGLHYKPTRSIPGYPSSPLPGNPTPPMTPSSSVPYMSPNQEVKSPFLPDLKPNLNSLHSSPSGSGPCDELRLTFPVRDGVVLEPFRLQHNLAVSNHVFQLRDSVYKTLIMRPDLELQFKCYHHEDRQMNTNWPASVQVSVNATPLTIERGDNKTSHKPLYLKHVCQPGRNTIQITVTACCCSHLFVLQLVHRPSVRSVLQGLLKKRLLPAEHCITKIKRNFSSGTIPGTPGPNGEDGVEQTAIKVSLKCPITFRRIQLPARGHDCRHIQCFDLESYLQLNCERGTWRCPVCNKTALLEGLEVDQYMLGILIYIQNSDYEEITIDPTCSWKPVPVKPDMHIKEEPDGPALKRCRTVSPAHVLMPSVMEMIAALGPGAAPFAPLQPPSVPAPSDYPGQGSSFLGPGTFPESFPPTTPSTPTLAEFTPGPPPISYQSDIPSSLLTSEKSTACLPSQMAPAGHLDPTHNPGTPGLHTSNLGAPPGPQLHHSNPPPASRQSLGQASLGPTGELAFSPATGVMGPPSMSGAGEAPEPALDLLPELTNPDELLSYLGPPDLPTNNNDDLLSLFENN

SEQ ID NO: 864266 - protein, 985 aa, Homo sapiens
MNSMNPMKPALPPAPHGDGSFAYESVPWQQSATQPAGSLSVVTTVWGVGNATQSQVLGNPMGPAGSPSGSSMMPGVAGGSSALTSPQCLGQQAFAEGGANKGYVQQGVYSRGGYPGAPGFTTGYAGGPGGLGLPSHAARPSTDFTQAAAAAAVAAAAATATATATATVAALQEKQSQELSQYGAMGAGQSFNSQFLQHGGPRGPSVPAGMNPTGIGGVMGPSGLSPLAMNPTRAAGMTPLYAGQRLPQHGYPGPPQAQPLPRQGVKRTYSEVYPGQQYLQGGQYAPSTAQFAPSPGQPPAPSPSYPGHRLPLQQGMTQSLSVPGPTGLHYKPTEQFNGQGASFNGGSVSYSQPGLSGVGAWPGGWAGRLTGWAYGERATGQAPLGPPPVHLCYHGSQWVRREQTPLPSTLAICLDCLCSTLQPTRSIPGYPSSPLPGNPTPPMTPSSSVPYMSPNQEVKSPFLPDLKPNLNSLHSSPSGSGPCDELRLTFPVRDGVVLEPFRLQHNLAVSNHVFQLRDSVYKTLIMRPDLELQFKCYHHEDRQMNTNWPASVQVSVNATPLTIERGDNKTSHKPLYLKHVCQPGRNTIQITVTACCCSHLFVLQLVHRPSVRSVLQGLLKKRLLPAEHCITKIKRNFSSGTIPGTPGPNGEDGVEQTAIKVSLKCPITFRRIQLPARGHDCRHIQCFDLESYLQLNCERGTWRCPVCNKTALLEGLEVDQYMLGILIYIQNSDYEEITIDPTCSWKPVPVKPDMHIKEEPDGPALKRCRTVSPAHVLMPSVMEMIAALGPGAAPFAPLQPPSVPAPSDYPGQGSSFLGPGTFPESFPPTTPSTPTLAEFTPGPPPISYQSDIPSSLLTSEKSTACLPSQMAPAGHLDPTHNPGTPGLHTSNLGAPPGPQLHHSNPPPASRQSLGQASLGPTGELAFSPATGVMGPPSMSGAGEAPEPALDLLPELTNPDELLSYLGPPDLPTNNNDDLLSLFENN

SEQ ID NO: 864267 - protein, 894 aa, Homo sapiens; identical to SEQ ID NO: 864265

SEQ ID NO: 864268 - protein, 894 aa, Homo sapiens; identical to SEQ ID NO: 864265

SEQ ID NO: 864269 - protein, 951 aa, Homo sapiens
MNSMNPMKPALPPAPHGDGSFAYESVPWQQSATQPAGSLSVVTTVWGVGNATQSQVLGNPMGPAGSPSGSSMMPGVAGGSSALTSPQCLGQQAFAEGGANKGYVQQGVYSRGGYPGAPGFTTGYAGGPGGLGLPSHAARPSTDFTQAAAAAAVAAAAATATATATATVAALQEKQSQELSQYGAMGAGQSFNSQFLQHGGPRGPSVPAGMNPTGIGGVMGPSGLSPLAMNPTRAAGMTPLYAGQRLPQHGYPGPPQAQPLPRQGVKRTYSEVYPGQQYLQGGQYAPSTAQFAPSPGQPPAPSPSYPGHRLPLQQGMTQSLSVPGPTGLHYKPTEQFNGQGASFNGGSVSYSQPGLSGPTRSIPGYPSSPLPGNPTPPMTPSSSVPYMSPNQEVKSPFLPDLKPNLNSLHSSPSGSGPCDELRLTFPVRDGVVLEPFRLQHNLAVSNHVFQLRDSVYKTLIMRPDLELQFKCYHHEDRQMNTNWPASVQVSVNATPLTIERGDNKTSHKPLYLKHVCQPGRNTIQITVTACCCSHLFVLQLVHRPSVRSVLQGLLKKRLLPAEHCITKIKRNFSSGTIPGTPGPNGEDGVEQTAIKVSLKCPITFRRIQLPARGHDCRHIQCFDLESYLQLNCERGTWRCPVCNKTALLEGLEVDQYMLGILIYIQNSDYEEITIDPTCSWKPVPVKPDMHIKEEPDGPALKRCRTVSPAHVLMPSVMEMIAALGPGAAPFAPLQPPSVPAPSDYPGQGIPKANSLGSNEKKCPFPNSDFCKTLLLFVGGSSFLGPGTFPESFPPTTPSTPTLAEFTPGPPPISYQSDIPSSLLTSEKSTACLPSQMAPAGHLDPTHNPGTPGLHTSNLGAPPGPQLHHSNPPPASRQSLGQASLGPTGELAFSPATGVMGPPSMSGAGEAPEPALDLLPELTNPDELLSYLGPPDLPTNNNDDLLSLFENN

SEQ ID NO: 864270 - protein, 264 aa, Homo sapiens
MLGILIYIQNSDYEEITIDPTCSWKPVPVKPDMHIKEEPDGPALKRCRTVSPAHVLMPSVMEMIAALGPGAAPFAPLQPPSVPAPSDYPGQGSSFLGPGTFPESFPPTTPSTPTLAEFTPGPPPISYQSDIPSSLLTSEKSTACLPSQMAPAGHLDPTHNPGTPGLHTSNLGAPPGPQLHHSNPPPASRQSLGQASLGPTGELAFSPATGVMGPPSMSGAGEAPEPALDLLPELTNPDELLSYLGPPDLPTNNNDDLLSLFENN

SEQ ID NO: 864271 - protein, 758 aa, Homo sapiens
MNSMNPMKPALPPAPHGDGSFAYESVPWQQSATQPAGSLSVVTTVWGVGNATQSQVLGNPMGPAGSPSGSSMMPGVAGGSSALTSPQCLGQQAFAEGGANKGYVQQGVYSRGGYPGAPGFTTGYAGGPGGLGLPSHAARPSTDFTQAAAAAAVAAAAATATATATATVAALQEKQSQELSQYGAMGAGQSFNSQFLQHGGPRGPSVPAGMNPTGIGGVMGPSGLSPLAMNPTRAAGMTPLYAGQRLPQHGYPGPPQAQPLPRQGVKRTYSEVYPGQQYLQGGQYAPSTAQFAPSPGQPPAPSPSYPGHRLPLQQGMTQSLSVPGPTGLHYKPTEQFNGQGASFNGGSVSYSQPGLSGPTRSIPGYPSSPLPGNPTPPMTPSSSVPYMSPNQEVKSPFLPDLKPNLNSLHSSPSGSGPCDELRLTFPVRDGVVLEPFRLQHNLAVSNHVFQLRDSVYKTLIMRPDLELQFKCYHHEDRQMNTNWPASVQVSVNATPLTIERGDNKTSHKPLYLKHVCQPGRNTIQITVTACCCSHLFVLQLVHRPSVRSVLQGLLKKRLLPAEHCITKIKRNFSSGTIPGTPGPNGEDGVEQTAIKVSLKCPITFRRIQLPARGHDCRHIQCFDLESYLQLNCERGTWRCPVCNKTALLEGLEVDQYMLGILIYIQNSDYEEITIDPTCSWKPVPVKPDMHIKEEPDGPALKRCRTVSPAHVLMPSVMEMIAALGPGAAPFAPLQPPSVPAPSDYPGQGMSQGQFPWQQ

SEQ ID NO: 864272 - protein, 104 aa, Homo sapiens [sequence omitted]

SEQ ID NO: 864273 - protein, 868 aa, Homo sapiens
MNSMNPMKPALPPAPHGDGSFAYESVPWQQSATQPAGSLSVVTTVWGVGNATQSQVLGNPMGPAGSPSGSSMMPGVAGGSSALTSPQCLGQQAFAEGGANKGYVQQGVYSRGGYPGAPGFTTGYAGGPGGLGLPSHAARPSTDFTQAAAAAAVAAAAATATATATATVAALQEKQSQELSQYGAMGAGQSFNSQFLQHGGPRGPSVPAGMNPTGIGGVMGPSGLSPLAMNPTRAAGMTPLYAGQRLPQHGYPGPPQAQPLPRQGVKRTYSEVYPGQQYLQGGQYAPSTAQFAPSPGQPPAPSPSYPGHRLPLQQGMTQSLSVPGPTGLHYKPTEQFNGQGASFNGGSVSYSQPGLSGPTRSIPGYPSSPLPGNPTPPMTPSSSVPYMSPNQEVKSPFLPDLKPNLNSLHSSPSGSGPCDELRLTFPVRDGVVLEPFRLQHNLAVSNHVFQLRDSVYKTLIMRPDLELQFKCYHHEDRQMNTNWPASVQVSVNATPLTIERGDNKTSHKPLYLKHVCQPGRNTIQITVTACCCSHLFVLQLVHRPSVRSVLQGLLKKRLLPAEHCITKIKRNFSSGTIPGTPGPNGEDGVEQTAIKVSLKCPITFRRIQLPARGHDCRHIQCFDLESYLQLNCERGTWRCPVCNKTALLEGLEVDQYMLGILIYIQNSDYEEITIDPTCSWKPVPVKPDMHIKEEPDGPALKRCRTVSPAHVLMPSVMEMIAALGPGAAPFAPLQPPSVPAPSDYPGQGKYSRLALNLKMTLGIWLLSPDQSPHLQECGYAGHTPRLSVLPHKTMTAGHLQPLPSQGRGGEGTVSAMVPGNRQWGLHPSFPVWIKGLLAGTPHRTGPIWGPPLGPTSHAWCIPRWYFRR

SEQ ID NO: 864274 - protein, 401 aa, Homo sapiens [sequence omitted]

SEQ ID NO: 864275 - protein, 401 aa, Homo sapiens [sequence omitted]

SEQ ID NO: 864276 - protein, 920 aa, Homo sapiens
MNSMNPMKPALPPAPHGDGSFAYESVPWQQSATQPAGSLSVVTTVWGVGNATQSQVLGNPMGPAGSPSGSSMMPGVAGGSSALTSPQCLGQQAFAEGGANKGYVQQGVYSRGGYPGAPGFTTGYAGGPGGLGLPSHAARPSTDFTQAAAAAAVAAAAATATATATATVAALQEKQSQELSQYGAMGAGQSFNSQFLQHGGPRGPSVPAGMNPTGIGGVMGPSGLSPLAMNPTRAAGMTPLYAGQRLPQHGYPGPPQAQPLPRQGVKRTYSEVYPGQQYLQGGQYAPSTAQFAPSPGQPPAPSPSYPGHRLPLQQGMTQSLSVPGPTGLHYKPTEQFNGQGASFNGGSVSYSQPGLSGPTRSIPGYPSSPLPGNPTPPMTPSSSVPYMSPNQEVKSPFLPDLKPNLNSLHSSPSGSGPCDELRLTFPVRDGVVLEPFRLQHNLAVSNHVFQLRDSVYKTLIMRPDLELQFKCYHHEDRQMNTNWPASVQVSVNATPLTIERGDNKTSHKPLYLKHVCQPGRNTIQITVTACCCSHLFVLQLVHRPSVRSVLQGLLKKRLLPAEHCITKIKRNFSSGTIPGTPGPNGEDGVEQTAIKVSLKCPITFRRIQLPARGHDCRHIQCFDLESYLQLNCERGTWRCPVCNKTALLEGLEVDQYMLGILIYIQNSDYEEITIDPTCSWKPVPVKPDMHIKEEPDGPALKRCRTVSPAHVLMPSVMEMIAALGPGAAPFAPLQPPSVPAPSDYPGQGSSFLGPGTFPESFPPTTPSTPTLAEFTPGPPPISYQSDIPSSLLTSEKSTACLPSQMAPAGHLDPTHNPGTPGLHTSNLGAPPGPQLHHSNPPPASRQSLGQASLGPTGELAFSPATGVMGPPSMSGAGEAPEPALDLLPELTNPDELLSYLGPPDLPTNNNDDLLSLFENN

SEQ ID NO: 864277 - protein, 543 aa, Homo sapiens
MTPSSSVPYMSPNQEVKSPFLPDLKPNLNSLHSSPSGSGPCDELRLTFPVRDGVVLEPFRLQHNLAVSNHVFQLRDSVYKTLIMRPDLELQFKCYHHEDRQMNTNWPASVQVSVNATPLTIERGDNKTSHKPLYLKHVCQPGRNTIQITVTACCCSHLFVLQLVHRPSVRSVLQGLLKKRLLPAEHCITKIKRNFSSGTIPGTPGPNGEDGVEQTAIKVSLKCPITFRRIQLPARGHDCRHIQCFDLESYLQLNCERGTWRCPVCNKTALLEGLEVDQYMLGILIYIQNSDYEEITIDPTCSWKPVPVKPDMHIKEEPDGPALKRCRTVSPAHVLMPSVMEMIAALGPGAAPFAPLQPPSVPAPSDYPGQGSSFLGPGTFPESFPPTTPSTPTLAEFTPGPPPISYQSDIPSSLLTSEKSTACLPSQMAPAGHLDPTHNPGTPGLHTSNLGAPPGPQLHHSNPPPASRQSLGQASLGPTGELAFSPATGVMGPPSMSGAGEAPEPALDLLPELTNPDELLSYLGPPDLPTNNNDDLLSLFENN

SEQ ID NO: 864278 - protein, 894 aa, Homo sapiens; identical to SEQ ID NO: 864265

SEQ ID NO: 864279 - protein, 433 aa, Homo sapiens
MCQALLNQNPNCLKHYQVIIMTLYLKHVCQPGRNTIQITVTACCCSHLFVLQLVHRPSVRSVLQGLLKKRLLPAEHCITKIKRNFSSGTIPGTPGPNGEDGVEQTAIKVSLKCPITFRRIQLPARGHDCRHIQCFDLESYLQLNCERGTWRCPVCNKTALLEGLEVDQYMLGILIYIQNSDYEEITIDPTCSWKPVPVKPDMHIKEEPDGPALKRCRTVSPAHVLMPSVMEMIAALGPGAAPFAPLQPPSVPAPSDYPGQGSSFLGPGTFPESFPPTTPSTPTLAEFTPGPPPISYQSDIPSSLLTSEKSTACLPSQMAPAGHLDPTHNPGTPGLHTSNLGAPPGPQLHHSNPPPASRQSLGQASLGPTGELAFSPATGVMGPPSMSGAGEAPEPALDLLPELTNPDELLSYLGPPDLPTNNNDDLLSLFENN

SEQ ID NO: 864280 - protein, 819 aa, Homo sapiens
MNSMNPMKPALPPAPHGDGSFAYESVPWQQSATQPAGSLSVVTTVWGVGNATQSQVLGNPMGPAGSPSGSSMMPGVAGGSSALTSPQCLGQQAFAEGGANKGYVQQGVYSRGGYPGAPGFTTGYAGGPGGLGLPSHAARPSTDFTQAAAAAAVAAAAATATATATATVAALQEKQSQELSQYGAMGAGQSFNSQFLQHGGPRGPSVPAGMNPTGIGGVMGPSGLSPLAMNPTRAAGMTPLYAGQRLPQHGYPGPPQAQPLPRQGVKRTYSEVYPGQQYLQGGQYAPSTAQFAPSPGQPPAPSPSYPGHRLPLQQGMTQSLSVPGPTGLHYKPTEQFNGQGASFNGGSVSYSQPGLSGPTRSIPGYPSSPLPGNPTPPMTPSSSVPYMSPNQEVKSPFLPDLKPNLNSLHSSPSGSGPCDELRLTFPVRDGVVLEPFRLQHNLAVSNHVFQLRDSVYKTLIMRPDLELQFKCYHHEDRQMNTNWPASVQVSVNATPLTIERGDNKTSHKPLYLKHVCQPGRNTIQITVTACCCSHLFVLQLVHRPSVRSVLQGLLKKRLLPAEHCITKIKRNFSSGTIPGTPGPNGEDGVEQTAIKVSLKCPITFRRIQLPARGHDCRHIQCFDLESYLQLNCERGTWRCPVCNKTALLEGLEVDQYMLGILIYIQNSDYEEITIDPTCSWKPVPVKPDMHIKEEPDGPALKRCRTVSPAHVLMPSVMEMIAALGPGAAPFAPLQPPSVPPPASRQSLGQASLGPTGELAFSPATGVMGPPSMSGAGEAPEPALDLLPELTNPDELLSYLGPPDLPTNNNDDLLSLFENN

SEQ ID NO: 864281 - protein, 920 aa, Homo sapiens; identical to SEQ ID NO: 864276

SEQ ID NO: 864282 - protein, 848 aa, Homo sapiens
MNSMNPMKPALPPAPHGDGSFAYESVPWQQSATQPAGSLSVVTTVWGVGNATQSQVLGNPMGPAGSPSGSSMMPGVAGGSSALTSPQCLGQQAFAEGGANKGYVQQGVYSRGGYPGAPGFTTGYAGGPGGLGLPSHAARPSTDFTQAAAAAAVAAAAATATATATATVAALQEKQSQELSQYGAMGAGQSFNSQFLQHGGPRGPSVPAGMNPTGIGGVMGPSGLSPLAMNPTRAAGMTPLYAGQRLPQHGYPGPPQAQPLPRQGVKRTYSEVYPGQQYLQGGQYAPSTAQFAPSPGQPPAPSPSYPGHRLPLQQGMTQSLSVPGPTGLHYKPTEQFNGQGASFNGGSVSYSQPGLSGPTRSIPGYPSSPLPGNPTPPMTPSSSVPYMSPNQEVKSPFLPDLKPNLNSLHSSPSGSGPCDELRLTFPVRDGVVLEPFRLQHNLAVSNHVFQLRDSVYKTLIMRPDLELQFKCYHHEDRQMNTNWPASVQVSVNATPLTIERGDNKTSHKPLYLKHVCQPGRNTIQITVTACCCSHLFVLQLVHRPSVRSVLQGLLKKRLLPAEHCITKIKRNFSSGTIPGTPGPNGEDGVEQTAIKVSLKCPITFRRIQLPARGHDCRHIQCFDLESYLQLNCERGTWRCPVCNKTALLEGLEVDQYMLGILIYIQNSDYEEITIDPTCSWKPVPVKPDMHIKEEPDGPALKRCRTVSPAHVLMPSVMEMIAALGPGAGFWISSTDHVCSMAQSWDSGGETFCAPIAGEYVVDGVTAVVLIRCIKLTPRIVDLDRLIRRRSFRDHKRRRWLKNIVLQDIKEQEEEGESDSEAATQETSKREITQRETVEVQETGDDNAQ

SEQ ID NO: 864283 - protein, 401 aa, Homo sapiens [sequence omitted]

SEQ ID NO: 864284 - protein, 88 aa, Homo sapiens
RYRCIHRQVYSTGRCTQEVKSPFLPDLKPNLNSLHSSPSGSGPCDELRLTFPVRDGVVLEPFRLQHNLAVSNHVFQLRDSVYKTLIMR

SEQ ID NO: 864285 - protein, 222 aa, Homo sapiens
MPKVVSRSVVCSDTRDREEYDDGEKPLHVYYCLCGQMVLVLDCQLEKLPMRPRDRSRVIDAAKHAHKFCNTEDEETMYLRRPEGIERQYRKKCAKCGLPLFYQSQPKNAPVTFIVDGAVVKFGQGFGKTNIYTQKQEPPKKVMMTKRTKDMGKFSSVTVSTIDEEEEEIEAREVADSYAQNAKVIEKQLERKGMSKRRLQELAELEAKKAKMKGTLIDNQFK

SEQ ID NO: 864286 - protein, 222 aa, Homo sapiens; identical to SEQ ID NO: 864285

SEQ ID NO: 864287 - protein, 222 aa, Homo sapiens; identical to SEQ ID NO: 864285

SEQ ID NO: 864288 - protein, 250 aa, Homo sapiens
ATRHRHTQTRADLAVSRCYRTRRLLLGTMPKVVSRSVVCSDTRDREEYDDGEKPLHVYYCLCGQMVLVLDCQLEKLPMRPRDRSRVIDAAKHAHKFCNTEDEETMYLRRPEGIERQYRKKCAKCGLPLFYQSQPKNAPVTFIVDGAVVKFGQGFGKTNIYTQKQEPPKKVMMTKRTKDMGKFSSVTVSTIDEEEEEIEAREVADSYAQNAKVIEKQLERKGMSKRRLQELAELEAKKAKMKGTLIDNQFK

SEQ ID NO: 864289 - protein, 247 aa, Homo sapiens
GDTIDNLYKNRRYGPEFPGRLLLGTMPKVVSRSVVCSDTRDREEYDDGEKPLHVYYCLCGQMVLVLDCQLEKLPMRPRDRSRVIDAAKHAHKFCNTEDEETMYLRRPEGIERQYRKKCAKCGLPLFYQSQPKNAPVTFIVDGAVVKFGQGFGKTNIYTQKQEPPKKVMMTKRTKDMGKFSSVTVSTIDEEEEEIEAREVADSYAQNAKVIEKQLERKGMSKRRLQELAELEAKKAKMKGTLIDNQFK

SEQ ID NO: 864290 - protein, 222 aa, Homo sapiens; identical to SEQ ID NO: 864285

SEQ ID NO: 864291 - protein, 732 aa, Homo sapiens
MERQVLLSEPEEAAALYRGLSRQPALSAACLGPEVTTQYGGQYRTVHTEWTQRDLERMENIRFCRQYLVFHDGDSVVFAGPAGNSVETRGELLSRESPSGTMKAVLRKAGGTGPGEEKQFLEVWEKNRKLKSFNLSALEKHGPVYEDDCFGCLSWSHSETHLLYVAEKKRPKAESFFQTKALDVSASDDEIARLKKPDQAIKGDQFVFYEDWGENMVSKSIPVLCVLDVESGNISVLEGVPENVSPGQAFWAPGDAGVVFVGWWHEPFRLGIRFCTNRRSALYYVDLIGGKCELLSDDSLAVSSPRLSPDQCRIVYLQYPSLIPHHQCSQLCLYDWYTKVTSVVVDVVPRQLGENFSGIYCSLLPLGCWSADSQRVVFDSAQRSRQDLFAVDTQVGTVTSLTAGGSGGSWKLLTIDQDLMVAQFSTPSLPPTLKVGFLPSAGKEQSVLWVSLEEAEPIPDIHWGIRVLQPPPEQENVQYAGLDFEAILLQPGSPPDKTQVPMVVMPHGGPHSSFVTAWMLFPAMLCKMGFAVLLVNYRGSTGFGQDSILSLPGNVGHQDVKDVQFAVEQVLQEEHFDASHVALMGGSHGGFISCHLIGQYPETYRACVARNPVINIASMLGSTDIPDWCVVEAGFPFSSDCLPDLSVWAEMLDKSPIRYIPQVKTPLLLMLGQEDRRVPFKQGMEYYRALKTRNVPVRLLLYPKSTHALSEVEVESDSFMNAVLWLRTHLGS

SEQ ID NO: 864292 - protein, 148 aa, Homo sapiens
TRPSSPKGTMKAVLRKAGGTGPGEEKQFLEVWEKNRKLKSFNLSALEKHGPVYEDDCFGCLSWSHSETHLLYVAEKKRPKAESFFQTKALDVSASDDEIARLKKPDQAIKVLVVNPRRPGRAALGLSVLPSHTVPVRPGEALAFRKQS

SEQ ID NO: 864293 - protein, 520 aa, Homo sapiens
MERQVLLSEPEEAAALYRGLSRQPALSAACLGPEVTTQYGGQYRTVHTEWTQRDLERMENIRFCRQYLVFHDGDSVVFAGPAGNSVETRGELLSRESPSGTMKAVLRKAGGTGPGEEKQFLEVWEKNRKLKSFNLSALEKHGPVYEDDCFGCLSWSHSETHLLYVAEKKRPKAESFFQTKALDVSASDDEIARLKKPDQAIKGDQFVFYEDWGENMVSKSIPVLCVLDVESGNISVLEGVPENVSPGQAFWAPGDAGVVFVGWWHEPFRLGIRFCTNRRSALYYVDLIGGKCELLSDDSLAVSSPRLSPDQCRIVYLQYPSLIPHHQCSQLCLYDWYTKVTSVVVDVVPRQLGENFSGIYCSLLPLGCWSADSQRVVFDSAQRSRQDLFAVDTQVGTVTSLTAGGSGGSWKLLTIDQDLMVAQFSTPSLPPTLKVGFLPSAGKEQSVLWVSLEEAEPIPDIHWGIRVLQPPPEQENVQYAGLDFEAILLQPGSPPDKTQVPMVVMPHASSPSQAMWATRM

SEQ ID NO: 864294 - protein, 757 aa, Homo sapiens
MERQVRARPAVPVVPAARAGPDPGVSPAQVLLSEPEEAAALYRGLSRQPALSAACLGPEVTTQYGGQYRTVHTEWTQRDLERMENIRFCRQYLVFHDGDSVVFAGPAGNSVETRGELLSRESPSGTMKAVLRKAGGTGPGEEKQFLEVWEKNRKLKSFNLSALEKHGPVYEDDCFGCLSWSHSETHLLYVAEKKRPKAESFFQTKALDVSASDDEIARLKKPDQAIKGDQFVFYEDWGENMVSKSIPVLCVLDVESGNISVLEGVPENVSPGQAFWAPGDAGVVFVGWWHEPFRLGIRFCTNRRSALYYVDLIGGKCELLSDDSLAVSSPRLSPDQCRIVYLQYPSLIPHHQCSQLCLYDWYTKVTSVVVDVVPRQLGENFSGIYCSLLPLGCWSADSQRVVFDSAQRSRQDLFAVDTQVGTVTSLTAGGSGGSWKLLTIDQDLMVAQFSTPSLPPTLKVGFLPSAGKEQSVLWVSLEEAEPIPDIHWGIRVLQPPPEQENVQYAGLDFEAILLQPGSPPDKTQVPMVVMPHGGPHSSFVTAWMLFPAMLCKMGFAVLLVNYRGSTGFGQDSILSLPGNVGHQDVKDVQFAVEQVLQEEHFDASHVALMGGSHGGFISCHLIGQYPETYRACVARNPVINIASMLGSTDIPDWCVVEAGFPFSSDCLPDLSVWAEMLDKSPIRYIPQVKTPLLLMLGQEDRRVPFKQGMEYYRALKTRNVPVRLLLYPKSTHALSEVEVESDSFMNAVLWLRTHLGS

SEQ ID NO: 864295 - protein, 729 aa, Homo sapiens
MVLLSEPEEAAALYRGLSRQPALSAACLGPEVTTQYGGQYRTVHTEWTQRDLERMENIRFCRQYLVFHDGDSVVFAGPAGNSVETRGELLSRESPSGTMKAVLRKAGGTGPGEEKQFLEVWEKNRKLKSFNLSALEKHGPVYEDDCFGCLSWSHSETHLLYVAEKKRPKAESFFQTKALDVSASDDEIARLKKPDQAIKGDQFVFYEDWGENMVSKSIPVLCVLDVESGNISVLEGVPENVSPGQAFWAPGDAGVVFVGWWHEPFRLGIRFCTNRRSALYYVDLIGGKCELLSDDSLAVSSPRLSPDQCRIVYLQYPSLIPHHQCSQLCLYDWYTKVTSVVVDVVPRQLGENFSGIYCSLLPLGCWSADSQRVVFDSAQRSRQDLFAVDTQVGTVTSLTAGGSGGSWKLLTIDQDLMVAQFSTPSLPPTLKVGFLPSAGKEQSVLWVSLEEAEPIPDIHWGIRVLQPPPEQENVQYAGLDFEAILLQPGSPPDKTQVPMVVMPHGGPHSSFVTAWMLFPAMLCKMGFAVLLVNYRGSTGFGQDSILSLPGNVGHQDVKDVQFAVEQVLQEEHFDASHVALMGGSHGGFISCHLIGQYPETYRACVARNPVINIASMLGSTDIPDWCVVEAGFPFSSDCLPDLSVWAEMLDKSPIRYIPQVKTPLLLMLGQEDRRVPFKQGMEYYRALKTRNVPVRLLLYPKSTHALSEVEVESDSFMNAVLWLRTHLGS

SEQ ID NO: 864296 - protein, 631 aa, Homo sapiens
MKAVLRKAGGTGPGEEKQFLEVWEKNRKLKSFNLSALEKHGPVYEDDCFGCLSWSHSETHLLYVAEKKRPKAESFFQTKALDVSASDDEIARLKKPDQAIKGDQFVFYEDWGENMVSKSIPVLCVLDVESGNISVLEGVPENVSPGQAFWAPGDAGVVFVGWWHEPFRLGIRFCTNRRSALYYVDLIGGKCELLSDDSLAVSSPRLSPDQCRIVYLQYPSLIPHHQCSQLCLYDWYTKVTSVVVDVVPRQLGENFSGIYCSLLPLGCWSADSQRVVFDSAQRSRQDLFAVDTQVGTVTSLTAGGSGGSWKLLTIDQDLMVAQFSTPSLPPTLKVGFLPSAGKEQSVLWVSLEEAEPIPDIHWGIRVLQPPPEQENVQYAGLDFEAILLQPGSPPDKTQVPMVVMPHGGPHSSFVTAWMLFPAMLCKMGFAVLLVNYRGSTGFGQDSILSLPGNVGHQDVKDVQFAVEQVLQEEHFDASHVALMGGSHGGFISCHLIGQYPETYRACVARNPVINIASMLGSTDIPDWCVVEAGFPFSSDCLPDLSVWAEMLDKSPIRYIPQVKTPLLLMLGQEDRRVPFKQGMEYYRALKTRNVPVRLLLYPKSTHALSEVEVESDSFMNAVLWLRTHLGS

SEQ ID NO: 864297 - protein, 640 aa, Homo sapiens
TRPSSPKGTMKAVLRKAGGTGPGEEKQFLEVWEKNRKLKSFNLSALEKHGPVYEDDCFGCLSWSHSETHLLYVAEKKRPKAESFFQTKALDVSASDDEIARLKKPDQAIKGDQFVFYEDWGENMVSKSIPVLCVLDVESGNISVLEGVPENVSPGQAFWAPGDAGVVFVGWWHEPFRLGIRFCTNRRSALYYVDLIGGKCELLSDDSLAVSSPRLSPDQCRIVYLQYPSLIPHHQCSQLCLYDWYTKVTSVVVDVVPRQLGENFSGIYCSLLPLGCWSADSQRVVFDSAQRSRQDLFAVDTQVGTVTSLTAGGSGGSWKLLTIDQDLMVAQFSTPSLPPTLKVGFLPSAGKEQSVLWVSLEEAEPIPDIHWGIRVLQPPPEQENVQYAGLDFEAILLQPGSPPDKTQVPMVVMPHGGPHSSFVTAWMLFPAMLCKMGFAVLLVNYRGSTGFGQDSILSLPGNVGHQDVKDVQFAVEQVLQEEHFDASHVALMGGSHGGFISCHLIGQYPETYRACVARNPVINIASMLGSTDIPDWCVVEAGFPFSSDCLPDLSVWAEMLDKSPIRYIPQVKTPLLLMLGQEDRRVPFKQGMEYYRALKTRNVPVRLLLYPKSTHALSEVEVESDSFMNAVLWLRTHLGS

SEQ ID NO: 864298 - protein, 686 aa, Homo sapiens
MERQVLLSEPEEAAALYRGLSRQPALSAACLGPEVTTQYGGQYRTVHTEWTQRDLERMENIRFCRQYLVFHDGDSVVFAGPAGNSVETRGELLSRESPSGTMKAVLRKAGGTGPGEEKQFLEVWEKNRKLKSFNLSALEKHGPVYEDDCFGCLSWSHSETHLLYVAEKKRPKAESFFQTKALDVSASDDEIARLKKPDQAIKAFWAPGDAGVVFVGWWHEPFRLGIRFCTNRRSALYYVDLIGGKCELLSDDSLAVSSPRLSPDQCRIVYLQYPSLIPHHQCSQLCLYDWYTKVTSVVVDVVPRQLGENFSGIYCSLLPLGCWSADSQRVVFDSAQRSRQDLFAVDTQVGTVTSLTAGGSGGSWKLLTIDQDLMVAQFSTPSLPPTLKVGFLPSAGKEQSVLWVSLEEAEPIPDIHWGIRVLQPPPEQENVQYAGLDFEAILLQPGSPPDKTQVPMVVMPHGGPHSSFVTAWMLFPAMLCKMGFAVLLVNYRGSTGFGQDSILSLPGNVGHQDVKDVQFAVEQVLQEEHFDASHVALMGGSHGGFISCHLIGQYPETYRACVARNPVINIASMLGSTDIPDWCVVEAGFPFSSDCLPDLSVWAEMLDKSPIRYIPQVKTPLLLMLGQEDRRVPFKQGMEYYRALKTRNVPVRLLLYPKSTHALSEVEVESDSFMNAVLWLRTHLGS

SEQ ID NO: 864299 - protein, 744 aa, Homo sapiens
MERQVLLSEPEEAAALYRGLSRQPALSAACLGPEVTTQYGGQYRTVHTEWTQRDLERMENIRFCRQYLVFHDGDSVVFAGPAGNSVETRGELLSRESPSGTMKAVLRKAGGTGPGEEKQFLEVWEKNRKLKSFNLSALEKHGPVYEDDCFGCLSWSHSETHLLYVAEKKRPKAESFFQTKALDVSASDDEIARLKKPDQAIKGDQFVFYEDWGENMVSKSIPVLCVLDVESGNISVLEGVPENVSPGQAFWAPGDAGVVFVGWWHEPFRLGIRFCTNRRSALYYVDLIGGKCELLSDDSLAVSSPRLSPDQCRIVYLQYPSLIPHHQCSQLCLYDWYTKVTSVVVDVVPRQLGENFSGIYCSLLPLGCWSADSQRVVFDSAQRSRQDLFAVDTQVGTVTSLTAGGSGGSWKLLTIDQDLMVAQFSTPSLPPTLKVGFLPSAGKEQSVLWVSLEEAEPIPDIHWGIRVLQPPPEQENVQYAGLDFEAILLQPGSPPDKTQVPMVVMPHGGPHSSFVTAWMLFPAMLCKMGFAVLLVNYRGSTGFGQDSILSLPGNVGHQDVKDVQFAVEQVLQEEHFDASHVALMGGSHGGFISCHLIGQYPETYRACVARNPVINIASMLGSTDIPDWCVVEAGFPFSSDCLPDLSVWAEMLDKSPIRYIPQVKTPLLLMLGQEDRRVPFKQGMEYYRALKTRNVPVRHMASRLGLTQSHDLVNPVHKHRDTREDSWPAGPCAYSVGDYNSFQD

SEQ ID NO: 864300 - protein, 757 aa, Homo sapiens; identical to SEQ ID NO: 864294

SEQ ID NO: 864301 - protein, 491 aa, Homo sapiens
MGLFMRMAFWAPGDAGVVFVGWWHEPFRLGIRFCTNRRSALYYVDLIGGKCELLSDDSLAVSSPRLSPDQCRIVYLQYPSLIPHHQCSQLCLYDWYTKVTSVVVDVVPRQLGENFSGIYCSLLPLGCWSADSQRVVFDSAQRSRQDLFAVDTQVGTVTSLTAGGSGGSWKLLTIDQDLMVAQFSTPSLPPTLKVGFLPSAGKEQSVLWVSLEEAEPIPDIHWGIRVLQPPPEQENVQYAGLDFEAILLQPGSPPDKTQVPMVVMPHGGPHSSFVTAWMLFPAMLCKMGFAVLLVNYRGSTGFGQDSILSLPGNVGHQDVKDVQFAVEQVLQEEHFDASHVALMGGSHGGFISCHLIGQYPETYRACVARNPVINIASMLGSTDIPDWCVVEAGFPFSSDCLPDLSVWAEMLDKSPIRYIPQVKTPLLLMLGQEDRRVPFKQGMEYYRALKTRNVPVRLLLYPKSTHALSEVEVESDSFMNAVLWLRTHLGS

SEQ ID NO: 864302 - protein, 423 aa, Homo sapiens
MTGTQWCLQDPSLIPHHQCSQLCLYDWYTKVTSVVVDVVPRQLGENFSGIYCSLLPLGCWSADSQRVVFDSAQRSRQDLFAVDTQVGTVTSLTAGGSGGSWKLLTIDQDLMVAQFSTPSLPPTLKVGFLPSAGKEQSVLWVSLEEAEPIPDIHWGIRVLQPPPEQENVQYAGLDFEAILLQPGSPPDKTQVPMVVMPHGGPHSSFVTAWMLFPAMLCKMGFAVLLVNYRGSTGFGQDSILSLPGNVGHQDVKDVQFAVEQVLQEEHFDASHVALMGGSHGGFISCHLIGQYPETYRACVARNPVINIASMLGSTDIPDWCVVEAGFPFSSDCLPDLSVWAEMLDKSPIRYIPQVKTPLLLMLGQEDRRVPFKQGMEYYRALKTRNVPVRLLLYPKSTHALSEVEVESDSFMNAVLWLRTHLGS

SEQ ID NO: 864303 - protein, 296 aa, Homo sapiens
  misc_feature (2)..(2): Xaa can be any naturally occurring amino acid
SXACSWYTVRAELVEVDVDVDQQVTKWGIRVLQPPPEQENVQYAGLDFEAILLQPGSPPDKTQVPMVVMPHGGPHSSFVTAWMLFPAMLCKMGFAVLLVNYRGSTGFGQDSILSLPGNVGHQDVKDVQFAVEQVLQEEHFDASHVALMGGSHGGFISCHLIGQYPETYRACVARNPVINIASMLGSTDIPDWCVVEAGFPFSSDCLPDLSVWAEMLDKSPIRYIPQVKTPLLLMLGQEDRRVPFKQGMEYYRALKTRNVPVRLLLYPKSTHALSEVEVESDSFMNAVLWLRTHLGS

SEQ ID NO: 864304 - protein, 435 aa, Homo sapiens
MERQVLLSEPEEAAALYRGLSRQPALSAACLGPEVTTQYGGQYRTVHTEWTQRDLERMENIRFCRQYLVFHDGDSVVFAGPAGNSVETRGELLSRESPSGTMKAVLRKAGGTGPGEEKQFLEVWEKNRKLKSFNLSALEKHGPVYEDDCFGCLSWSHSETHLLYVAEKKRPKAESFFQTKALDVSASDDEIARLKKPDQAIKGDQFVFYEDWGENMVSKSIPVLCVLDVESGNISVLEGVPENVSPGQAFWAPGDAGVVFVGWWHEPFRLGIRFCTNRRSALYYVDLIGGKCELLSDDSLAVSSPRLSPDQCRIVYLQYPSLIPHHQCSQLCLYDWYTKVTSVVVDVVPRQLGENFSGIYCSLLPLGCWSADSQRVVFDSAQRSRQGPVLLVGQPKWALVTSLHKLEGSQVGTGNCHTLAQNSWGPDYTTQLLKP

SEQ ID NO: 864305 - protein, 265 aa, Homo sapiens
MVELVCIGRGSYAGLDFEAILLQPGSPPDKTQVPMVVMPHGGPHSSFVTAWMLFPAMLCKMGFAVLLVNYRGSTGFGQDSILSLPGNVGHQDVKDVQFAVEQVLQEEHFDASHVALMGGSHGGFISCHLIGQYPETYRACVARNPVINIASMLGSTDIPDWCVVEAGFPFSSDCLPDLSVWAEMLDKSPIRYIPQVKTPLLLMLGQEDRRVPFKQGMEYYRALKTRNVPVRLLLYPKSTHALSEVEVESDSFMNAVLWLRTHLGS

SEQ ID NO: 864306 - protein, 149 aa, Homo sapiens
MGGSHGGFISCHLIGQYPETYRACVARNPVINIASMLGSTDIPDWCVVEAGFPFSSDCLPDLSVWAEMLDKSPIRYIPQVKTPLLLMLGQEDRRVPFKQGMEYYRALKTRNVPVRLLLYPKSTHALSEVEVESDSFMNAVLWLRTHLGS

SEQ ID NO: 864307 - protein, 142 aa, Homo sapiens
YKPNRGWWEPRLTVRVVEFGQERRAGGEAHRGTVEPCGLVDQTPGGVSLFHWQLCDVWAEMLDKSPIRYIPQVKTPLLLMLGQEDRRVPFKQGMEYYRALKTRNVPVRLLLYPKSTHALSEVEVESDSFMNAVLWLRTHLGS

SEQ ID NO: 864308 - protein, 288 aa, Homo sapiens
MKAVLRKAGGTGPGEEKQFLEVWEKNRKLKSFNLSALEKHGPVYEDDCFGCLSWSHSETHLLYVAEKKRPKAESFFQTKALDVSASDDEIARLKKPDQAIKAFWAPGDAGVVFVGWWHEPFRLGIRFCTNRRSALYYVDLIGGKCELLSDDSLAVSSPRLSPDQCRIVYLQYPSLIPHHQCSQLCLYDWYTKVTSVVVDVVPRQLGENFSGIYCSLLPLGCWSADSQRVVFDSAQRSRQGPVLLVGQPKWALVTSLHKLEGSQVGTGNCHTLAQNSWGPDYTTQLLKP

SEQ ID NO: 864309 - protein, 156 aa, Homo sapiens
GTRLNPFSRRPFYPPRSRAPGFRFHRAAPSPPRSNASPLGKRPRTQPTAPPPTWLVRPWRDPCSHPPRTSRSQAGSSHRQGPPPANGPHPLAEGPAPHRLPQGRGGDSPGRPRLRPRKPHFRARARPASPRRQRGDYGTSGAAERARGGGGSVSGP

SEQ ID NO: 864310 - protein, 175 aa, Homo sapiens
RPNHLWLEDPGPKKIGLIQASVTTPHPECCCCRMGFPDEGRRSMSLLGSMCHGVDYLGQVSDPEVSPTPAARDGALVGEAPRLTLLTAALSLQPGLDFEAILLQPGSPPDKTQVPMVVMPHEASGVKSPCPPSPLPSWPFHPPLPVCRGAPFILCHCLDAVPSHALQDGLCGTTR

SEQ ID NO: 864311 - protein, 732 aa, Homo sapiens; identical to SEQ ID NO: 864291

SEQ ID NO: 864312 - protein, 732 aa, Homo sapiens; identical to SEQ ID NO: 864291

SEQ ID NO: 864313 - protein, 740 aa, Homo sapiens
MSLDEIGRGERQVLLSEPEEAAALYRGLSRQPALSAACLGPEVTTQYGGQYRTVHTEWTQRDLERMENIRFCRQYLVFHDGDSVVFAGPAGNSVETRGELLSRESPSGTMKAVLRKAGGTGPGEEKQFLEVWEKNRKLKSFNLSALEKHGPVYEDDCFGCLSWSHSETHLLYVAEKKRPKAESFFQTKALDVSASDDEIARLKKPDQAIKGDQFVFYEDWGENMVSKSIPVLCVLDVESGNISVLEGVPENVSPGQAFWAPGDAGVVFVGWWHEPFRLGIRFCTNRRSALYYVDLIGGKCELLSDDSLAVSSPRLSPDQCRIVYLQYPSLIPHHQCSQLCLYDWYTKVTSVVVDVVPRQLGENFSGIYCSLLPLGCWSADSQRVVFDSAQRSRQDLFAVDTQVGTVTSLTAGGSGGSWKLLTIDQDLMVAQFSTPSLPPTLKVGFLPSAGKEQSVLWVSLEEAEPIPDIHWGIRVLQPPPEQENVQYAGLDFEAILLQPGSPPDKTQVPMVVMPHGGPHSSFVTAWMLFPAMLCKMGFAVLLVNYRGSTGFGQDSILSLPGNVGHQDVKDVQFAVEQVLQEEHFDASHVALMGGSHGGFISCHLIGQYPETYRACVARNPVINIASMLGSTDIPDWCVVEAGFPFSSDCLPDLSVWAEMLDKSPIRYIPQVKTPLLLMLGQEDRRVPFKQGMEYYRALKTRNVPVRLLLYPKSTHALSEVEVESDSFMNAVLWLRTHLGS

SEQ ID NO: 864314 - protein, 732 aa, Homo sapiens; identical to SEQ ID NO: 864291

SEQ ID NO: 864315 - protein, 723 aa, Homo sapiens
GTRLNPFSRRPFYPPRSRAPGFRFHRAAPSPPRSNASPLEWTQRDLERMENIRFCRQYLVFHDGDSVVFAGPAGNSVETRGELLSRESPSGTMKAVLRKAGGTGPGEEKQFLEVWEKNRKLKSFNLSALEKHGPVYEDDCFGCLSWSHSETHLLYVAEKKRPKAESFFQTKALDVSASDDEIARLKKPDQAIKGDQFVFYEDWGENMVSKSIPVLCVLDVESGNISVLEGVPENVSPGQAFWAPGDAGVVFVGWWHEPFRLGIRFCTNRRSALYYVDLIGGKCELLSDDSLAVSSPRLSPDQCRIVYLQYPSLIPHHQCSQLCLYDWYTKVTSVVVDVVPRQLGENFSGIYCSLLPLGCWSADSQRVVFDSAQRSRQDLFAVDTQVGTVTSLTAGGSGGSWKLLTIDQDLMVAQFSTPSLPPTLKVGFLPSAGKEQSVLWVSLEEAEPIPDIHWGIRVLQPPPEQENVQYAGLDFEAILLQPGSPPDKTQVPMVVMPHGGPHSSFVTAWMLFPAMLCKMGFAVLLVNYRGSTGFGQDSILSLPGNVGHQDVKDVQFAVEQVLQEEHFDASHVALMGGSHGGFISCHLIGQYPETYRACVARNPVINIASMLGSTDIPDWCVVEAGFPFSSDCLPDLSVWAEMLDKSPIRYIPQVKTPLLLMLGQEDRRVPFKQGMEYYRALKTRNVPVRLLLYPKSTHALSEVEVESDSFMNAVLWLRTHLGS

SEQ ID NO: 864316 - protein, 682 aa, Homo sapiens
AQAPPPEASLPGASPRRRRLCIGDSVVFAGPAGNSVETRGELLSRESPSGTMKAVLRKAGGTGPGEEKQFLEVWEKNRKLKSFNLSALEKHGPVYEDDCFGCLSWSHSETHLLYVAEKKRPKAESFFQTKALDVSASDDEIARLKKPDQAIKGDQFVFYEDWGENMVSKSIPVLCVLDVESGNISVLEGVPENVSPGQAFWAPGDAGVVFVGWWHEPFRLGIRFCTNRRSALYYVDLIGGKCELLSDDSLAVSSPRLSPDQCRIVYLQYPSLIPHHQCSQLCLYDWYTKVTSVVVDVVPRQLGENFSGIYCSLLPLGCWSADSQRVVFDSAQRSRQDLFAVDTQVGTVTSLTAGGSGGSWKLLTIDQDLMVAQFSTPSLPPTLKVGFLPSAGKEQSVLWVSLEEAEPIPDIHWGIRVLQPPPEQENVQYAGLDFEAILLQPGSPPDKTQVPMVVMPHGGPHSSFVTAWMLFPAMLCKMGFAVLLVNYRGSTGFGQDSILSLPGNVGHQDVKDVQFAVEQVLQEEHFDASHVALMGGSHGGFISCHLIGQYPETYRACVARNPVINIASMLGSTDIPDWCVVEAGFPFSSDCLPDLSVWAEMLDKSPIRYIPQVKTPLLLMLGQEDRRVPFKQGMEYYRALKTRNVPVRLLLYPKSTHALSEVEVESDSFMNAVLWLRTHLGS

SEQ ID NO: 864317 - protein, 667 aa, Homo sapiens
MSSHKGSVVAQGNGAPAGNSVETRGELLSRESPSGTMKAVLRKAGGTGPGEEKQFLEVWEKNRKLKSFNLSALEKHGPVYEDDCFGCLSWSHSETHLLYVAEKKRPKAESFFQTKALDVSASDDEIARLKKPDQAIKGDQFVFYEDWGENMVSKSIPVLCVLDVESGNISVLEGVPENVSPGQAFWAPGDAGVVFVGWWHEPFRLGIRFCTNRRSALYYVDLIGGKCELLSDDSLAVSSPRLSPDQCRIVYLQYPSLIPHHQCSQLCLYDWYTKVTSVVVDVVPRQLGENFSGIYCSLLPLGCWSADSQRVVFDSAQRSRQDLFAVDTQVGTVTSLTAGGSGGSWKLLTIDQDLMVAQFSTPSLPPTLKVGFLPSAGKEQSVLWVSLEEAEPIPDIHWGIRVLQPPPEQENVQYAGLDFEAILLQPGSPPDKTQVPMVVMPHGGPHSSFVTAWMLFPAMLCKMGFAVLLVNYRGSTGFGQDSILSLPGNVGHQDVKDVQFAVEQVLQEEHFDASHVALMGGSHGGFISCHLIGQYPETYRACVARNPVINIASMLGSTDIPDWCVVEAGFPFSSDCLPDLSVWAEMLDKSPIRYIPQVKTPLLLMLGQEDRRVPFKQGMEYYRALKTRNVPVRLLLYPKSTHALSEVEVESDSFMNAVLWLRTHLGS

SEQ ID NO: 864318 - protein, 537 aa, Homo sapiens
MGLFMRMGDQFVFYEDWGENMVSKSIPVLCVLDVESGNISVLEGVPENVSPGQAFWAPGDAGVVFVGWWHEPFRLGIRFCTNRRSALYYVDLIGGKCELLSDDSLAVSSPRLSPDQCRIVYLQYPSLIPHHQCSQLCLYDWYTKVTSVVVDVVPRQLGENFSGIYCSLLPLGCWSADSQRVVFDSAQRSRQDLFAVDTQVGTVTSLTAGGSGGSWKLLTIDQDLMVAQFSTPSLPPTLKVGFLPSAGKEQSVLWVSLEEAEPIPDIHWGIRVLQPPPEQENVQYAGLDFEAILLQPGSPPDKTQVPMVVMPHGGPHSSFVTAWMLFPAMLCKMGFAVLLVNYRGSTGFGQDSILSLPGNVGHQDVKDVQFAVEQVLQEEHFDASHVALMGGSHGGFISCHLIGQYPETYRACVARNPVINIASMLGSTDIPDWCVVEAGFPFSSDCLPDLSVWAEMLDKSPIRYIPQVKTPLLLMLGQEDRRVPFKQGMEYYRALKTRNVPVRLLLYPKSTHALSEVEVESDSFMNAVLWLRTHLGS

SEQ ID NO: 864319 - protein, 698 aa, Homo sapiens
MERQVLLSEPEEAAALYRGLSRQPALSAACLGPEVTTQYGGQYRTVHTEWTQRDLERMENIRFCRQYLVFHDGDSVVFAGPAGNSVETRGELLSRESPSGTMKAVLRKAGGTGPGEEKQFLEVWEKNRKLKSFNLSALEKHGPVYEDDCFGCLSWSHSETHLLYVAEKKRPKAESFFQTKALDVSASDDEIARLKKPDQAIKGDQFVFYEDWGENMVSKSIPVLCVLDVESGNISVLEGVPENVSPGQAFWAPGDAGVVFVGWWHEPFRLGIRFCTNRRSALYYVDLIGGKCELLSDDSLAVSSPRLSPDQCRIVYLQYPSLIPHHQCSQLCLYDWYTKVTSVVVDVVPRQLGENFSGIYCSLLPLGCWSADSQRVVFDSAQRSRQDLFAVDTQVGTVTSLTAGGSGGSWKLLTIDQDLMVAQFSTPSLPPTLKVGFLPSAGKEQSVLWVSLEEAEPIPDIHWGIRVLQPPPEQENVQYAGLDFEAILLQPGSPPDKTQVPMVVMPHGGPHSSFVTAWMLFPAMLCKMGFAVLLVNYRGSTGFGQDSILSLPGNVGHQDVKDVQFAVEQVLQEEHFDASHVALMGGSHGGFISCHLIGQYPETYRACVARNPVINIASMLGSTDIPDWCVVEAGFPFSSDCLPDLSVWAEMLDKSPIRYIPQVKTPLLLMLGQEDRRVPFKQGMEYYRALKTRNVPVR

SEQ ID NO: 864320 - protein, 712 aa, Homo sapiens
MERQVLLSEPEEAAALYRGLSRQPALSAACLGPEVTTQYGGQYRTVHTEWTQRDLERMENIRFCRQYLVFHDGDSVVFAGPAGNSVETRGELLSRESPSGTMKAVLRKAGGTGPGEEKQFLEVWEKNRKLKSFNLSALEKHGPVYEDDCFGCLSWSHSETHLLYVAEKKRPKAESFFQTKALDVSASDDEIARLKKPDQAIKGDQFVFYEDWGENMVSKSIPVLCVLDVESGNISVLEGVPENVSPGQAFWAPGDAGVVFVGWWHEPFRLGIRFCTNRRSALYYVDLIGGKCELLSDDSLAVSSPRLSPDQCRIVYLQYPSLIPHHQCSQLCLYDWYTKVTSVVVDVVPRQLGENFSGIYCSLLPLGCWSADSQRVVFDSAQRSRQDLFAVDTQVGTVTSLTAGGSGGSWKLLTIDQDLMVAQFSTPSLPPTLKVGFLPSAGKEQSVLWVSLEEAEPIPDIHWGIRVLQPPPEQENVQYAGLDFEAILLQPGSPPDKTQVPMVVMPHGGPHSSFVTAWMLFPAMLCKMGFAVLLVNYRGSTGFGQDSILSLPGNVGHQDVKDVQFAVEQVLQEEHFDASHVALMGGSHGGFISCHLIGQYPETYRACVARNPVINIASMLGSTDIPDWCVVEAGFPFSSDCLPDLSVWAEMLDKSPIRYIPQVKTPLLLMLGQEDRRVPFKQGMEYYRALKSEVWHRLISSCRMAGLQLPST

SEQ ID NO: 864321 - protein, 574 aa, Homo sapiens
SRKVEARVFGVWEKNRKLKSFNLSALEKHGPVYEDDCFGCLSWSHSETHLLYVAEKKRPKAESFFQTKALDVSASDDEIARLKKPDQAIKAFWAPGDAGVVFVGWWHEPFRLGIRFCTNRRSALYYVDLIGGKCELLSDDSLAVSSPRLSPDQCRIVYLQYPSLIPHHQCSQLCLYDWYTKVTSVVVDVVPRQLGENFSGIYCSLLPLGCWSADSQRVVFDSAQRSRQDLFAVDTQVGTVTSLTAGGSGGSWKLLTIDQDLMVAQFSTPSLPPTLKVGFLPSAGKEQSVLWVSLEEAEPIPDIHWGIRVLQPPPEQENVQYAGLDFEAILLQPGSPPDKTQVPMVVMPHGGPHSSFVTAWMLFPAMLCKMGFAVLLVNYRGSTGFGQDSILSLPGNVGHQDVKDVQFAVEQVLQEEHFDASHVALMGGSHGGFISCHLIGQYPETYRACVARNPVINIASMLGSTDIPDWCVVEAGFPFSSDCLPDLSVWAEMLDKSPIRYIPQVKTPLLLMLGQEDRRVPFKQGMEYYRALKTRNVPVRLLLYPKSTHALSEVEVESDSFMNAVLWLRTHLGS

SEQ ID NO: 864322 - protein, 503 aa, Homo sapiens
MERQVLLSEPEEAAALYRGLSRQPALSAACLGPEVTTQYGGQYRTVHTEWTQRDLERMENIRFCRQYLVFHDGDSVVFAGPAGNSVETRGELLSRESPSGTMKAVLRKAGGTGPGEEKQFLEVWEKNRKLKSFNLSALEKHGPVYEDDCFGCLSWSHSETHLLYVAEKKRPKAESFFQTKALDVSASDDEIARLKKPDQAIKGDQFVFYEDWGENMVSKSIPVLCVLDVESGNISVLEGVPENVSPGQAFWAPGDAGVVFVGWWHEPFRLGIRFCTNRRSALYYVDLIGGKCELLSDDSLAVSSPRLSPDQCRIVYLQYPSLIPHHQCSQLCLYDWYTKVTSVVVDVVPRQLGENFSGIYCSLLPLGCWSADSQRVVFDSAQRSRQDLFAVDTQVGTVTSLTAGGSGGSWKLLTIDQDLMVAQFSTPSLPPTLKVGFLPSAGKEQSVLWVSLEEAEPIPDIHWGIRVLQPPPEQENVQYVRQLHECCALATHTLGQLKPCHSA

SEQ ID NO: 864323 - protein, 436 aa, Homo sapiens
MERQVLLSEPEEAAALYRGLSRQPALSAACLGPEVTTQYGGQYRTVHTEWTQRDLERMENIRFCRQYLVFHDGDSVVFAGPAGNSVETRGELLSRESPSGTMKAVLRKAGGTGPGEEKQFLEVWEKNRKLKSFNLSALEKHGPVYEDDCFGCLSWSHSETHLLYVAEKKRPKAESFFQTKALDVSASDDEIARLKKPDQAIKGDQFVFYEDWGENMVSKSIPVLCVLDVESGNISVLEGVPENVSPGQAFWAPGDAGVVFVGWWHEPFRLGIRFCTNRRSALYYVDLIGGKCELLSDDSLAVSSPRLSPDQCRIVYLQYPSLIPHHQCSQLCLYDWYTKVTSVVVDVVPRQLGEELFWDPTAGFCLGDAWSVTGSRVGSDSVQTQPVRTCWLWTPTWALGPGQTVRASCTGSCHHLAGPLGSKFHTHLHQPRNGIT

SEQ ID NO: 864324 - protein, 276 aa, Homo sapiens
  misc_feature (2)..(2): Xaa can be any naturally occurring amino acid
VXASILQAAAGLLQSQGQHTAHSPGLDFEAILLQPGSPPDKTQVPMVVMPHGGPHSSFVTAWMLFPAMLCKMGFAVLLVNYRGSTGFGQDSILSLPGNVGHQDVKDVQFAVEQVLQEEHFDASHVALMGGSHGGFISCHLIGQYPETYRACVARNPVINIASMLGSTDIPDWCVVEAGFPFSSDCLPDLSVWAEMLDKSPIRYIPQVKTPLLLMLGQEDRRVPFKQGMEYYRALKTRNVPVRLLLYPKSTHALSEVEVESDSFMNAVLWLRTHLGS

SEQ ID NO: 864325 - protein, 323 aa, Homo sapiens
MERQVLLSEPEEAAALYRGLSRQPALSAACLGPEVTTQYGGQYRTVHTEWTQRDLERMENIRFCRQYLVFHDGDSVVFAGPAGNSVETRGELLSRESPSGTMKAVLRKAGGTGPGEEKQFLEVWEKNRKLKSFNLSALEKHGPVYEDDCFGCLSWSHSETHLLYVAEKKRPKAESFFQTKALDVSASDDEIARLKKPDQAIKGDQFVFYEDWGENMVSKSIPVLCVLDVESGNISVLEGVPENVSPGQAFWAPGDAGVVFVGWWHEPFRLGIRFCTNRRFSLYYVDLIGGSVSSSGVTPGGPLPVDPDMLLGTGGHFGPFMGV

SEQ ID NO: 864326 - protein, 115 aa, Homo sapiens
SINRTGFHINCDLILNSEAPNPCLIRLCNTTNDQYEIRPLTDAQVCVVEAGFPFSSDCLPDLSVWAEMLDKSPIRYIPQVKTPLLLMLGQEDRRVPFKQGMEYYRALKTRNVPVR

SEQ ID NO: 864327 - protein, 127 aa, Homo sapiens
MERQVLLSEPEEAAALYRGLSRQPALSAACLGPEVTTQYGGQYRTVHTGVCAEGELEGMEYYRALKTRNVPVRLLLYPKSTHALSEVEVESDSFMNAGQIAHQIHPSGEDTTVTDVGQEDRLPFCMS

SEQ ID NO: 864328 - protein, 338 aa, Homo sapiens
MNSLSEANTKFMFDLFQQFRKSKENNIFYSPISITSALGMVLLGAKDNTAQQIKKVLHFDQVTENTTGKAATYHVDRSGNVHHQFQKLLTEFNKSTDAYELKIANKLFGEKTYLFLQEYLDAIKKFYQTSVESVDFANAPEESRKKINSWVESQTNEKIKNLIPEGNIGSNTTLVLVNAIYFKGQWEKKFNKEDTKEEKFWPNKLEEKLTAEKLMEWTSLQNMRETRVDLHLPRFKVEESYDLKDTLRTMGMVDIFNGDADLSGMTGSRGLVLSGVLHKAFVEVTEEGAEAAAATAVVGFGSSPTSTNEEFHCNHPFLFFIRQNKTNSILFYGRFSSP

SEQ ID NO: 864329 - protein, 390 aa, Homo sapiens
MNSLSEANTKFMFDLFQQFRKSKENNIFYSPISITSALGMVLLGAKDNTAQQIKKVLHFDQVTENTTGKAATYHVDRSGNVHHQFQKLLTEFNKSTDAYELKIANKLFGEKTYLFLQEYLDAIKKFYQTSVESVDFANAPEESRKKINSWVESQTNEKIKNLIPEGNIGSNTTLVLVNAIYFKGQWEKKFNKEDTKEEKFWPNKNTYKSIQMMRQYTSFHFASLEDVQAKVLEIPYKGKDLSMIVLLPNEIDGLQKLEEKLTAEKLMEWTSLQNMRETRVDLHLPRFKVEESYDLKDTLRTMGMVDIFNGDADLSGMTGSRGLVLSGVLHKAFVEVTEEGAEAAAATAVVGFGSSPTSTNEEFHCNHPFLFFIRQNKTNSILFYGRFSSP

SEQ ID NO: 864330 - protein, 390 aa, Homo sapiens; identical to SEQ ID NO: 864329

SEQ ID NO: 864331 - protein, 96 aa, Homo sapiens
TLEDPLGSYNSAQQIKKVLHFDQVTENTTGKAATYHVDRSGNVHHQFQKLLTEFNKSTDAYELKIANKLFGEKTYLFLQEYLDAIKKFYQILRGPY

SEQ ID NO: 864332 - protein, 140 aa, Homo sapiens
MNSLSEANTKFMFDLFQQFRKSKENNIFYSPISITSALGMVLLGAKDNTAQQIKKVLHFDQVTENTTGKAATYHVDRSGNVHHQFQKLLTEFNKSTDAYELKIANKLFGEKTYLFLQKYLDASKKFYQTSVGSRMVISLS

SEQ ID NO: 864333 - protein, 176 aa, Homo sapiens
SRMLGKWFCSFVGGLELIVNLLKSDNKEVLASVCAAITNIAKDQENLAVITDHGVVPLLSKLANTNNNKLRHHLAEAISRCCMWGRNRVAFGEHKAVAPLVRYLKSNDTNVHRATAQALYQLSEDADNCITMHENGAVKLLLDMVGSPDQDLQEAAAGCISNIRRLALATEKARYT

SEQ ID NO: 864334 - protein, 176 aa, Homo sapiens; identical to SEQ ID NO: 864333

SEQ ID NO: 864335 - protein, 176 aa, Homo sapiens; identical to SEQ ID NO: 864333

SEQ ID NO: 864336 - protein, 254 aa, Homo sapiens
RPLAPASSPASRLAASPPCHPAALPPCRPAALPPCRPAAGGRCPWCSVAPATSRPPVRRERLGYNMLGMIKNSLFGSVETWPWQVLSKGDKEEVAYEERACEGGKFATVEVTDKPVDEALREAMPKVAKYAGGTNDKGIGMGMTVPISFAVFPNEDGSLQKKLKVWFRIPNQFQSDPPAPSDKSVKIEEREGITVYSMQFGGYAKEADYVAQATRLRAALEGTATYRGDIYFCTGYDPPMKPYGRRNEIWLLKT

SEQ ID NO: 864337 - protein, 73 aa, Homo sapiens
ISSMILTTIIKKKKPPRQFGGYAKEADYVAQATRLRAALEGTATYRGDIYFCTGYDPPMKPYGRRNEIWLLKT

SEQ ID NO: 864338 - protein, 254 aa, Homo sapiens; identical to SEQ ID NO: 864336

SEQ ID NO: 864339 - protein, 254 aa, Homo sapiens; identical to SEQ ID NO: 864336

SEQ ID NO: 864340 - protein, 254 aa, Homo sapiens; identical to SEQ ID NO: 864336

SEQ ID NO: 864341 - protein, 254 aa, Homo sapiens; identical to SEQ ID NO: 864336

SEQ ID NO: 864342 - protein, 254 aa, Homo sapiens; identical to SEQ ID NO: 864336

SEQ ID NO: 864343 - protein, 254 aa, Homo sapiens; identical to SEQ ID NO: 864336

SEQ ID NO: 864344 - protein, 74 aa, Homo sapiens
GSQMCDRKNNNHNNISGQYKLSYAFEADYVAQATRLRAALEGTATYRGDIYFCTGYDPPMKPYGRRNEIWLLKT

SEQ ID NO: 864345 - protein, 198 aa, Homo sapiens
RPLAPASSPASRLAASPPCHPAALPPCRPAALPPCRPAAGGRCPWCSVAPATSRPPVRRERLGYNMLGMIKNSLFGSVETWPWQVLSKGDKEEVAYEERACEGGKFATVEVTDKPVDEALREAMPKVAKYAGGTNDKGIGMGMTVPISFAVFPNEDGSLQKKLKVWFRIPNQFQSDPPAPSDKSVKIEEREGITVYSI

SEQ ID NO: 864346 - protein, 342 aa, Homo sapiens
MTCPRNVTPNSYAEPLAAPGGGERYSRSAGMYMQSGSDFNCGVMRGCGLAPSLSKRDEGSSPSLALNTYPSYLSQLDSWGDPKAAYRLEQPVGRPLSSCSYPPSVKEENVCCMYSAEKRAKSGPEAALYSHPLPESCLGEHEVPVPSYYRASPSYSALDKTPHCSGANDFEAPFEQRASLNPRAEHLESPQLGGKVSFPETPKSDSQTPSPNEIKTEQSLAGPKGSPSESEKERAKAADSSPDTSDNEAKEEIKAENTTGNWLTAKSGRKKRCPYTKHQTLELEKEFLFNMYLTRERRLEISKTINLTDRQVKIWFQNRRMKLKKMNRENRIRELTSNFNFT

SEQ ID NO: 864347 - protein, 112 aa, Homo sapiens
LAFDQRPLSSRLVARHLAGEEEIKAENTTGNWLTAKSGRKKRCPYTKHQTLELEKEFLFNMYLTRERRLEISKTINLTDRQVKIWFQNRRMKLKKMNRENRIRELTSNFNFT

SEQ ID NO: 864348 - protein, 152 aa, Homo sapiens
LPGACWLWFAFSMLVSWGADVPQLRSGACKKPKMAILGQGLGKAGEMGGVLFTAFSQLKIVSCETRFVVCGSDLCVRLGLLRLLARPGALGSEAGAGRGGGEGLPATSLPPPDAWLGWRWNRAFGMLGDKGRKHHRKLADSKERKEEEVPLY

SEQ ID NO: 864349 - protein, 116 aa, Homo sapiens
SQARAGCGLLSQCWCPGELTSPSSEEIKAENTTGNWLTAKSGRKKRCPYTKHQTLELEKEFLFNMYLTRERRLEISKTINLTDRQVKIWFQNRRMKLKKMNRENRIRELTSNFNFT

SEQ ID NO: 864350 - protein, 290 aa, Homo sapiens
MEVSLNHPASNTTSTKNNNSAFFYFESCQPPSPALLLLCIAYTVVLIVGLFGNLSLIIIIFKKQRKAQNFTSILIANLSLSDTLVCVMCIHFTIIYTLMDHWIFGDTMCRLTSYVQSVSISVSIFSLVFTAVERYQLIVNPRGWKPSVTHAYWGITLIWLFSLLLSIPFFLSYHLTDEPFRNLSLPTDLYTHQVACVENWPSKKDRLLFTTSLFLLQYFVPLGFILICYLKIVICLRRRNAKVDKKKENEGRLNENKRINTMLISIVVTFGACWLPRISSMSSLTGIMRC

SEQ ID NO: 864351 - protein, 290 aa, Homo sapiens; identical to SEQ ID NO: 864350

SEQ ID NO: 864352 - protein, 718 aa, Homo sapiens
AGLGNRLLVGGWGGKMAELMLLSEIADPTRFFTDNLLSPEDWGLQNSTLYSGLDEVAEEQTQLFRCPEQDVPFDGSSLDVGMDVSPSEPPWELLPIFPDLQVKSEPSSPCSSSSLSSESSRLSTEPSSEALGVGEVLHVKTESLAPPLCLLGDDPTSSFETVQINVIPTSDDSSDVQTKIEPVSPCSSVNSEASLLSADSSSQAFIGEEVLEVKTESLSPSGCLLWDVPAPSLGAVQISMGPSLDGSSGKALPTRKPPLQPKPVVLTTVPMPSRAVPPSTTVLLQSLVQPPPVSPVVLIQGAIRVQPEGPAPSLPRPERKSIVPAPMPGNSCPPEVDAKLLKRQQRMIKNRESACQSRRKKKEYLQGLEARLQAVLADNQQLRRENAALRRRLEALLAENSELKLGSGNRKVVCIMVFLLFIAFNFGPVSISEPPSAPISPRMNKGEPQPRRHLLGFSEQEPVQGVEPLQGSSQGPKEPQPSPTDQPSFSNLTAFPGGAKELLLRDLDQLFLSSDCRHFNRTESLRLADELSGWVQRHQRGRRKIPQRAQERQKSQPRKKSPPVKAVPIQPPGPPERDSVGQLQLYRHPDRSQPAFLDAIDRREDTFYVVSFRRDHLLLPAISHNKTSRPKMSLVMPAMAPNETLSGRGAPGDYEEMMQIECEVMDTRVIHIKTSTVPPSLRKQPSPTPGNATGGPLPVSAASQAHQASHQPLYLNHP

SEQ ID NO: 864353 - protein, 333 aa, Homo sapiens
AGLGNRLLVGGWGGKMAELMLLSEIADPTRFFTDNLLSPEDWGLQNSTLYSGLDEVAEEQTQLFRCPEQDVPFDGSSLDVGMDVSPSEPPWELLPIFPDLQVKSEPSSPCSSSSLSSESSRLSTEPSSEALGVGEVLHVKTESLAPPLCLLGDDPTSSFETVQINVIPTSDDSSDVQTKIEPVSPCSSVNSEASLLSADSSSQAFIGEEVLEVKTESLSPSGCLLWDVPAPSLGAVQISMGPSLDGSSGKALPTRKPPLQPKPVVLTTVPMPSRAVPPSTTVLLQSLVQPPPGTEEGEKGRAWWLTPVIPALWEAEAGESPEVRSLRPAWPTW

SEQ ID NO: 864354 - protein, 66 aa, Homo sapiens
LTPFPPDLQVKSEPSSPCSSSSLSSESSRLSTEPSSETSSQPWTSSQPWTSTSHGWLVGVELERFH

SEQ ID NO: 864355 - protein, 748 aa, Homo sapiens
AGLGNRLLVGGWGGKMAELMLLSEIADPTRFFTDNLLSPEDWGLQNSTLYSGLDEVAEEQTQLFRCPEQDVPFDGSSLDVGMDVSPSEPPWELLPIFPDLQVKSEPSSPCSSSSLSSESSRLSTEPSSEALGVGEVLHVKTESLAPPLCLLGDDPTSSFETVQINVIPTSDDSSDVQTKIEPVSPCSSVNSEASLLSADSSSQAFIGEEVLEVKTESLSPSGCLLWDVPAPSLGAVQISMGPSLDGSSGKALPTRKPPLQPKPVVLTTVPMPSRAVPPSTTVLLQSLVQPPPVSPVVLIQGAIRVQPEGPAPSLPRPERKSIVPAPMPGNSCPPEVDAKLLKRQQRMIKNRESACQSRRKKKEYLQGLEARLQAVLADNQQLRRENAALRRRLEALLAEVRPVCPWETNRNTASLEMIPLFLVSFFVPENSELKLGSGNRKVVCIMVFLLFIAFNFGPVSISEPPSAPISPRMNKGEPQPRRHLLGFSEQEPVQGVEPLQGSSQGPKEPQPSPTDQPSFSNLTAFPGGAKELLLRDLDQLFLSSDCRHFNRTESLRLADELSGWVQRHQRGRRKIPQRAQERQKSQPRKKSPPVKAVPIQPPGPPERDSVGQLQLYRHPDRSQPAFLDAIDRREDTFYVVSFRRDHLLLPAISHNKTSRPKMSLVMPAMAPNETLSGRGAPGDYEEMMQIECEVMDTRVIHIKTSTVPPSLRKQPSPTPGNATGGPLPVSAASQAHQASHQPLYLNHP

SEQ ID NO: 864356 - protein, 745 aa, Homo sapiens
SHRPSNELFGEVRCSIRRQSPWHPPCVSWEMTPHPSVLSPRKMAELMLLSEIADPTRFFTDNLLSPEDWGLQNSTLYSGLDEVAEEQTQLFRCPEQDVPFDGSSLDVGMDVSPSEPPWELLPIFPDLQVKSEPSSPCSSSSLSSESSRLSTEPSSEALGVGEVLHVKTESLAPPLCLLGDDPTSSFETVQINVIPTSDDSSDVQTKIEPVSPCSSVNSEASLLSADSSSQAFIGEEVLEVKTESLSPSGCLLWDVPAPSLGAVQISMGPSLDGSSGKALPTRKPPLQPKPVVLTTVPMPSRAVPPSTTVLLQSLVQPPPVSPVVLIQGAIRVQPEGPAPSLPRPERKSIVPAPMPGNSCPPEVDAKLLKRQQRMIKNRESACQSRRKKKEYLQGLEARLQAVLADNQQLRRENAALRRRLEALLAENSELKLGSGNRKVVCIMVFLLFIAFNFGPVSISEPPSAPISPRMNKGEPQPRRHLLGFSEQEPVQGVEPLQGSSQGPKEPQPSPTDQPSFSNLTAFPGGAKELLLRDLDQLFLSSDCRHFNRTESLRLADELSGWVQRHQRGRRKIPQRAQERQKSQPRKKSPPVKAVPIQPPGPPERDSVGQLQLYRHPDRSQPAFLDAIDRREDTFYVVSFRRDHLLLPAISHNKTSRPKMSLVMPAMAPNETLSGRGAPGDYEEMMQIECEVMDTRVIHIKTSTVPPSLRKQPSPTPGNATGGPLPVSAASQAHQASHQPLYLNHP

SEQ ID NO: 864357 - protein, 617 aa, Homo sapiens
AGLGNRLLVGGWGGKMAELMLLSEIADPTRFFTDNLLSPEDWGLQNSTLYSGLDEVAEEQTQLFRCPEQDVPFDGSSLDVGMDVSPSEPPWELLPIFPDLQVKSEPSSPCSSSSLSSESSRLSTEPSSEALGVGEVLHVKTESLAPPLCLLGDDPTSSFETVQINVIPTSDDSSDVQTKIEPVSPCSSVNSEASLLSADSSSQAFIGEEVLEVKTESLSPSGCLLWDVPAPSLGAVQISMGPSLDGSSGKALPTRKPPLQPKPVVLTTVPMPSRAVPPSTTVLLQSLVQPPPVSPVVLIQGAIRVQPEGPAPSLPRPERKSIVPAPMPGNSCPPEVDAKLLKRQQRMIKNRESACQSRRKKKEYLQGLEARLQAVLADNQQLRRENAALRRRLEALLAENSELKLGSGNRKVVCIMVFLLFIAFNFGPVSISEPPSAPISPRMNKGEPQPRRHLLGFSEQEPVQGVEPLQGSSQGPKEPQPSPTDQPSFSNLTAFPGGAKELLLRDLDQLFLSSDCRHFNRTESLRLADELSGWVQRHQRGRRKIPQRAQERQKSQPRKKSPPVKAVPIQPPGPPERDSVGQLQLYRHPDRSQPAFLDAIDRREDTFYVVSFRRPPE

SEQ ID NO: 864358 - protein, 461 aa, Homo sapiens
WSPGVGLADSFKVMISSSVHFPPSAQPSDLCSLAPVSPVVLIQGAIRVQPEGPAPSLPRPERKSIVPAPMPGNSCPPEVDAKLLKRQQRMIKNRESACQSRRKKKEYLQGLEARLQAVLADNQQLRRENAALRRRLEALLAENSELKLGSGNRKVVCIMVFLLFIAFNFGPVSISEPPSAPISPRMNKGEPQPRRHLLGFSEQEPVQGVEPLQGSSQGPKEPQPSPTDQPSFSNLTAFPGGAKELLLRDLDQLFLSSDCRHFNRTESLRLADELSGWVQRHQRGRRKIPQRAQERQKSQPRKKSPPVKAVPIQPPGPPERDSVGQLQLYRHPDRSQPAFLDAIDRREDTFYVVSFRRDHLLLPAISHNKTSRPKMSLVMPAMAPNETLSGRGAPGDYEEMMQIECEVMDTRVIHIKTSTVPPSLRKQPSPTPGNATGGPLPVSAASQAHQASHQPLYLNHP

SEQ ID NO: 864359 - protein, 455 aa, Homo sapiens
MSALPPLGNGIRAVLQTQSFCSPVVEPPPVSPVVLIQGAIRVQPEGPAPSLPRPERKSIVPAPMPGNSCPPEVDAKLLKRQQRMIKNRESACQSRRKKKEYLQGLEARLQAVLADNQQLRRENAALRRRLEALLAENSELKLGSGNRKVVCIMVFLLFIAFNFGPVSISEPPSAPISPRMNKGEPQPRRHLLGFSEQEPVQGVEPLQGSSQGPKEPQPSPTDQPSFSNLTAFPGGAKELLLRDLDQLFLSSDCRHFNRTESLRLADELSGWVQRHQRGRRKIPQRAQERQKSQPRKKSPPVKAVPIQPPGPPERDSVGQLQLYRHPDRSQPAFLDAIDRREDTFYVVSFRRDHLLLPAISHNKTSRPKMSLVMPAMAPNETLSGRGAPGDYEEMMQIECEVMDTRVIHIKTSTVPPSLRKQPSPTPGNATGGPLPVSAASQAHQASHQPLYLNHP

SEQ ID NO: 864360 - protein, 303 aa, Homo sapiens [sequence omitted]

SEQ ID NO: 864361 - protein, 221 aa, Homo sapiens
AGLGNRLLVGGWGGKMAELMLLSEIADPTRFFTDNLLSPEDWGLQNSTLYSGLDEVAEEQTQLFRCPEQDVPFDGSSLDVGMDVSPSEPPWELLPIFPDLQVKSEPSSPCSSSSLSSESSRLSTEPSSEALGVGEVLHVKTESLAPPLCLLGDDPTSSFETVQINVIPTSDDSSDVQTKIEPVSPCSSVNSEASLLSADSSSQVSTTFLPSSRFSSEFLLT

SEQ ID NO: 864362 - protein, 92 aa, Homo sapiens
AGLGNRLLVGGWGGKMAELMLLSEIADPTRFFTDNLLSPEDWGLQNSTLYSGLDEVAEEQTQLFRCPEQDVPFDGSSLDVGMDVSPSEPPST

SEQ ID NO: 864363 - protein, 151 aa, Homo sapiens
AGLGNRLLVGGWGGKMAELMLLSEIADPTRFFTDNLLSPEDWGLQNSTLYSGLDEVAEEQTQLFRCPEQDVPFDGSSLDVGMDVSPSEPPWELLPIFPDLQVKSEPSSPCSSSSLSSHPFSEYRAPLIPVNPQSWLLCLRGLCEVQLWGGW

SEQ ID NO: 864364 - protein, 423 aa, Homo sapiens
MPGNSCPPEVDAKLLKRQQRMIKNRESACQSRRKKKEYLQGLEARLQAVLADNQQLRRENAALRRRLEALLAENSELKLGSGNRKVVCIMVFLLFIAFNFGPVSISEPPSAPISPRMNKGEPQPRRHLLGFSEQEPVQGVEPLQGSSQGPKEPQPSPTDQPSFSNLTAFPGGAKELLLRDLDQLFLSSDCRHFNRTESLRLADELSGWVQRHQRGRRKIPQRAQERQKSQPRKKSPPLCLLGDDPTSSFETVQINVIPTSDDSSDVQTKIEPVSPCSSVNSEASLLSADSSSQAFIGEEVLEVKTESLSPSGCLLWDVPAPSLGAVQISMGPSLDGSSGKALPTRKPPLQPKPVVLTTVPMPSRAVPPSTTVLLQSLVQPPPGTEEGEKGQVWWLMPVTPALWEAEVGRSPELRSSRPAWSRW

SEQ ID NO: 864365 - protein, 718 aa, Homo sapiens; identical to SEQ ID NO: 864352

SEQ ID NO: 864366 - protein, 726 aa, Homo sapiens
AGLGNRLLVGGWGGKMAELMLLSEIADPTRFFTDNLLSPEDWGLQNSTLYSGLDEVAEEQTQLFRCPEQDVPFDGSSLDVGMDVSPSEPPWELLPIFPDLQVKSEPSSPCSSSSLSSESSRLSTEPSSEALGVGEVLHVKTESLAPPLCLLGDDPTSSFETVQINVIPTSDDSSDVQTKIEPVSPCSSVNSEASLLSADSSSQAFIGEEVLEVKTESLSPSGCLLWDVPAPSLGAVQISMGPSLDGSSGKALPTRKPPLQPKPVVLTTVPMPSRAVPPSTTVLLQSLVQPPPVSPVVLIQGAIRVQPEGPAPSLPRPERKSIVPAPMPGNSCPPEVDAKLLKRQQRMIKNRESACQSRRKKKEYLQGLEARLQAVLADNQQLRRENAALRRRLEALLAENSELKLGSGNRKVVCIMVFLLFIAFNFGPVSISEPPSAPISPRMNKGEPQPRRHLLGFSEQEPVQGVEPLQGSSQGPKEPQPSPTDQPSFSNLTAFPGGAKELLLRDLDQLFLSSDCRHFNRTESLRLADELSGWVQRHQRGRRKIPQRAQERQSFRYFSFQKSQPRKKSPPVKAVPIQPPGPPERDSVGQLQLYRHPDRSQPAFLDAIDRREDTFYVVSFRRDHLLLPAISHNKTSRPKMSLVMPAMAPNETLSGRGAPGDYEEMMQIECEVMDTRVIHIKTSTVPPSLRKQPSPTPGNATGGPLPVSAASQAHQASHQPLYLNHP

SEQ ID NO: 864367 - protein, 655 aa, Homo sapiens
AGLGNRLLVGGWGGKMAELMLLSEIADPTRFFTDNLLSPEDWGLQNSTLYSGLDEVAEEQTQLFRCPEQDVPFDGSSLDVGMDVSPSEPPWELLPIFPDLQVKSEPSSPCSSSSLSSESSRLSTEPSSEALGVGEVLHVKTESLAPPLCLLGDDPTSSFETVQINVIPTSDDSSDVQTKIEPVSPCSSVNSEASLLSADSSSQAFIGEEVLEVKTESLSPSGCLLWDVPAPSLGAVQISMGPSLDGSSGKALPTRKPPLQPKPVVLTTVPMPSRAVPPSTTVLLQSLVQPPPVSPVVLIQGAIRVQPEGPAPSLPRPERKSIVPAPMPGNSCPPEVDAKLLKRQQRMIKNRESACQSRRKKKEYLQGLEARLQAVLADNQQLRRENAALRRRLEALLAENSELKLGSGNRKVVCIMVFLLFIAFNFGPVSISEPPSAPISPRMNKGEPQPRRHLLGFSEQEPVQGVEPLQGSSQGPKEPQPSPTDQPSFSNLTAFPGGAKELLLRDLDQLFLSSDCRHFNRTESLRLADELSGWVQRHQRGRRKIPQRAQERQKSQPRKKSPPVKAVPIQPPGPPERDSVGQLQLYRHPDRSQPAFLDAIDRREDTFYVVSFRRTTCRSDPPVTNKTSRPQMSMKPHGPNETCQAGPRDTEERAR

SEQ ID NO: 864368 - protein, 294 aa, Homo sapiens
AGLGNRLLVGGWGGKMAELMLLSEIADPTRFFTDNLLSPEDWGLQNSTLYSGLDEVAEEQTQLFRCPEQDVPFDGSSLDVGMDVSPSEPPWELLPIFPDLQVKSEPSSPCSSSSLSSESSRLSTEPSSEALGVGEVLHVKTESLAPPLCLLGDDPTSSFETVQINVIPTSDDSSDVQTKIEPVSPCSSVNSEASLLSADSSSQAFIGEEVLEVKTESLSPSGCLLWDVPAPSLGAVQISMGPSLDGSSGKALPTRKPPLQPKPVVLTTVPMPSRAASAEDVIPARAASAEDKTL

SEQ ID NO: 864369 - protein, 392 aa, Homo sapiens [sequence omitted]

SEQ ID NO: 864370 - protein, 231 aa, Homo sapiens
MIVILPCLCLGVVLTLQTVKHDRCSRLIGGRWIRGEMLRLADELSGWVQRHQRGRRKIPQRAQERQKSQPRKKSPPVKAVPIQPPGPPERDSVGQLQLYRHPDRSQPAFLDAIDRREDTFYVVSFRRDHLLLPAISHNKTSRPKMSLVMPAMAPNETLSGRGAPGDYEEMMQIECEVMDTRVIHIKTSTVPPSLRKQPSPTPGNATGGPLPVSAASQAHQASHQPLYLNHP

SEQ ID NO: 864371 - protein, 208 aa, Homo sapiens
MGEVEISALAYVKMCLHAARYPHAAVNGLFLAPAPRSGECLCLTDCVPLFHSHLALSVMLEVALNQVDVWGAQAGLVVAGYYHANAAVNDQSPGPLALKIAGRIAEFFPDAVLIMLDNQKLVPQPRVPPVIVLENQGLRWVPKDKNLVMWRDWEESRQMVGALLEDRAHQHLVDFDCHLDDIRQDWTNQRLNTQITQWVGPTNGNGNA

SEQ ID NO: 864372 - protein, 208 aa, Homo sapiens; identical to SEQ ID NO: 864371

SEQ ID NO: 864373 - protein, 208 aa, Homo sapiens; identical to SEQ ID NO: 864371

SEQ ID NO: 864374 - protein, 123 aa, Homo sapiens
MGEVEISALAYVKMCLHAARYPHAAVNGLFLAPAPRSGECLCLTDCVPLFHSHLALSVMLEVALNQVDVWGAQAGLVVAGYYHANAAVNDQSTQASSSRASSIQQARSPQATYRERPQLRPHL

SEQ ID NO: 864375 - protein, 123 aa, Homo sapiens; identical to SEQ ID NO: 864374

SEQ ID NO: 864376 - protein, 123 aa, Homo sapiens; identical to SEQ ID NO: 864374

SEQ ID NO: 864377 - protein, 112 aa, Homo sapiens
MGFAHSWLLTPLIFPLHSPGPLALKIAGRIAEFFPDAVLIMLDNQKLVPQPRVPPVIVLENQGLRWVPKDKNLVMWRDWEESRQMVGALLEDRAHQHLVDFDCLNIYMPIYI

SEQ ID NO: 864378 - protein, 275 aa, Homo sapiens
MGEVEISALAYVKMCLHAARYPHAAVNGLFLAPAPRSGECLCLTDCVPLFHSHLALSVMLEVALNQVDVWGAQAGLVVAGYYHANAAVNDQSNIEHLSPTALKHQAVVHQASSRPDPRRPPTGKGHSCAHTYETWEAQLKWMGFAHSWLLTPLIFPLHSPGPLALKIAGRIAEFFPDAVLIMLDNQKLVPQPRVPPVIVLENQGLRWVPKDKNLVMWRDWEESRQMVGALLEDRAHQHLVDFDCHLDDIRQDWTNQRLNTQITQWVGPTNGNGNA

SEQ ID NO: 864379 - protein, 130 aa, Homo sapiens
MGEVEISALAYVKMCLHAARYPHAAVNGLFLAPAPRSGECLCLTDCVPLFHSHLALSVMLEVALNQVDVWGAQAGLVVAGYYHANAAVNDQSPGPLALKIAGRIAEFFPDAVLIMQPAAQHSNHPVGWSH

SEQ ID NO: 864380 - protein, 488 aa, Homo sapiens
  misc_feature (62)..(62): Xaa can be any naturally occurring amino acid
  misc_feature (180)..(181): Xaa can be any naturally occurring amino acid
KEMPVCRQTGNTCKELRDPVTSGLNTSVVFGFLNLVLWVGNLWFVFKETGWAAPFLRAPPGXPRNNRHPGTLRDAGYGQGPGGYGPQDSYGPQGGYQPDYGQPAGSGGSGYGPQGDYGQQGYGPQCTHLLLQSDVVLVSEAQEDLGGARAQEKACPPSHPYTLGLHPSSQETLSLLFIYXXMDVVNQLVAGGQFRVVKEPLGFVKVLQWVFAIFAFATCGSYSGELQLSVDCANKTESDLSIEVEFEYPFRLHQVYFDAPTCRGGTTKVFLVGDYSSSAEFFVTVAVFAFLYSMGALATYIFLQNKYRENNKGPMLDFLATAVFAFMWLVSSSAWAKGLSDVKMATDPENIIKEMPVCRQTGNTCKELRDPVTSGLNTSVVFGFLNLVLWVGNLWFVFKETGWAAPFLRAPPGAPEKQPAPGDAYGDAGYGQGPGGYGPQDSYGPQGGYQPDYGQPAGSGGSGYGPQGDYGQQGYGPQGAPTSFSNQM

SEQ ID NO: 864381 - protein, 259 aa, Homo sapiens
HPLGSLSTCLVPGTALDSRTMWLHQVYFDAPTCRGGTTKVFLVGDYSSSAEFFVTVAVFAFLYSMGALATYIFLQNKYRENNKGPMLDFLATAVFAFMWLVSSSAWAKGLSDVKMATDPENIIKEMPVCRQTGNTCKELRDPVTSGLNTSVVFGFLNLVLWVGNLWFVFKETGWAAPFLRAPPGAPEKQPAPGDAYGDAGYGQGPGGYGPQDSYGPQGGYQPDYGQPAGSGGSGYGPQGDYGQQGYGPQGAPTSFSNQM

SEQ ID NO: 864382 - protein, 200 aa, Homo sapiens
MDVVNQLVAGGQFRVVKEPLGFVKVLQWDFLATAVFAFMWLVSSSAWAKGLSDVKMATDPENIIKEMPVCRQTGNTCKELRDPVTSGLNTSVVFGFLNLVLWVGNLWFVFKETGWAAPFLRAPPGAPEKQPAPGDAYGDAGYGQGPGGYGPQDSYGPQGGYQPDYGQPAGSGGSGYGPQGDYGQQGYGPQGAPTSFSNQM

SEQ ID NO: 864383 - protein, 488 aa, Homo sapiens; identical to SEQ ID NO: 864380
  misc_feature (62)..(62): Xaa can be any naturally occurring amino acid
  misc_feature (180)..(181): Xaa can be any naturally occurring amino acid

SEQ ID NO: 864384 - protein, 93 aa, Homo sapiens
MGQGAVRCEDGHRPREHYQGDACLPPDREHMQGAERPCDLGTQHLGGKPWVLAGGGRVENSTVRHGEWWSGRIRGESGEIQGVSLKNAANNNV

SEQ ID NO: 864385 - protein, 488 aa, Homo sapiens; identical to SEQ ID NO: 864380
  misc_feature (62)..(62): Xaa can be any naturally occurring amino acid
  misc_feature (180)..(181): Xaa can be any naturally occurring amino acid

SEQ ID NO: 864386 - protein, 195 aa, Homo sapiens
MGALATYIFLQNKYRENNKGPMLDFLATAVFAFMWLVSSSAWAKGLSDVKMATDPENIIKEMPVCRQTGNTCKELRDPVTSGLNTSVVFGFLNLVLWVGNLWFVFKETGWAAPFLRAPPGAPEKQPAPGDAYGDAGYGQGPGGYGPQDSYGPQGGYQPDYGQPAGSGGSGYGPQGDYGQQGYGPQGAPTSFSNQM

SEQ ID NO: 864387 - protein, 488 aa, Homo sapiens; identical to SEQ ID NO: 864380
  misc_feature (62)..(62): Xaa can be any naturally occurring amino acid
  misc_feature (180)..(181): Xaa can be any naturally occurring amino acid

SEQ ID NO: 864388 - protein, 585 aa, Homo sapiens
MYEGKENVSFELQRDFSQETDFSEASLLEKQQEVHSAGNIKKEKSNTIDGTVKDETSPVEECFFSQSSNSYQCHTITGEQPSGCTGLGKSISFDTKLVKHEIINSEERPFKCEELVEPFRCDSQLIQHQENNTEEKPYQCSECGKAFSINEKLIWHQRLHSGEKPFKCVECGKSFSYSSHYITHQTIHSGEKPYQCKMCGKAFSVNGSLSRHQRIHTGEKPYQCKECGNGFSCSSAYITHQRVHTGEKPYECNDCGKAFNVNAKLIQHQRIHTGEKPYECNECGKGFRCSSQLRQHQSIHTGEKPYQCKECGKGFNNNTKLIQHQRIHTGEKPYECTECGKAFSVKGKLIQHQRIHTGEKPYECNECGKAFRCNSQFRQHLRIHTGEKPYECNECGKAFSVNGKLMRHQRIHTGEKPFECNECGRCFTSKRNLLDHHRIHTGEKPYQCKECGKAFSINAKLTRHQRIHTGEKPFKCMECEKAFSCSSNYIVHQRIHTGEKPFQCKECGKAFHVNAHLIRHQRSHTGEKPFRCVECGKGFSFSSDYIIHQTVHTWKKPYMCSVCGKAFRFSFQLSQHQSVHSEGKS

SEQ ID NO: 864389 - protein, 585 aa, Homo sapiens; identical to SEQ ID NO: 864388

SEQ ID NO: 864390 - protein, 722 aa, Homo sapiens
MDFHGLQKSVTFEDVAVYFTQAEWDGLSPAQRTLYRDVMLENYGNVASLGFPLLKPAVISQLEGGSELGGSSPLAAGTGLQGLQTDGVSLCRPNWSAVAELGSPQLPFPGFEQFSCLILPSSWNYSDIQTDNDLTKEMYEGKENVSFELQRDFSQETDFSEASLLEKQQEVHSAGNIKKEKSNTIDGTVKDETSPVEECFFSQSSNSYQCHTITGEQPSGCTGLGKSISFDTKLVKHEIINSEERPFKCEELVEPFRCDSQLIQHQENNTEEKPYQCSECGKAFSINEKLIWHQRLHSGEKPFKCVECGKSFSYSSHYITHQTIHSGEKPYQCKMCGKAFSVNGSLSRHQRIHTGEKPYQCKECGNGFSCSSAYITHQRVHTGEKPYECNDCGKAFNVNAKLIQHQRIHTGEKPYECNECGKGFRCSSQLRQHQSIHTGEKPYQCKECGKGFNNNTKLIQHQRIHTGEKPYECTECGKAFSVKGKLIQHQRIHTGEKPYECNECGKAFRCNSQFRQHLRIHTGEKPYECNECGKAFSVNGKLMRHQRIHTGEKPFECNECGRCFTSKRNLLDHHRIHTGEKPYQCKECGKAFSINAKLTRHQRIHTGEKPFKCMECEKAFSCSSNYIVHQRIHTGEKPFQCKECGKAFHVNAHLIRHQRSHTGEKPFRCVECGKGFSFSSDYIIHQTVHTWKKPYMCSVCGKAFRFSFQLSQHQSVHSEGKS

SEQ ID NO: 864391 - protein, 585 aa, Homo sapiens; identical to SEQ ID NO: 864388

SEQ ID NO: 864392 - protein, 252 aa, Homo sapiens
MAAMPLKAQYQEMVTFEDVAVHFTKTEWTGLSPAQRALYRSVMLENFGNLTALGYPVPKPALISLLERGDMAWGLEAQDDPPAERTKNVCKDVETNIDSESTLIQGISEERDGMMSHGQLKSVPQRTDFPETRNVEKHQDIPTVKNIQGKVPRIPCARKPFICEECGKSFSYFSYYARHQRIHTGEKPFECSECGKAFNGNSSLIRHQRIHTGERPYQCEECGRAFNDNANLIRHQRIHSGGQTLLLYRVWE

SEQ ID NO: 864393 - protein, 458 aa, Homo sapiens
MAAMPLKAQYQEMVTFEDVAVHFTKTEWTGLSPAQRALYRSVMLENFGNLTALGYPVPKPALISLLERGDMAWGLEAQDDPPAERTKNVCKDVETNIDSESTLIQGISEERDGMMSHGQLKSVPQRTDFPETRNVEKHQDIPTVKNIQGKVPRIPCARKPFICEECGKSFSYFSYYARHQRIHTGEKPFECSECGKAFNGNSSLIRHQRIHTGERPYQCEECGRAFNDNANLIRHQRIHSGDRPYYCTECGNSFTSSSEFVIHQRIHTGEKPYECNECGKAFVGNSPLLRHQKIHTGEKPYECNECGKSFGRTSHLSQHQRIHTGEKPYSCKVCGQAFNFHTKLTRHQRIHSEEKPFDCVDCGKAFSAQEQLKRHLRIHTQESSYVCDECGKALTSKRNLHQHQRIHTGEKPYECSKYEKAFGTSSQLGHLEHVYSGEKPVLDICRFGLPEFFTPFYW

SEQ ID NO: 864394 - protein, 82 aa, Homo sapiens [sequence omitted]

SEQ ID NO: 864395 - protein, 84 aa, Homo sapiens
CRAPGAVCRALSPRLWVRLRRTPTLGAAGSPVAYAARRPRLGEGAGRRPGVLFRAPRLQLWSLWLNSLRPLEGETHVAVPATRP

SEQ ID NO: 864396 - protein, 726 aa, Homo sapiens
MAAMHLTAWPQKSVTFEDVAVYFTQAEWDGLSPAQRTLYRDVMLENYGNVASLGFPLLKPAVISQLEGGSELGGSSPLAAGTGLQGLQTDGVSLCRPNWSAVAELGSPQLPFPGFEQFSCLILPSSWNYSDIQTDNDLTKEMYEGKENVSFELQRDFSQETDFSEASLLEKQQEVHSAGNIKKEKSNTIDGTVKDETSPVEECFFSQSSNSYQCHTITGEQPSGCTGLGKSISFDTKLVKHEIINSEERPFKCEELVEPFRCDSQLIQHQENNTEEKPYQCSECGKAFSINEKLIWHQRLHSGEKPFKCVECGKSFSYSSHYITHQTIHSGEKPYQCKMCGKAFSVNGSLSRHQRIHTGEKPYQCKECGNGFSCSSAYITHQRVHTGEKPYECNDCGKAFNVNAKLIQHQRIHTGEKPYECNECGKGFRCSSQLRQHQSIHTGEKPYQCKECGKGFNNNTKLIQHQRIHTGEKPYECTECGKAFSVKGKLIQHQRIHTGEKPYECNECGKAFRCNSQFRQHLRIHTGEKPYECNECGKAFSVNGKLMRHQRIHTGEKPFECNECGRCFTSKRNLLDHHRIHTGEKPYQCKECGKAFSINAKLTRHQRIHTGEKPFKCMECEKAFSCSSNYIVHQRIHTGEKPFQCKECGKAFHVNAHLIRHQRSHTGEKPFRCVECGKGFSFSSDYIIHQTVHTWKKPYMCSVCGKAFRFSFQLSQHQSVHSEGKS

SEQ ID NO: 864397 - protein, 698 aa, Homo sapiens
MAAMHLTAWPQKSVTFEDVAVYFTQAEWDGLSPAQRTLYRDVMLENYGNVASLGFPLLKPAVISQLEGGSELGGSSPLAAGTGLQGLQTDGVSLCRPNWSAVAELGSPQLPFPGFEQFSCLILPSSWNYSDIQTDNDLTKEMYEGKENVSFELQRDFSQETDFSEASLLEKQQEVHSAGNIKKEKSNTIDGTVKDETSPVEECFFSQSSNSYQCHTITGEQPSGCTGLGKSISFDTKLVKHEIINSEERPFKCEELVEPFRCDSQLIQHQENNTEEKPYQCSECGKAFSINEKLIWHQRLHSGEKPFKCVECGKSFSYSSHYITHQTIHSGEKPYQCKMCGKAFSVNGSLSRHQRIHTGEKPYQCKECGNGFSCSSAYITHQRVHTGEKPYECNDCGKAFNVNAKLIQHQRIHTGEKPYECNECGKGFRCSSQLRQHQSIHTGEKPYQCKECGKGFNNNTKLIQHQRIHTGEKPYECNECGKAFRCNSQFRQHLRIHTGEKPYECNECGKAFSVNGKLMRHQRIHTGEKPFECNECGRCFTSKRNLLDHHRIHTGEKPYQCKECGKAFSINAKLTRHQRIHTGEKPFKCMECEKAFSCSSNYIVHQRIHTGEKPFQCKECGKAFHVNAHLIRHQRSHTGEKPFRCVECGKGFSFSSDYIIHQTVHTWKKPYMCSVCGKAFRFSFQLSQHQSVHSEGKS

SEQ ID NO: 864398 - protein, 446 aa, Homo sapiens
MVTFEDVAVHFTKTEWTGLSPAQRALYRSVMLENFGNLTALGYPVPKPALISLLERGDMAWGLEAQDDPPAERTKNVCKDVETNIDSESTLIQGISEERDGMMSHGQLKSVPQRTDFPETRNVEKHQDIPTVKNIQGKVPRIPCARKPFICEECGKSFSYFSYYARHQRIHTGEKPFECSECGKAFNGNSSLIRHQRIHTGERPYQCEECGRAFNDNANLIRHQRIHSGDRPYYCTECGNSFTSSSEFVIHQRIHTGEKPYECNECGKAFVGNSPLLRHQKIHTGEKPYECNECGKSFGRTSHLSQHQRIHTGEKPYSCKVCGQAFNFHTKLTRHQRIHSEEKPFDCVDCGKAFSAQEQLKRHLRIHTQESSYVCDECGKALTSKRNLHQHQRIHTGEKPYECSKYEKAFGTSSQLGHLEHVYSGEKPVLDICRFGLPEFFTPFYW

SEQ ID NO: 864399 - protein, 726 aa, Homo sapiens; identical to SEQ ID NO: 864396

SEQ ID NO: 864400 - protein, 608 aa, Homo sapiens
MYFPSWLSQLYRGLSRPIRRTTQPIWGSLYRSLLQSSQRRIPEFSSFVVRTNTCGELRSSHLGQEVTLCGWIQYRRQNTFLVLRDFDGLVQVIIPQDESAASVKKILCEAPVESVVQVSGTVISRPAGQENPKMPTGEIEIKVKTAELLNACKKLPFEIKNFVKKTEALRLQYRYLDLRSFQMQYNLRLRSQMVMKMREYLCNLHGFVDIETPTLFKRTPGGAKEFLVPSREPGKFYSLPQSPQQFKQLLMVGGLDRYFQVARCYRDEGSRPDRQPEFTQIDIEMSFVDQTGIQSLIEGLLQYSWPNDKDPVVVPFPTMTFAEVLATYGTDKPDTRFGMKIIDISDVFRNTEIGFLQDALSKPHGTVKAICIPEGAKYLKRKDIESIRNFAADHFNQEILPVFLNANRNWNSPVANFIMESQRLELIRLMETQEEDVVLLTAGEHNKACSLLGKLRLECADLLETRGVVLRDPTLFSFLWVVDFPLFLPKEENPRELESAHHPFTAPHPSDIHLLYTEPKKEDVKMLSHLLQALDYGAPPHGGIALGLDRLICLVTGSPSIRDVIAFPKSFRGHDLMSNTPDSVPPEELKPYHIRVSKPTDSKAERAH

SEQ ID NO: 864401 - protein, 227 aa, Homo sapiens [sequence omitted]

SEQ ID NO: 864402 - protein, 645 aa, Homo sapiens
MYFPSWLSQLYRGLSRPIRRTTQPIWGSLYRSLLQSSQRRIPEFSSFVVRTNTCGELRSSHLGQEVTLCGWIQYRRQNTFLVLRDFDGLVQVIIPQDESAASVKKILCEAPVESVVQVSGTVISRPAGQENPKMPTGEIEIKVKTAELLNACKKLPFEIKNFVKKTEALRLQYRYLDLRSFQMQYNLRLRSQMVMKMREYLCNLHGFVDIETPTLFKRTPGGAKEFLVPSREPGKFYSLPQSPQQFKQLLMVGGLDRYFQVARCYRDEGSRPDRQPEFTQIDIEMSFVDQTGIQSLIEGLLQYSWPNDKDPVVVPFPTMTFAEVLATYGTDKPDTRFGMKIIDISDVFRNTEIGFLQDALSKPHGTVKAICIPEGAKYLKRKDIESIRNFAADHFNQEILPVFLNANRNWNSPVANFIMESQRLELIRLMETQEEDVVLLTAGEHNKACSLLGKLRLECADLLETRGVVLRDPTLFSFLWVVDFPLFLPKEENPRELESAHHPFTAPHPSDIHLLYTEPKKARSQHYDLVLNGNEIGGGSIRIHNAELQRYILATLLKEDVKMLSHLLQALDYGAPPHGGIALGLDRLICLVTGSPSIRDVIAFPKSFRGHDLMSNTPDSVPPEELKPYHIRVSKPTDSKAERAH

SEQ ID NO: 864403 - protein, 645 aa, Homo sapiens; identical to SEQ ID NO: 864402

SEQ ID NO: 864404 - protein, 608 aa, Homo sapiens; identical to SEQ ID NO: 864400

SEQ ID NO: 864405 - protein, 482 aa, Homo sapiens
MYFPSWLSQLYRGLSRPIRRTTQPIWGSLYRSLLQSSQRRIPEFSSFVVRTNTCGELRSSHLGQEVTLCGWIQYRRQNTFLVLRDFDGLVQVIIPQDESAASVKKILCEAPVESVVQVSGTVISRPAGQENPKMPTGEIEIKVKTAELLNACKKLPFEIKNFVKKTEALRLQYRYLDLRSFQMQYNLRLRSQMVMKMREYLCNLHGFVDIETPTLFKRTPGGAKEFLVPSREPGKFYSLPQSPQQFKQLLMVGGLDRYFQVARCYRDEGSRPDRQPEFTQIDIEMSFVDQTGIQSLIEGLLQYSWPNDKDPVVVPFPTMTFAEVLATYGTDKPDTRFGMKIIDISDVFRNTEIGFLQDALSKPHGTVKAICIPEGAKYLKRKDIESIRNFAADHFNQEILPVFLNANRNWNSPVANFIMESQRLELIRLMETQEEDVVLLTAGEHNKAKKFQSSASKLNVIPRLPFPYNSKMKKAIYFQILL

SEQ ID NO: 864406 - protein, 212 aa, Homo sapiens
MNNQKQQKPTLSGQRFKTRKRDEKERFDPTQFQDCIIQGLTETGTDLEAVAKFLDASGAKLDYRRYAETLFDILVAGGMLAPGGTLADDMMRTDVCVFAAQEDLETMQAFAQVFNKLIRRYKYLEKGFEDEVKKLLLFLKGFSESERNKLAMLTGVLLANGTLNASILNSLYNENLVKEGVSAAFAVKLFKSWINETRYQCSSCKSSESQHG

SEQ ID NO: 864407 - protein, 212 aa, Homo sapiens; identical to SEQ ID NO: 864406

SEQ ID NO: 864408 - protein, 155 aa, Homo sapiens
MSRGDPFKDIILYVKEEMKKNNIPEPVVIGIVWSSVMSTVEWNKKEELVAEQAIKHLKQYSPLLAAFTTQGQSELTLLLKIQEYCYDNIHFMKAFQKIVVLFYKAEVLSEEPILKWYKDAHVAKGKSVFLEQMKKFVEWLKNAEEESESEAEEGD

SEQ ID NO: 864409 - protein, 212 aa, Homo sapiens; identical to SEQ ID NO: 864406

SEQ ID NO: 864410 - protein, 212 aa, Homo sapiens; identical to SEQ ID NO: 864406

SEQ ID NO: 864411 - protein, 212 aa, Homo sapiens; identical to SEQ ID NO: 864406

SEQ ID NO: 864412 - protein, 203 aa, Homo sapiens
MNNQKQQKPTLSGQRFKTRKRDEKERFDPTQFQDCIIQGLTETGTDLEAVAKFLDASGAKLDYRRYAETLFDILVAGGMLAPGGTLADDMMRTDVCVFAAQEDLETMQAFAQVFNKLIRRYKYLEKGFEDEVKKLLLFLKGFSESERNKLAMLTGVLLANGTLNASILNSLYNENLVKEGVREIGGEAFNRGREEFSGRQILI

SEQ ID NO: 864413 - protein, 96 aa, Homo sapiens
MNNQKQQKPTLSGQRFKTRKRDEKERFDPTQFQDCIIQGLTETGTDLEAVAKFLDASGAPNAVPSSHTVIGYDPDRRLLAPAHAPQVHLHALAPAP

SEQ ID NO: 864414 - protein, 212 aa, Homo sapiens; identical to SEQ ID NO: 864406

SEQ ID NO: 864415 - protein, 212 aa, Homo sapiens; identical to SEQ ID NO: 864406

SEQ ID NO: 864416 - protein, 212 aa, Homo sapiens; identical to SEQ ID NO: 864406

SEQ ID NO: 864417 - protein, 212 aa, Homo sapiens; identical to SEQ ID NO: 864406

SEQ ID NO: 864418 - protein, 268 aa, Homo sapiens
GRRGCHPPPLRPPPPPLLSLEGGRMYGAPGAPAQSASVTVVRSLRRPPPQATGVSFMNNQKQQKPTLSGQRFKTRKRDEKERFDPTQFQDCIIQGLTETGTDLEAVAKFLDASGAKLDYRRYAETLFDILVAGGMLAPGGTLADDMMRTDVCVFAAQEDLETMQAFAQVFNKLIRRYKYLEKGFEDEVKKLLLFLKGFSESERNKLAMLTGVLLANGTLNASILNSLYNENLVKEGVSAAFAVKLFKSWINETRYQCSSCKSSESQHG

SEQ ID NO: 864419 - protein, 227 aa, Homo sapiens
MGFWLLLFALHRVSFMNNQKQQKPTLSGQRFKTRKRDEKERFDPTQFQDCIIQGLTETGTDLEAVAKFLDASGAKLDYRRYAETLFDILVAGGMLAPGGTLADDMMRTDVCVFAAQEDLETMQAFAQVFNKLIRRYKYLEKGFEDEVKKLLLFLKGFSESERNKLAMLTGVLLANGTLNASILNSLYNENLVKEGVSAAFAVKLFKSWINETRYQCSSCKSSESQHG

SEQ ID NO: 864420 - protein, 212 aa, Homo sapiens; identical to SEQ ID NO: 864406

SEQ ID NO: 864421 - protein, 212 aa, Homo sapiens; identical to SEQ ID NO: 864406

SEQ ID NO: 864422 - protein, 167 aa, Homo sapiens
SRRTSTLGSEDSRQSPGDPSDIILYVKEEMKKNNIPEPVVIGIVWSSVMSTVEWNKKEELVAEQAIKHLKQYSPLLAAFTTQGQSELTLLLKIQEYCYDNIHFMKAFQKIVVLFYKAEVLSEEPILKWYKDAHVAKGKSVFLEQMKKFVEWLKNAEEESESEAEEGD

SEQ ID NO: 864423 - protein, 212 aa, Homo sapiens; identical to SEQ ID NO: 864406

SEQ ID NO: 864424 - protein, 212 aa, Homo sapiens; identical to SEQ ID NO: 864406

SEQ ID NO: 864425 - protein, 105 aa, Homo sapiens
MNNQKQQKPTLSGQRFKTRKRDEKERFDPTQFQDCIIQGLTETGTDLEAVAKFLDASGAKLDYRRYAETLFDILVAGGMLGKCLWFVGLIIKKGIIYGDYGESRI

SEQ ID NO: 864426 - protein, 681 aa, Homo sapiens
MKCVLVATEGAEVLFYWTDQEFEESLRLKFGQSENEEEELPALEDQLSTLLAPVIISSMTMLEKLSDTYTCFSTENGNFLYVLHLFGECLFIAINGDHTESEGDLRRKLYVLKYLFEVHFGLVTVDGHLIRKELRPPDLAQRVQLWEHFQSLLWTYSRLREQEQCFAVEVTTGRGSPQDLKLSALERLIHPQLCELCIEALERHVIQAVNTSPERGGEEALHAFLLVHSKLLAFYSSHSASSLRPADLLALILLVQDLYPSESTAEDDIQETDSFSLPEEYFTPAPSPGDQSSGSTIWLEGGTPPMDALQIAEDTLQTLVPHCPVPSGPRRIFLDANVKESYCPLVPHTMYCLPLWQGINLVLLTRSPSAPLALVLSQLMDGFSMLEKKLKEGPEPGASLRSQPLVGDLRQRMDKFVKNRGAQEIQSTWLEFKAKAFSKSEPGSSWELLQACGKLKRQLCAIYRLNFLTTAPSRGGPHLPQHLQDQVQRLMREKLTDWKDFLLVKSRRNITMVSYLEDFPGLVHFIYVDRTTGQMVAPSLNCSQKTSSELGKGPLAAFVKTKVWSLIQLARRYLQKGYTTLLFQEGDFYCSYFLWFENDMGYKLQMIEVPVLSDDSVPIGMLGGDYYRKLLRYYSKNRPTEAVRCYELLALHLSVIPTDLLVQQAGQLARRLWEASRIPLL

SEQ ID NO: 864427 - protein, 133 aa, Homo sapiens
MAASGRGLCKAVAASPFPAWRRDNTEARGGLKPEYDAVVIGAGRHLGFRCWLCCVAWGKCLPSLGLDLPMENDRKTRGPQMHDCQLGLYRDNDGTESRRHSTCSFEGMPSFSYVLEQLRAGRYSTLTSPGKNV

SEQ ID NO: 864428 - protein, 700 aa, Homo sapiens [sequence omitted]

SEQ ID NO: 864429 - protein, 700 aa, Homo sapiens [sequence omitted]

SEQ ID NO: 864430 - protein, 646 aa, Homo sapiens
MKCVLVATEGAEVLFYWTDQEFEESLRLKFGQSENEEEELPALEDQLSTLLAPVIISSMTMLEKLSDTYTCFSTENGNFLYVLHLFGECLFIAINGDHTESEGDLRRKLYVLKYLFEVHFGLVTVDGHLIRKELRPPDLAQRVQLWEHFQSLLWTYSRLREQEQCFAVEPQCQLPAPGRPACPHPPGSGPLPQREHSRGRHSAFPAEGPEQPEHPRAAGLEPSLTGPTGGSSAETETDSFSLPEEYFTPAPSPGDQSSGSTIWLEGGTPPMDALQIAEDTLQTLVPHCPVPSGPRRIFLDANVKESYCPLVPHTMYCLPLWQGINLVLLTRSPSAPLALVLSQLMDGFSMLEKKLKEGPEPGASLRSQPLVGDLRQRMDKFVKNRGAQEIQSTWLEFKAKAFSKSEPGSSWELLQACGKLKRQLCAIYRLNFLTTAPSRGGPHLPQHLQDQVQRLMREKLTDWKDFLLVKSRRNITMVSYLEDFPGLVHFIYVDRTTGQMVAPSLNCSQKTSSELGKGPLAAFVKTKVWSLIQLARRYLQKGYTTLLFQEGDFYCSYFLWFENDMGYKLQMIEVPVLSDDSVPIGMLGGDYYRKLLRYYSKNRPTEAVRCYELLALHLSVIPTDLLVQQAGQLARRLWEASRIPLL

SEQ ID NO: 864431 - protein, 700 aa, Homo sapiens [sequence omitted]

SEQ ID NO: 864432 - protein, 700 aa, Homo sapiens [sequence omitted]

SEQ ID NO: 864433 - protein, 700 aa, Homo sapiens [sequence omitted]

SEQ ID NO: 864434 - protein, 700 aa, Homo sapiens [sequence omitted]

SEQ ID NO: 864435 - protein, 275 aa, Homo sapiens
MKCVLVATEGAEVLFYWTDQEFEESLRLKFGQSENEEEELPALEDQLSTLLAPVIISSMTMLEKLSDTYTCFSTENGNFLYVLHLFGECLFIAINGDHTESEGDLRRKLYVLKYLFEVHFGLVTVDGHLIRKELRPPDLAQRVQLWEHFQSLLWTYSRLREQEQCFAVEVTTGRGSPQDLKLSATVPAPCARPTCLPSSSWFRTSTPARAQQRTTFRRQTASPSLRSTSHQLLPLAIRAQVRTGGKQEETIASCERQAAQDICLRLQWTPVPPKA

SEQ ID NO: 864436 - protein, 199 aa, Homo sapiens
MKCVLVATEGAEVLFYWTDQEFEESLRLKFGQSENEEEELPALEDQLSTLLAPVIISSMTMLEKLSDTYTCFSTENGNFLYVLHLFGECLFIAINGDHTESEGDLRRKLYVLKYLFEVHFGLVTVDGHLIRKELRPPDLAQRVQLWEHFQSLLWTYSRLREQEQCFAVEVTTGRGSPQDLKLSGQRGRPPLRPCFNPNE

SEQ ID NO: 864437 - protein, 72 aa, Homo sapiens
AVLPGSAPGLLQAGRCARRDPVRGPPGCPLWGRRSSLRSPPSTLPEVSICRTRDAVLLSHEPVTESVCCSPF

SEQ ID NO: 864438 - protein, 112 aa, Homo sapiens
GPTRKRARAPAGGALCAPRSGTWASGLSPLGAAILPPEPPFNPPGSEVGSLGVPERAHSYLTHSGRVAVGRSLPRSGPKFLSREEGWMSQVKPPSQGGREHLQDQGCCAALP

SEQ ID NO: 864439 - protein, 324 aa, Homo sapiens
MKCVLVATEGAEVLFYWTDQEFEESLRLKFGQSENEEEELPALEDQLSTLLAPVIISSMTMLEKLSDTYTCFSTENGNFLYVLHLFGECLFIAINGDHTESEGDLRRKLYVLKYLFEVHFGLVTVDGHLIRKELRPPDLAQRVQLWEHFQSLLWTYSRLREQEQCFAVEALERLIHPQLCELCIEALERHVIQAVNTSPERGGEEALHAFLLVHSKLLAFYSSHSASSLRPADLLALILLVQDLYPSESTAEDDIQPSPRRARSSQNIPVQQAWSPHSTGPTGGSSAETETDSFSLPEEYFTPAPSPGDQSSGEDRRKAGGNNS

SEQ ID NO: 864440 - protein, 133 aa, Homo sapiens [sequence omitted]

SEQ ID NO: 864441 - protein, 82 aa, Homo sapiens
AEMAASGRGLCKAVAASPFPAWRRDNTEARGGLKPEYDAVVIGAEGPKCMIANWVYTEIMTGPKADGTQHAALRACLHFHMY

SEQ ID NO: 864442 - protein, 700 aa, Homo sapiens [sequence omitted]

SEQ ID NO: 864443 - protein, 580 aa, Homo sapiens
MKCVLVATEGAEVLFYWTDQEFEESLRLKFGQSENEEEELPALEDQLSTLLAPVIISSMTMLEKLSDTYTCFSTENGNFLYVLHLAAAPRPGAACPAVGALPEPAVDLQPPAGAGAVLRRGGDYWARESSGLEAVSHSASSLRPADLLALILLVQDLYPSESTAEDDIQETDSFSLPEEYFTPAPSPGDQSSGSTIWLEGGTPPMDALQIAEDTLQTLVPHCPVPSGPRRIFLDANVKESYCPLVPHTMYCLPLWQGINLVLLTRSPSAPLALVLSQLMDGFSMLEKKLKEGPEPGASLRSQPLVGDLRQRMDKFVKNRGAQEIQSTWLEFKAKAFSKSEPGSSWELLQACGKLKRQLCAIYRLNFLTTAPSRGGPHLPQHLQDQVQRLMREKLTDWKDFLLVKSRRNITMVSYLEDFPGLVHFIYVDRTTGQMVAPSLNCSQKTSSELGKGPLAAFVKTKVWSLIQLARRYLQKGYTTLLFQEGDFYCSYFLWFENDMGYKLQMIEVPVLSDDSVPIGMLGGDYYRKLLRYYSKNRPTEAVRCYELLALHLSVIPTDLLVQQAGQLARRLWEASRIPLL

SEQ ID NO: 864444 - protein, 644 aa, Homo sapiens
RSPPKLWTQEALRDGARVSQSCEFGPNKVKDLLANGVVPSGIVMGSTLLAPVIISSMTMLEKLSDTYTCFSTENGNFLYVLHLFGECLFIAINGDHTESEGDLRRKLYVLKYLFEVHFGLVTVDGHLIRKELRPPDLAQRVQLWEHFQSLLWTYSRLREQEQCFAVEPQCQLPAPGRPACPHPPGSGPLPQREHSRGRHSAFPAEGPEQPEHPRAAGLEPSLTGPTGGSSAETETDSFSLPEEYFTPAPSPGDQSSGSTIWLEGGTPPMDALQIAEDTLQTLVPHCPVPSGPRRIFLDANVKESYCPLVPHTMYCLPLWQGINLVLLTRSPSAPLALVLSQLMDGFSMLEKKLKEGPEPGASLRSQPLVGDLRQRMDKFVKNRGAQEIQSTWLEFKAKAFSKSEPGSSWELLQACGKLKRQLCAIYRLNFLTTAPSRGGPHLPQHLQDQVQRLMREKLTDWKDFLLVKSRRNITMVSYLEDFPGLVHFIYVDRTTGQMVAPSLNCSQKTSSELGKGPLAAFVKTKVWSLIQLARRYLQKGYTTLLFQEGDFYCSYFLWFENDMGYKLQMIEVPVLSDDSVPIGMLGGDYYRKLLRYYSKNRPTEAVRCYELLALHLSVIPTDLLVQQAGQLARRLWEASRIPLL

SEQ ID NO: 864445 - protein, 332 aa, Homo sapiens
MYCLPLWQGINLVLLTRSPSAPLALVLSQLMDGFSMLEKKLKEGPEPGASLRSQPLVGDLRQRMDKFVKNRGAQEIQSTWLEFKAKAFSKSEPGSSWELLQACGKLKRQLCAIYRLNFLTTAPSRGGPHLPQHLQDQVQRLMREKLTDWKDFLLVKSRRNITMVSYLEDFPGLVHFIYVDRTTGQMVAPSLNCSQKTSSELGKGPLAAFVKTKVWSLIQLARRYLQKGYTTLLFQEGDFYCSYFLWFENDMGYKLQMIEVPVLSDDSVPIGMLGGDYYRKLLRYYSKNRPTEAVRCYELLALHLSVIPTDLLVQQAGQLARRLWEASRIPLL

SEQ ID NO: 864446 - protein, 700 aa, Homo sapiens [sequence omitted]

SEQ ID NO: 864447 - protein, 700 aa, Homo sapiens [sequence omitted]

SEQ ID NO: 864448 - protein, 322 aa, Homo sapiens
MKCVLVATEGAEVLFYWTDQEFEESLRLKFGQSENEEEELPALEDQLSTLLAPVIISSMTMLEKLSDTYTCFSTENGNFLYVLHLFGECLFIAINGDHTESEGDLRRKLYVLKYLFEVHFGLVTVDGHLIRKELRPPDLAQRVQLWEHFQSLLWTYSRLREQEQCFAVEALERLIHPQLCELCIEALERHVIQAVNTSPERGGEEALHAFLLVHSKLLAFYSSHSASSLRPADLLALILLVQDLYPSESTAEDDIQPSPRRARSSQNIPVQQAWSPHSTGPTGGSSAETVCAVHFVESGAGGDRPLQATRPFPSLLGEQGQG

SEQ ID NO: 864449 - protein, 360 aa, Homo sapiens
MKCVLVATEGAEVLFYWTDQEFEESLRLKFGQSENEEEELPALEDQLSTLLAPVIISSMTMLEKLSDTYTCFSTENGNFLYVLHLFGECLFIAINGDHTESEGDLRRKLYVLKYLFEVHFGLVTVDGHLIRKELRPPDLAQRVQLWEHFQSLLWTYSRLREQEQCFAVEALERLIHPQLCELCIEALERHVIQAVNTSPERGGEEALHAFLLVHSKLLAFYSSHSASSLRPADLLALILLVQDLYPSESTAEDDIQETDSFSLPEEYFTPAPSPGDQSSGSTIWLEGGTPPMDALQIAEDTLQTLVPHCPVPSGPRRIFLDANVKESYCPLVPHTMYCLPLWQGINLVLLTRVGEPLTLP

SEQ ID NO: 864450 - protein, 204 aa, Homo sapiens
MKCVLVATEGAEVLFYWTDQEFEESLRLKFGQSENEEEELPALEDQLSTLLAPVIISSMTMLEKLSDTYTCFSTENGNFLYVLHLAAAPRPGAACPAVGALPEPAVDLQPPAGAGAVLRRGGDYWARESSGLEAVSHSASSLRPADLLALILLVQDLYPSESTAEDDIQETDSFSLPEEYFTPAPSPGDQSSGEDRRKAGGNNS

SEQ ID NO: 864451 - protein, 117 aa, Homo sapiens
MKCVLVATEGAEVLFYWTDQEFEESLRLKFGQSENEEEEVSAGEAVPGGVDRKEPYKTPSRQRGRKTCVHPVLGSMSRVLGGVQHPSHLDPYPQGWPLDALSSVTPPPHPTSPLWTK

SEQ ID NO: 864452 - protein, 72 aa, Homo sapiens; identical to SEQ ID NO: 864437

SEQ ID NO: 864453 - protein, 283 aa, Homo sapiens
MGASVSRGRAARVPAPEPEPEEALDLSQLPPELLLVVLSHVPPRTLLGRCRQVCRGWRALVDGQALWLLILARDHGATGRALLHLARSCQSPARNARPCPLGRFCARRPIGRNLIRNPCGQEGLRKWMVQHGGDGWVVEENRTTVPGAPSQTCFVTSFSWCCKKQVLDLEEEGLWPELLDSGRIEICVSDWWGARHDSGCMYRLLVQLLDANQTVLDKFSAVPDPIPQWNNNACLHVTHVFSNIKMGVRFVSFEHRGQDTQFWAGHYGARVTNSSVIVRVRLS

SEQ ID NO: 864454 - protein, 95 aa, Homo sapiens
GHKPFLFHRRPPKVDGATRWGRLGGGGKQDNRAWGPFSDVLRDFIQVNAPAIQRSGPLLRKACLFSLPCLLHSQLVLQEAGLGPRGGGSVARTAG

SEQ ID NO: 864455 - protein, 159 aa, Homo sapiens
MGASVSRGRAARVPAPEPEPEEALDLSQLPPELLLVVLSHVPPRTLLGRCRQVCRGWRALVDGQALWLLILARDHGATGRALLHLARSCQSPARNARPCPLGRFCARRPIGRNLIRNPCGQEGLRKWMVQHGGDGWVVEENRTTVPGAPSQTCFVTSFR

SEQ ID NO: 864456 - protein, 290 aa, Homo sapiens
MGASVSRGRAARVPAPEPEPEEALDLSQLPPELLLVVLSHVPPRTLLGRCRQVCRGWRALVDGQALWLLILARDHGATGRALLHLARSCQSPARNARPCPLGRFCARRPIGRNLIRNPCGQEGLRKWMVQHGGDGWVVEENRTTVPGAPSQTCFVTSFSWCCKKQVLDLEEEGLWPELLDSGRIEICVSDWWGARHDSGCMYRLLVQLLDANQTVLDKFSAVPDPIPQWNNNACLHRHSFTMLPGLVLNSCAQAILSPQPPTVLGLQAQATASSPCVFLSAPIPALRLTR

SEQ ID NO: 864457 - protein, 290 aa, Homo sapiens; identical to SEQ ID NO: 864456

SEQ ID NO: 864458 - protein, 351 aa, Homo sapiens
MGASVSRGRAARVPAPEPEPEEALDLSQLPPELLLVVLSHVPPRTLLGRCRQVCRGWRALVDGQALWLLILARDHGATGRALLHLARSCQSPARNARPCPLGRFCARRPIGRNLIRNPCGQEGLRKWMVQHGGDGWVVEENRTTVPGAPSQTCFVTSFSWCCKKQVLDLEEEGLWPELLDSGRIEICVSDWWGARHDSGCMYRLLVQLLDANQTVLDKFSAVPDPIPQWNNNACLHRHSFTMLPGLVLNSCAQAILSPQPPTVLGLQAQATASSPCVFLSAPIPALRLTRRSLTVSPRLECSGVISAHCKLCLPGSRHSPASASRVAGTTGAHHHTRLIFRIFSRDGVSPY

SEQ ID NO: 864459 - protein, 283 aa, Homo sapiens; identical to SEQ ID NO: 864453

SEQ ID NO: 864460 - protein, 171 aa, Homo sapiens
LGTSLFYFTEGLRKWMVQHGGDGWVVEENRTTVPGAPSQTCFVTSFSWCCKKQVLDLEEEGLWPELLDSGRIEICVSDWWGARHDSGCMYRLLVQLLDANQTVLDKFSAVPDPIPQWNNNACLHVTHVFSNIKMGVRFVSFEHRGQDTQFWAGHYGARVTNSSVIVRVRLS

SEQ ID NO: 864461 - protein, 244 aa, Homo sapiens
MGASVSRGRAARVPAPEPEPEEALDLSQLPPELLLVVLSHVPPRTLLGRCRQVCRGWRALVDGQALWLLILARDHGATGRALLHLARSCQSPARNARPCPLGRFCARRPIGRNLIRNPCGQEGLRKWMVQHGGDGWVVEENRTTVPGAPSQTCFVTSFSWCCKKQVLDLEEEGLWPELLDSGRIEICVSDWWGARHDSGCMYRLLVQLLDANQTVLDKFSAVPDPIPQWNNNACLHCSSMLNSS

SEQ ID NO: 864462 - protein, 208 aa, Homo sapiens
SRRGAPPGPGVGLGVRCRCGRRGGLIACNSGHTHRPRGLRDIGAIKDGLGDGDLGTGPRDGEDGGAAGRIRAGRGCAPRRLLVPDALTLPLPAATAGPGGGTMGASVSRGRAARVPAPEPEPEEALDLSQLPPELLLVVLSHVPPRTLLGRCRQVCRGWRALVDGQALWLLILARDHGATGRALLHLARSCQSPARNARPCPLGRFCA

SEQ ID NO: 864463 - protein, 407 aa, Homo sapiens
MAAKMEITLSSNTEASSKQERHIIAKLEEKRGPPLQKNCPDPELCRQSFRRFCYQEVSGPQEALSQLRQLCRQWLQPELHTKEQILELLVMEQFLTILPPEIQARVRHRCPMSSKEIVTLVEDFHRASKKPKQWVAVCMQGQKVLLEKTGSQLGEQELPDFQPQTPRRDLRESSPAEPSQAGAYDRLSPHHWEKSPLLQEPTPKLAGTEAPRMRSDNKENPQQEGAKGAKPCAVSAGRSKGNGLQNPEPRGANMSEPRLSRRQVSSPNAQKPFAHYQRHCRVEYISSPLKSHPLRELKKSKGGKRSLSNRLQHLGHQPTRSAKKPYKCDDCGKSFTWNSELKRHKRVHTGERPYTCGECGNCFGRQSTLKLHQRIHTGEKPYQCGQCGKSFRQSSNLHQHHRLHHGD

SEQ ID NO: 864464 - protein, 407 aa, Homo sapiens; identical to SEQ ID NO: 864463

SEQ ID NO: 864465 - protein, 234 aa, Homo sapiens
MAAKMEITLSSNTEASSKQERHIIAKLEEKRGPPLQKNCPDPELCRQSFRRFCYQEVSGPQEALSQLRQLCRQWLQPELHTKEQILELLVMEQFLTILPPEIQARVRHRCPMSSKEIVTLVEDFHRASKKPKQWVAVCMQGQKVLLEKTGSQLGEQELPDFQPQTPRRDLRESSPAEPSQAGAYDRLSPHHWEKSPLLQEPTPKLAGTELLIEKTDPNMATDELPCKLWLSFIA

SEQ ID NO: 864466 - protein, 249 aa, Homo sapiens
MAAKMEITLSSNTEASSKQERHIIAKLEEKRGPPLQKNCPDPELCRQSFRRFCYQEVSGPQEALSQLRQLCRQWLQPELHTKEQILELLVMEQFLTILPPEIQARVRHRCPMSSKEIVTLVEDFHRASKKPKQWVAVCMQGQKVLLEKTGSQLGEQELPDFQPQTPRRDLRESSPAEPSQAGAYDRLSPHHWEKSPLLQEPTPKLAGTGKHSAFSLPLISPLSPSMYLMVLQRHRPHVCVFLNVIYNSR

SEQ ID NO: 864467 - protein, 407 aa, Homo sapiens; identical to SEQ ID NO: 864463

SEQ ID NO: 864468 - protein, 234 aa, Homo sapiens; identical to SEQ ID NO: 864465

SEQ ID NO: 864469 - protein, 249 aa, Homo sapiens; identical to SEQ ID NO: 864466

SEQ ID NO: 864470 - protein, 848 aa, Homo sapiens
MNSSSANITYASRKRRKPVQKTVKPIPAEGIKSNPSKRHRDRLNTELDRLASLLPFPQDVINKLDKLSVLRLSVSYLRAKSFFDVALKSSPTERNGGQDNCRAANFREGLNLQEGEFLLQALNGFVLVVTTDALVFYASSTIQDYLGFQQSDVIHQSVYELIHTEDRAEFQRQLHWALNPSQCTESGQGIEEATGLPQTVVCYNPDQIPPENSPLMERCFICRLRCLLDNSSGFLAMNFQGKLKYLHGQKKKGKDGSILPPQLALFAIATPLQPPSILEIRTKNFIFRTKHKLDFTPIGCDAKGRIVLGYTEAELCTRGSGYQFIHAADMLYCAESHIRMIKTGESGMIVFRLLTKNNRWTWVQSNARLLYKNGRPDYIIVTQRPLTDEEGTEHLRKRNTKLPFMFTTGEAVLYEATNPFPAIMDPLPLRTKNGTSGKDSATTSTLSKDSLNPSSLLAAMMQQDESIYLYPASSTSSTAPFENNFFNESMNECRNWQDNTAPMGNDTILKHEQIDQPQDVNSFAGGHPGLFQDSKNSDLYSIMKNLGIDFEDIRHMQNEKFFRNDFSGEVDFRDIDLTDEILTYVQDSLSKSPFIPSDYQQQQSLALNSSCMVQEHLHLEQQQQHHQKQVVVEPQQQLCQKMKHMQVNGMFENWNSNQFVPFNCPQQDPQQYNVFTDLHGISQEFPYKSEMDSMPYTQNFISCNQPVLPQHSKCTELDYPMGSFEPSPYPTTSSLEDFVTCLQLPENQKHGLNPQSAIITPQTCYAGAVSMYQCQPEPQHTHVGQMQYNPVLPGQQAFLNKFQNGVLNETYPAELNNINNTQTTTHLQPLHHPSEARPFPDLTSSGFL

SEQ ID NO: 864471 - protein, 848 aa, Homo sapiens; identical to SEQ ID NO: 864470

SEQ ID NO: 864472 - protein, 848 aa, Homo sapiens; identical to SEQ ID NO: 864470

SEQ ID NO: 864473 - protein, 833 aa, Homo sapiens
MPAKLLRVKPIPAEGIKSNPSKRHRDRLNTELDRLASLLPFPQDVINKLDKLSVLRLSVSYLRAKSFFDVALKSSPTERNGGQDNCRAANFREGLNLQEGEFLLQALNGFVLVVTTDALVFYASSTIQDYLGFQQSDVIHQSVYELIHTEDRAEFQRQLHWALNPSQCTESGQGIEEATGLPQTVVCYNPDQIPPENSPLMERCFICRLRCLLDNSSGFLAMNFQGKLKYLHGQKKKGKDGSILPPQLALFAIATPLQPPSILEIRTKNFIFRTKHKLDFTPIGCDAKGRIVLGYTEAELCTRGSGYQFIHAADMLYCAESHIRMIKTGESGMIVFRLLTKNNRWTWVQSNARLLYKNGRPDYIIVTQRPLTDEEGTEHLRKRNTKLPFMFTTGEAVLYEATNPFPAIMDPLPLRTKNGTSGKDSATTSTLSKDSLNPSSLLAAMMQQDESIYLYPASSTSSTAPFENNFFNESMNECRNWQDNTAPMGNDTILKHEQIDQPQDVNSFAGGHPGLFQDSKNSDLYSIMKNLGIDFEDIRHMQNEKFFRNDFSGEVDFRDIDLTDEILTYVQDSLSKSPFIPSDYQQQQSLALNSSCMVQEHLHLEQQQQHHQKQVVVEPQQQLCQKMKHMQVNGMFENWNSNQFVPFNCPQQDPQQYNVFTDLHGISQEFPYKSEMDSMPYTQNFISCNQPVLPQHSKCTELDYPMGSFEPSPYPTTSSLEDFVTCLQLPENQKHGLNPQSAIITPQTCYAGAVSMYQCQPEPQHTHVGQMQYNPVLPGQQAFLNKFQNGVLNETYPAELNNINNTQTTTHLQPLHHPSEARPFPDLTSSGFL

SEQ ID NO: 864474 - protein, 848 aa, Homo sapiens; identical to SEQ ID NO: 864470

SEQ ID NO: 864475 - protein, 577 aa, Homo sapiens
MNSSSANITYASRKRRKPVQKTVKPIPAEGIKSNPSKRHRDRLNTELDRLASLLPFPQDVINKLDKLSVLRLSVSYLRAKSFFDVALKSSPTERNGGQDNCRAANFREGLNLQEGEFLLQALNGFVLVVTTDALVFYASSTIQDYLGFQQSDVIHQSVYELIHTEDRAEFQRQLHWALNPSQCTESGQGIEEATGLPQTVVCYNPDQIPPENSPLMERCFICRLRCLLDNSSGFLAMNFQGKLKYLHGQKKKGKDGSILPPQLALFAIATPLQPPSILEIRTKNFIFRTKHKLDFTPIGCDAKGRIVLGYTEAELCTRGSGYQFIHAADMLYCAESHIRMIKTGESGMIVFRLLTKNNRWTWVQSNARLLYKNGRPDYIIVTQRPLTDEEGTEHLRKRNTKLPFMFTTGEAVLYEATNPFPAIMDPLPLRTKNGTSGKDSATTSTLSKDSLNPSSLLAAMMQQDESIYLYPASSTSSTAPFENNFFNESMNECRNWQDNTAPMGNDTILKHEQIDQPQDVNSFAGGHPGLFQDSKNSDLYSIMKNLGIDFEDIRHMQKAKIMSKDFVCWYSSQETAT

SEQ ID NO: 864476 - protein, 848 aa, Homo sapiens; identical to SEQ ID NO: 864470

SEQ ID NO: 864477 - protein, 848 aa, Homo sapiens; identical to SEQ ID NO: 864470

SEQ ID NO: 864478 - protein, 633 aa, Homo sapiens
MERCFICRLRCLLDNSSGFLAMNFQGKLKYLHGQKKKGKDGSILPPQLALFAIATPLQPPSILEIRTKNFIFRTKHKLDFTPIGCDAKGRIVLGYTEAELCTRGSGYQFIHAADMLYCAESHIRMIKTGESGMIVFRLLTKNNRWTWVQSNARLLYKNGRPDYIIVTQRPLTDEEGTEHLRKRNTKLPFMFTTGEAVLYEATNPFPAIMDPLPLRTKNGTSGKDSATTSTLSKDSLNPSSLLAAMMQQDESIYLYPASSTSSTAPFENNFFNESMNECRNWQDNTAPMGNDTILKHEQIDQPQDVNSFAGGHPGLFQDSKNSDLYSIMKNLGIDFEDIRHMQNEKFFRNDFSGEVDFRDIDLTDEILTYVQDSLSKSPFIPSDYQQQQSLALNSSCMVQEHLHLEQQQQHHQKQVVVEPQQQLCQKMKHMQVNGMFENWNSNQFVPFNCPQQDPQQYNVFTDLHGISQEFPYKSEMDSMPYTQNFISCNQPVLPQHSKCTELDYPMGSFEPSPYPTTSSLEDFVTCLQLPENQKHGLNPQSAIITPQTCYAGAVSMYQCQPEPQHTHVGQMQYNPVLPGQQAFLNKFQNGVLNETYPAELNNINNTQTTTHLQPLHHPSEARPFPDLTSSGFL

SEQ ID NO: 864479 - protein, 548 aa, Homo sapiens
MNSSSANITYASRKRRKPVQKTVKPIPAEGIKSNPSKRHRDRLNTELDRLASLLPFPQDVINKLDKLSVLRLSVSYLRAKSFFDVALKSSPTERNGGQDNCRAANFREGLNLQEGEFLLQALNGFVLVVTTDALVFYASSTIQDYLGFQQSDVIHQSVYELIHTEDRAEFQRQLHWALNPSQCTESGQGIEEATGLPQTVVCYNPDQIPPENSPLMERCFICRLRCLLDNSSGFLAMNFQGKLKYLHGQKKKGKDGSILPPQLALFAIATPLQPPSILEIRTKNFIFRTKHKLDFTPIGCDAKGRIVLGYTEAELCTRGSGYQFIHAADMLYCAESHIRMIKTGESGMIVFRLLTKNNRWTWVQSNARLLYKNGRPDYIIVTQRPLTDEEGTEHLRKRNTKLPFMFTTGEAVLYEATNPFPAIMDPLPLRTKNGTSGKDSATTSTLSKDSLNPSSLLAAMMQQDESIYLYPASSTSSTAPFENNFFNESMNECRNWQDNTAPMGNDTILKHEQIDQPQDVNSFAGGHPGVSPVSKISDSAERRFTLRN

SEQ ID NO: 864480 - protein, 85 aa, Homo sapiens
CTPPAASVSLSVVLRMLGPRSSGLEAQGPSREGHHPRHGAAATAQSTGQRKLQDEDNSITRRKPGSLCYHKEERCLTKTVCKDFV

SEQ ID NO: 864481 - protein, 113 aa, Homo sapiens
FRFNTRAAAGASSILGQLILVISWRFTLLQKPECKRLFPVPSPRGSNQLRGTEPPSIQSASPLGSQGNDGWLLKPILDKLTPKNENFQGTGTLSWGTLGHIIPHSIQIKNTFY

SEQ ID NO: 864482 - protein, 1076 aa, Homo sapiens [sequence omitted]

SEQ ID NO: 864483 - protein, 211 aa, Homo sapiens
MDLRTMTQSLVTLAEDNIAFFSSQGPGETAQRLSGVFAGVREQALGLEPALGRLLGVAHLFDLDPETPANGYRSLVHTARCCLAHLLHKSRYVASNRRSIFFRTSHNLAELEAYLAALTQLRALVYYAQRLLVTNRPGVLFFEGDEGLTADFLREYVTLHKGCFYGRCLGFQFTPAIRPFLQTISIGLVSFGEHYKRNETGLSESQPGSTR

SEQ ID NO: 864484 - protein, 1000 aa, Homo sapiens
MEPGSKSVSRSDWQPEPHQRPITPLEPGPEKTPIAQPESKTLQGSNTQQKPASNQRPLTQQETPAQHDAESQKEPRAQQKSASQEEFLAPQKPAPQQSPYIQRVLLTQQEAASQQGPGLGKESITQQEPALRQRHVAQPGPGPGEPPPAQQEAESTPAAQAKPGAKREPSAPTESTSQETPEQSDKQTTPVQGAKSKQGSLTELGFLTKLQELSIQRSALEWKALSEWVADSESESDVGSSSDTDSPATMGGMVAQGVKLGFKGKSGYKVMSGYSGTSPHEKTSARNHRHYQDTASRLIHNMDLRTMTQSLVTLAEDNIAFFSSQGPGETAQRLSGVFAGVREQALGLEPALGRLLGVAHLFDLDPETPANGYRSLVHTARCCLAHLLHKSRYVASNRRSIFFRTSHNLAELEAYLAALTQLRALVYYAQRLLVTNRPGVLFFEGDEGLTADFLREYVTLHKGCFYGRCLGFQFTPAIRPFLQTISIGLVSFGEHYKRNETGLSVAASSLFTSGRFAIDPELRGAEFERITQNLDVHFWKAFWNITEMEVLSSLANMASATVRVSRLLSLPPEAFEMPLTADPTLTVTISPPLAHTGPGPVLVRLISYDLREGQDSEELSSLIKSNGQRSLELWPRPQQAPRSRSLIVHFHGGGFVAQTSRSHEPYLKSWAQELGAPIISIDYSLAPEAPFPRALEECFFAYCWAIKHCALLGAKTEDHSNSDQKALGMMGLVRRDTALLLRDFRLGASSWLNSFLELSGRKSQKMSEPIAEPMRRSVSEAALAQPQGPLGTDSLKNLTLRDLSLRGNSETSSDTPEMSLSAETLSPSTPSDVNFLLPPEDAGEEAEAKNELSPMDRGLGVRAAFPEGFHPRRSSQGATQMPLYSSPIVKNPFMSPLLAPDSMLKSLPPVHIVACALDPMLDDSVMLARRLRNLGQPVTLRVVEDLPHGFLTLAALCRETRQAAELCVERIRLVLTPPAGAGPSGETGAAGVDGGCGGRH

SEQ ID NO: 864485 - protein, 775 aa, Homo sapiens
MDLRTMTQSLVTLAEDNIAFFSSQGPGETAQRLSGVFAGVREQALGLEPALGRLLGVAHLFDLDPETPANGYRSLVHTARCCLAHLLHKSRYVASNRRSIFFRTSHNLAELEAYLAALTQLRALVYYAQRLLVTNRPGVLFFEGDEGLTADFLREYVTLHKGCFYGRCLGFQFTPAIRPFLQTISIGLVSFGEHYKRNETGLSVAASSLFTSGRFAIDPELRGAEFERITQNLDVHFWKAFWNITEMEVLSSLANMASATVRVSRLLSLPPEAFEMPLTADPTLTVTISPPLAHTGPGPVLVRLISYDLREGQDSEELSSLIKSNGQRSLELWPRPQQAPRSRSLIVHFHGGGFVAQTSRSHEPYLKSWAQELGAPIISIDYSLAPEAPFPRALEECFFAYCWAIKHCALLGSTGERICLAGDSAGGNLCFTVALRAAAYGVRVPDGIMAAYPATMLQPAASPSRLLSLMDPLLPLSVLSKCVSAYAGAKTEDHSNSDQKALGMMGLVRRDTALLLRDFRLGASSWLNSFLELSGRKSQKMSEPIAEPMRRSVSEAALAQPQGPLGTDSLKNLTLRDLSLRGNSETSSDTPEMSLSAETLSPSTPSDVNFLLPPEDAGEEAEAKNELSPMDRGLGVRAAFPEGFHPRRSSQGATQMPLYSSPIVKNPFMSPLLAPDSMLKSLPPVHIVACALDPMLDDSVMLARRLRNLGQPVTLRVVEDLPHGFLTLAALCRETRQAAELCVERIRLVLTPPAGAGPSGETGAAGVDGGCGGRH

SEQ ID NO: 864486 - protein, 775 aa, Homo sapiens; identical to SEQ ID NO: 864485

SEQ ID NO: 864487 - protein, 665 aa, Homo sapiens
MRASWTRVPARIPYSLCDQGQRMPSVFPTWGMLQAPMFRAPALLRGKGGRRLAGVTQRGSLAFTPAIRPFLQTISIGLVSFGEHYKRNETGLSVAASSLFTSGRFAIDPELRGAEFERITQNLDVHFWKAFWNITEMEVLSSLANMASATVRVSRLLSLPPEAFEMPLTADPTLTVTISPPLAHTGPGPVLVRLISYDLREGQDSEELSSLIKSNGQRSLELWPRPQQAPRSRSLIVHFHGGGFVAQTSRSHEPYLKSWAQELGAPIISIDYSLAPEAPFPRALEECFFAYCWAIKHCALLGSTGERICLAGDSAGGNLCFTVALRAAAYGVRVPDGIMAAYPATMLQPAASPSRLLSLMDPLLPLSVLSKCVSAYAGAKTEDHSNSDQKALGMMGLVRRDTALLLRDFRLGASSWLNSFLELSGRKSQKMSEPIAEPMRRSVSEAALAQPQGPLGTDSLKNLTLRDLSLRGNSETSSDTPEMSLSAETLSPSTPSDVNFLLPPEDAGEEAEAKNELSPMDRGLGVRAAFPEGFHPRRSSQGATQMPLYSSPIVKNPFMSPLLAPDSMLKSLPPVHIVACALDPMLDDSVMLARRLRNLGQPVTLRVVEDLPHGFLTLAALCRETRQAAELCVERIRLVLTPPAGAGPSGETGAAGVDGGCGGRH

SEQ ID NO: 864488 - protein, 58 aa, Homo sapiens
MASATVRVSRLLSLPPEAFEMPLTADPTLTVTISPPLAHTGPGPVLVRLISYDLREGQ

SEQ ID NO: 864489 - protein, 682 aa, Homo sapiens
MEPGSKSVSRSDWQPEPHQRPITPLEPGPEKTPIAQPESKTLQGSNTQQKPASNQRPLTQQETPAQHDAESQKEPRAQQKSASQEEFLAPQKPAPQQSPYIQRVLLTQQEAASQQGPGLGKESITQQEPALRQRHVAQPGPGPGEPPPAQQEAESTPAAQAKPGAKREPSAPTESTSQETPEQSDKQTTPVQGAKSKQGSLTELGFLTKLQELSIQRSALEWKALSEWVADSESESDVGSSSDTDSPATMGGMVAQGVKLGFKGKSGYKVMSGYSGTSPHEKTSARNHRHYQDTASRLIHNMDLRTMTQSLVTLAEDNIAFFSSQGPGETAQRLSGVFAGVREQALGLEPALGRLLGVAHLFDLDPETPANGYRSLVHTARCCLAHLLHKSRYVASNRRSIFFRTSHNLAELEAYLAALTQLRALVYYAQRLLVTNRPGVLFFEGDEGLTADFLREYVTLHKGCFYGRCLGFQFTPAIRPFLQTISIGLVSFGEHYKRNETGLSVAASSLFTSGRFAIDPELRGAEFERITQNLDVHFWKAFWNITEMEVLSSLANMASATVRVSRLLSLPPEAFEMPLTADPTLTVTISPPLAHTGPGPVLVRLISYDLREGQDSEELSSLIKSNGQRSLELWPRPQQAPRSRSLIVHFHGGGFVAQTSRSHEPYLKSWAQELGAPIISID

SEQ ID NO: 864490 - protein, 525 aa, Homo sapiens
MEPGSKSVSRSDWQPEPHQRPITPLEPGPEKTPIAQPESKTLQGSNTQQKPASNQRPLTQQETPAQHDAESQKEPRAQQKSASQEEFLAPQKPAPQQSPYIQRVLLTQQEAASQQGPGLGKESITQQEPALRQRHVAQPGPGPGEPPPAQQEAESTPAAQAKPGAKREPSAPTESTSQETPEQSDKQTTPVQGAKSKQGSLTELGFLTKLQELSIQRSALEWKALSEWVADSESESDVGSSSDTDSPATMGGMVAQGVKLGFKGKSGYKVMSGYSGTSPHEKTSARNHRHYQDTASRLIHNMDLRTMTQSLVTLAEDNIAFFSSQGPGETAQRLSGVFAGVREQALGLEPALGRLLGVAHLFDLDPETPANGYRSLVHTARCCLAHLLHKSRYVASNRRSIFFRTSHNLAELEAYLAALTQLRALVYYAQRLLVTNRPGVLFFEGDEGLTADFLREYVTLHKGCFYGRCLGFQFTPAIRPFLQTISIGLVSFGEHYKRNETGLSVAASSLFTQRPLCHRPRAAWG

SEQ ID NO: 864491 - protein, 271 aa, Homo sapiens
MGLVRRDTALLLRDFRLGASSWLNSFLELSGRKSQKMSEPIAEPMRRSVSEAALAQPQGPLGTDSLKNLTLRDLSLRGNSETSSDTPEMSLSAETLSPSTPSDVNFLLPPEDAGEEAEAKNELSPMDRGLGVRAAFPEGFHPRRSSQGATQMPLYSSPIVKNPFMSPLLAPDSMLKSLPPVHIVACALDPMLDDSVMLARRLRNLGQPVTLRVVEDLPHGFLTLAALCRETRQAAELCVERIRLVLTPPAGAGPSGETGAAGVDGGCGGRH

SEQ ID NO: 864492 - protein, 69 aa, Homo sapiens
ARYPRAPVSIHQASSTTGSLHETHHDYCNRADCYVEIQRGARGLMNGYRGPANGFRGKKIKKEVLMTFY

SEQ ID NO: 864493 - protein, 709 aa, Homo sapiens
MPSATSHSGSGSKSSGPPPPSGSSGSEAAAGAGAAAPASQHPATGTGAVQTEAMKQILGVIDKKLRNLEKKKGKLDDYQERMNKGERLNQDQLDAVSKYQEVTNNLEFAKELQRSFMALSQDIQKTIKKTARREQLMREEAEQKRLKTVLELQYVLDKLGDDEVRTDLKQGLNGVPILSEEELSLLDEFYKLVDPERDMSLRLNEQYEHASIHLWDLLEGKEKPVCGTTYKVLKEIVERVFQSNYFDSTHNHQNGLCEEEEAASAPAVEDQVPEAEPEPAEEYTEQSEVESTEYVNRQFMAETQFTSGEKEQVDEWTVETVEVVNSLQQQPQAASPSVPEPHSLTPVAQADPLVRRQRVQDLMAQMQGPYNFIQDSMLDFENQTLDPAIVSAQPMNPTQNMDMPQLVCPPVHSESRLAQPNQVPVQPEATQVPLVSSTSEGYTASQPLYQPSHATEQRPQKEPIDQIQATISLNTDQTTASSSLPAASQPQVFQAGTSKPLHSSGINVNAAPFQSMQTVFNMNAPVPPVNEPETLKQQNQYQASYNQSFSSQPHQVEQTELQQEQLQTVVGTYHGSPDQSHQVTGNHQQPPQQNTGFPRSNQPYYNSRGVSRGGSRGARGLMNGYRGPANGFRGGYDGYRPSFSNTPNSGYTQSQFSAPRDYSGYQRDGYQQNFKRGSGQSGPRGAPRGRGGPPRPNRGMPQMNTQQVN

SEQ ID NO: 864494 - protein, 709 aa, Homo sapiens; identical to SEQ ID NO: 864493

SEQ ID NO: 864495 - protein, 709 aa, Homo sapiens; identical to SEQ ID NO: 864493

SEQ ID NO: 864496 - protein, 694 aa, Homo sapiens
MPSATSHSGSGSKSSGPPPPSGSSGSEAAAGAGAAAPASQHPATGTGAVQTEAMKQILGVIDKKLRNLEKKKGKLDDYQERMNKGERLNQDQLDAVSKYQEVTNNLEFAKELQRSFMALSQDIQKTIKKTARREQLMREEAEQKRLKTVLELQYVLDKLGDDEVRTDLKQGLNGVPILSEEELSLLDEFYKLVDPERDMSLRLNEQYEHASIHLWDLLEGKEKPVCGTTYKVLKEIVERVFQSNYFDSTHNHQNGLCEEEEAASAPAVEDQVPEAEPEPAEEYTEQSEVESTEYVNRQFMAETQFTSGEKEQVDEWTVETVEVVNSLQQQPQAASPSVPEPHSLTPVAQADPLVRRQRVQDLMAQMQGPYNFIQDSMLDFENQTLDPAIVSAQPMNPTQNMDMPQLVCPPVHSESRLAQPNQVPVQPEATQVPLVSSTSEGYTASQPLYQPSHATEQRPQKEPIDQIQATISLNTDQTTASSSLPAASQPQVFQAGTSKPLHSSGINVNAAPFQSMQTVFNMNAPVPPVNEPETLKQQNQYQASYNQSFSSQPHQVEQTELQQEQLQTVVGTYHGSPDQSHQVTGNHQQPPQQNTGFPRSNQPYYNSRGVSRGGSRGARGLMNGYRGPANGFRGGYDGYRPSFSNTPNSGYTQSQFSAPRDYSGYQRDGYQQNFKRGSGQSGPRGAPRGNILWW

SEQ ID NO: 864497 - protein, 698 aa, Homo sapiens
MPSATSHSGSGSKSSGPPPPSGSSGSEAAAGAGAAAPASQHPATGTGAVQTEAMKQILGVIDKKLRNLEKKKGKLDDYQERMNKGERLNQDQLDAVSKYQEVTNNLEFAKELQRSFMALSQDIQKTIKKTARREQLMREEAEQKRLKTVLELQYVLDKLGDDEVRTDLKQGLNGVPILSEEELSLLDEFYKLVDPERDMSLRLNEQYEHASIHLWDLLEGKEKPVCGTTYKVLKEIVERVFQSNYFDSTHNHQNGLCEEEEAASAPAVEDQVPEAEPEPAEEYTEQSEVESTEYVNRQFMAETQFTSGEKEQVDEWTVETVEVVNSLQQQPQAASPSVPEPHSLTPVAQADPLVRRQRVQDLMAQMQGPYNFIQDSMLDFENQTLDPAIVSAQPMNPTQNMDMPQLVCPPVHSESRLAQPNQVPVQPEATQVPLVSSTSEGYTASQPLYQPSHATEQRPQKEPIDQIQATISLNTDQTTASSSLPAASQPQVFQAGTSKPLHSSGINVNAAPFQSMQTVFNMNAPVPPVNEPETLKQQNQYQASYNQSFSSQPHQVEQTELQQEQLQTVVGTYHGSPDQSHQVTGNHQQPPQQNTGFPRSNQPYYNSRGVSRGGSRGARGLMNGYRGPANGFRGGYDGYRPSFSNTPNSGYTQSQFSAPRDYSGYQRDGYQQNFKRGGRGGPPRPNRGMPQMNTQQVN

SEQ ID NO: 864498 - protein, 692 aa, Homo sapiens
MPSATSHSGSGSKSSGPPPPSGSSGSEAAAGAGAAAPASQHPATGTGAVQTEAMKQILGVIDKKLRNLEKKKGKLDDYQERMNKGERLNQDQLDAVSKYQEVTNNLEFAKELQRSFMALSQDIQKTIKKTARREQLMREEAEQKRLKTVLELQYVLDKLGDDEVRTDLKQGLNGVPILSEEELSLLDEFYKLVDPERDMSLRLNEQYEHASIHLWDLLEGKEKPVCGTTYKVLKEIVERVFQSNYFDSTHNHQNGLCEEEEAASAPAVEDQVPEAEPEPAEEYTEQSEVESTEYVNRQFMAETQFTSGEKEQVDEWTVETVEVVNSLQQQPQAASPSVPEPHSLTPVAQADPLVRRQRVQDLMAQMQGPYNFIQDSMLDFENQTLDPAIVSAQPMNPTQNMDMPQLVCPPVHSESRLAQPNQVPVQPEATQVPLVSSTSEGYTASQPLYQPSHATEQRPQKEPIDQIQATISLNTDQTTASSSLPAASQPQVFQAGTSKPLHSSGINVNAAPFQSMQTVFNMNAPVPPVNEPETLKQQNQYQASYNQSFSSQPHQVEQTELQQEQLQTVVGTYHGSPDQSHQVTGNHQQPPQQNTGFPRSNQPYYNSRGVSRGGSRGARGLMNGYRGPANGFRGGYDGYRPSFSNTPNSGYTQSQFSAPRDYSGYQPLGRVDHGEPHEVVEGPQDPTEGCRK

SEQ ID NO: 864499 - protein, 709 aa, Homo sapiens; identical to SEQ ID NO: 864493

SEQ ID NO: 864500 - protein, 671 aa, Homo sapiens
MPSATSHSGSGSKSSGPPPPSGSSGSEAAAGAGAAAPASQHPATGTGAVQTEAMKQILGVIDKKLRNLEKKKGKLDDYQERMNKGERLNQDQLDAVSKYQEVTNNLEFAKELQRSFMALSQDIQKTIKKTARREQLMREEAEQKRLKTVLELQYVLDKLGDDEVRTDLKQGLNGVPILSEEELSLLDEFYKLVDPERDMSLRLNEQYEHASIHLWDLLEGKEKPVCGTTYKVLKEIVERVFQSNYFDSTHNHQNGLCEEEEAASAPAVEDQVPEAEPEPAEEYTEQSEVESTEYVNRQFMAETQFTSGEKEQVDEWTVETVEVVNSLQQQPQAASPSVPEPHSLTPVAQADPLVRRQRVQDLMAQMQGPYNFIQDSMLDFENQTLDPAIVSAQPMNPTQNMDMPQLVCPPVHSESRLAQPNQVPVQPEATQVPLVSSTSEGYTASQPLYQPSHATEQRPQKEPIDQIQATISLNTDQTTASSSLPAASQPQVFQAGTSKPLHSSGINVNAAPFQSMQTVFNMNAPVPPVNEPETLKQQNQYQASYNQSFSSQPHQVEQTELQQEQLQTVVGTYHGSPDQSHQVTGNHQQPPQQNTGFPRSNQPYYNSRGARGLMNGYRGPANGFRGGYDGYRPSFSNTPNSGYTQSQFSAPRDYSGYQRDAANEHSASELI

SEQ ID NO: 864501 - protein, 709 aa, Homo sapiens; identical to SEQ ID NO: 864493

SEQ ID NO: 864502 - protein, 709 aa, Homo sapiens; identical to SEQ ID NO: 864493

SEQ ID NO: 864503 - protein, 709 aa, Homo sapiens; identical to SEQ ID NO: 864493

SEQ ID NO: 864504 - protein, 561 aa, Homo sapiens
MPSATSHSGSGSKSSGPPPPSGSSGSEAAAGAGAAAPASQHPATGTGAVQTEAMKQILGVIDKKLRNLEKKKGKLDDYQERMNKGERLNQDQLDAVSKYQEVTNNLEFAKELQRSFMALSQDIQKTIKKTARREQLMREEAEQKRLKTVLELQYVLDKLGDDEVRTDLKQGLNGVPILSEEELSLLDEFYKLVDPERDMSLRLNEQYEHASIHLWDLLEGKEKPVCGTTYKVLKEIVERVFQSNYFDSTHNHQNGLCEEEEAASAPAVEDQVPEAEPEPAEEYTEQSEVESTEYVNRQFMAETQFTSGEKEQVDEWTVETVEVVNSLQQQPQAASPSVPEPHSLTPVAQADPLVRRQRVQDLMAQMQGPYNFIQDSMLDFENQTLDPAIVSAQPMNPTQNMDMPQLVCPPVHSESRLAQPNQVPVQPEATQVPLVSSTSEGYTASQPLYQPSHATEQRPQKEPIDQIQATISLNTDQTTASSSLPAASQPQVFQAGTSKPLHSSGINVNAAPFQSMQTVFNMNAPVPPVNEPVYHNMLPEELLSICSPFQETYCKGTVFIP

SEQ ID NO: 864505 - protein, 709 aa, Homo sapiens; identical to SEQ ID NO: 864493

SEQ ID NO: 864506 - protein, 694 aa, Homo sapiens; identical to SEQ ID NO: 864496

SEQ ID NO: 864507 - protein, 692 aa, Homo sapiens; identical to SEQ ID NO: 864498

SEQ ID NO: 864508 - protein, 120 aa, Homo sapiens
MPSATSHSGSGSKSSGPPPPSGSSGSEAAAGAGAAAPASQHPATGTGAVQTEAMKQILGVIDKKLRNLEKKKPDSDAALYPRPLYYSSAVGPAFWPLGVGHVRVGACRQDFTVWCPSFRL

SEQ ID NO: 864509 - protein, 163 aa, Homo sapiens
AGSRHARYVSLTGRRFTTSRCFSLLGLKCPRHIHWKGFRTTPSGSSGSEAAAGAGAAAPASQHPATGTGAVQTEAMKQILGVIDKKLRNLEKKKVPGVGGEGRGGCGRALRPLRPWSLEPSLLFVSGALLGPLLPPPGPHAPSPRSAGASCPENGLLEEALVT

SEQ ID NO: 864510 - protein, 262 aa, Homo sapiens
MPSATSHSGSGSKSSGPPPPSGSSGSEAAAGAGAAAPASQHPATGTGAVQTEAMKQILGVIDKKLRNLEKKKGKLDDYQERMNKGERLNQDQLDAAGKAFGMPTMRLLSFVVLALFAVTQAEEGARLLVPNQLLNRYAVEGRELTLQYNIYNVGSSAALDLELSDDSFLQKTFGIVVWMVHVKWDRIGPVALSPHCGLRLFRLFFHFPSAHFTGRGGRGLVSQALARGLAAVDGVPFGGLVRSPGPLVPGMPRSWGAPQAQG

SEQ ID NO: 864511 - protein, 709 aa, Homo sapiens; identical to SEQ ID NO: 864493

SEQ ID NO: 864512 - protein, 731 aa, Homo sapiens
AGSRHARYVSLTGRRFTTSRCFSLLGLKCPRHIHWKGFRTTPSGSSGSEAAAGAGAAAPASQHPATGTGAVQTEAMKQILGVIDKKLRNLEKKKGKLDDYQERMNKGERLNQDQLDAVSKYQEVTNNLEFAKELQRSFMALSQDIQKTIKKTARREQLMREEAEQKRLKTVLELQYVLDKLGDDEVRTDLKQGLNGVPILSEEELSLLDEFYKLVDPERDMSLRLNEQYEHASIHLWDLLEGKEKPVCGTTYKVLKEIVERVFQSNYFDSTHNHQNGLCEEEEAASAPAVEDQVPEAEPEPAEEYTEQSEVESTEYVNRQFMAETQFTSGEKEQVDEWTVETVEVVNSLQQQPQAASPSVPEPHSLTPVAQADPLVRRQRVQDLMAQMQGPYNFIQDSMLDFENQTLDPAIVSAQPMNPTQNMDMPQLVCPPVHSESRLAQPNQVPVQPEATQVPLVSSTSEGYTASQPLYQPSHATEQRPQKEPIDQIQATISLNTDQTTASSSLPAASQPQVFQAGTSKPLHSSGINVNAAPFQSMQTVFNMNAPVPPVNEPETLKQQNQYQASYNQSFSSQPHQVEQTELQQEQLQTVVGTYHGSPDQSHQVTGNHQQPPQQNTGFPRSNQPYYNSRGVSRGGSRGARGLMNGYRGPANGFRGGYDGYRPSFSNTPNSGYTQSQFSAPRDYSGYQRDGYQQNFKRGSGQSGPRGAPRGRGGPPRPNRGMPQMNTQQVN

SEQ ID NO: 864513 - protein, 709 aa, Homo sapiens; identical to SEQ ID NO: 864493

SEQ ID NO: 864514 - protein, 724 aa, Homo sapiens
DDLLPLPLWLVAEGIVRARRPLEITSGQLRGQGWRSLPGSVARSVGAGRFALSLLHREPLLVRREPGAGGTQPASSPLGREGREKQKGKLDDYQERMNKGERLNQDQLDAVSKYQEVTNNLEFAKELQRSFMALSQDIQKTIKKTARREQLMREEAEQKRLKTVLELQYVLDKLGDDEVRTDLKQGLNGVPILSEEELSLLDEFYKLVDPERDMSLRLNEQYEHASIHLWDLLEGKEKPVCGTTYKVLKEIVERVFQSNYFDSTHNHQNGLCEEEEAASAPAVEDQVPEAEPEPAEEYTEQSEVESTEYVNRQFMAETQFTSGEKEQVDEWTVETVEVVNSLQQQPQAASPSVPEPHSLTPVAQADPLVRRQRVQDLMAQMQGPYNFIQDSMLDFENQTLDPAIVSAQPMNPTQNMDMPQLVCPPVHSESRLAQPNQVPVQPEATQVPLVSSTSEGYTASQPLYQPSHATEQRPQKEPIDQIQATISLNTDQTTASSSLPAASQPQVFQAGTSKPLHSSGINVNAAPFQSMQTVFNMNAPVPPVNEPETLKQQNQYQASYNQSFSSQPHQVEQTELQQEQLQTVVGTYHGSPDQSHQVTGNHQQPPQQNTGFPRSNQPYYNSRGVSRGGSRGARGLMNGYRGPANGFRGGYDGYRPSFSNTPNSGYTQSQFSAPRDYSGYQRDGYQQNFKRGSGQSGPRGAPRGRGGPPRPNRGMPQMNTQQVN

SEQ ID NO: 864515 - protein, 709 aa, Homo sapiens; identical to SEQ ID NO: 864493

SEQ ID NO: 864516 - protein, 694 aa, Homo sapiens; identical to SEQ ID NO: 864496

SEQ ID NO: 864517 - protein, 679 aa, Homo sapiens
MPSATSHSGSGSKSSGPPPPSGSSGSEAAAGAGAAAPASQHPATGTGAVQTEAMKQILGVIDKKLRNLEKKKGKLDDYQERMNKGERLNQDQLDAVSKYQEVTNNLEFAKELQRSFMALSQDIQKTIKKTARREQLMREEAEQKRLKTVLELQYVLDKLGDDEVRTDLKQGLNGVPILSEEELSLLDEFYKLVDPERDMSLRLNEQYEHASIHLWDLLEGKEKPVCGTTYKVLKEIVERVFQSNYFDSTHNHQNGLCEEEEAASAPAVEDQVPEAEPEPAEEYTEQSEVESTEYVNRQFMAETQFTSGEKEQVDEWTVETVEVVNSLQQQPQAASPSVPEPHSLTPVAQADPLVRRQRVQDLMAQMQGPYNFIQDSMLDFENQTLDPAIVSAQPMNPTQNMDMPQLVCPPVHSESRLAQPNQVPVQPEATQVPLVSSTSEGYTASQPLYQPSHATEQRPQKEPIDQIQATISLNTDQTTASSSLPAASQPQVFQAGTSKPLHSSGINVNAAPFQSMQTVFNMNAPVPPVNEPETLKQQNQYQASYNQSFSSQPHQVEQTELQQEQLQTVVGTYHGSPDQSHQVTGNHQQPPQQNTGFPRSNQPYYNSRGVSRGGSRGARGLMNGYRGPANGFRGGYDGYRPSFSNTPNSGYTQSQFSAPRDYSGYQRDAANEHSASELI

SEQ ID NO: 864518 - protein, 704 aa, Homo sapiens
MPSATSHSGSGSKSSGPPPPSGSSGSEAAAGAGAAAPASQHPATGTGAVQTEAMKQILGVIDKKLRNLEKKKGKLDDYQERMNKGERLNQDQLDAVSKYQEVTNNLEFAKELQRSFMALSQDIQKTIKKTARREQLMREEAEQKRLKTVLELQYVLDKLGDDEVRTDLKQGLNGVPILSEEELSLLDEFYKLVDPERDMSLRLNEQYEHASIHLWDLLEGKEKPVCGTTYKVLKEIVERVFQSNYFDSTHNHQNGLCEEEEAASAPAVEDQVPEAEPEPAEEYTEQSEVESTEYVNRQFMAETQFTSGEKEQVDEWTVETVEVVNSLQQQPQAASPSVPEPHSLTPVAQADPLVRRQRVQDLMAQMQGPYNFIQDSMLDFENQTLDPAIVSAQPMNPTQNMDMPQLVCPPVHSESRLAQPNQVPVQPEATQVPLVSSTSEGYTASQPLYQPSHATEQRPQKEPIDQIQATISLNTDQTTASSSLPAASQPQVFQAGTSKPLHSSGINVNAAPFQSMQTVFNMNAPVPPVNEPETLKQQNQYQASYNQSFSSQPHQVEQTELQQEQLQTVVGTYHGSPDQSHQVTGNHQQPPQQNTGFPRSNQPYYNSRGVSRGGSRGARGLMNGYRGPANGFRGGYDGYRPSFSNTPNSGYTQSQFSAPRDYSGYQLSSHKDRTTIVSFLLPGYGRKLFLLCMFCPKRHLEPCT

SEQ ID NO: 864519 - protein, 338 aa, Homo sapiens
MPSATSHSGSGSKSSGPPPPSGSSGSEAAAGAGAAAPASQHPATGTGAVQTEAMKQILGVIDKKLRNLEKKKGKLDDYQERMNKGERLNQDQLDAVSKYQEVTNNLEFAKELQRSFMALSQDIQKTIKKTARREQLMREEAEQKRLKTVLELQYVLDKLGDDEVRTDLKQGLNGVPILSEEELSLLDEFYKLVDPERDMSLRLNEQYEHASIHLWDLLEGKEKPVCGTTYKVLKEIVERVFQSNYFDSTHNHQNGLCEEEEAASAPAVEDQVPEAEPEPAEEYTEQSEVESTEYVNRQFMAEGMDISRISSEALGRVDHGEPHEVVEGPQDPTEGCRK

SEQ ID NO: 864520 - protein, 709 aa, Homo sapiens; identical to SEQ ID NO: 864493

SEQ ID NO: 864521 - protein, 709 aa, Homo sapiens; identical to SEQ ID NO: 864493

SEQ ID NO: 864522 - protein, 694 aa, Homo sapiens; identical to SEQ ID NO: 864496

SEQ ID NO: 864523 - protein, 709 aa, Homo sapiens; identical to SEQ ID NO: 864493

SEQ ID NO: 864524 - protein, 125 aa, Homo sapiens
MPSATSHSGSGSKSSGPPPPSGSSGSEAAAGAGAAAPASQHPATGTGAVQTEAMKQILGVIDKKLRNLEKKKGKLDDYQERMNKGERLNQDQLDAVSKYQEVTNNLDFAVLSPKLVQVLMKISSG

SEQ ID NO: 864525 - protein, 395 aa, Homo sapiens
MPSATSHSGSGSKSSGPPPPSGSSGSEAAAGAGAAAPASQHPATGTGAVQTEAMKQILGVIDKKLRNLEKKKGKLDDYQERMNKGERLNQDQLDAVSKYQEVTNNLEFAKELQRSFMALSQDIQKTIKKTARREQLMREEAEQKRLKTVLELQYVLDKLGDDEVRTDLKQGLNGVPILSEEELSLLDEFYKLVDPERDMSLRLNEQYEHASIHLWDLLEGKEKPVCGTTYKVLKEIVERVFQSNYFDSTHNHQNGLCEEEEAASAPAVEDQVPEAEPEPAEEYTEQSEVESTEYVNRQFMAETQFTSGEKEQVDEWTVETVEVVNSLQQQPQAASPSVPEPHSLTPVAQADPLVRRQRVQDLMAQMQGPYNFILRAPGGLRAPGGLRAPGGLRAP

SEQ ID NO: 864526 - protein, 141 aa, Homo sapiens [sequence omitted]

SEQ ID NO: 864527 - protein, 116 aa, Homo sapiens
MREAETEPHEGKRKVESLWPIFRIHHQKTRYIFDLFYKRKAISRELYEYCIKEGYADKNLIAKWKKQGYENLCCLRCIQTRDTNFGTNCICRVPKSKLEVGRIIECTHCGCRGCSG

SEQ ID NO: 864528 - protein, 117 aa, Homo sapiens
MREAETEPHEGKRKVESLWPIFRIHHQKTRYIFDLFYKRKAISRELYEYCIKEGYADKNLIAKWKKQGYENLCCLRCIQTRDTNFGTNCICRVPKSKLEVVMSDTQAWCCFQLKILP

SEQ ID NO: 864529 - protein, 110 aa, Homo sapiens
MREAETEPHEGKRKVESLWPIFRIHHQKTRYIFDLFYKRKAISRELYEYCIKEGYADKNLIAKWKKQGYENLCCLRCIQTRDTNFGTNCICRVPKSKLEVVPHYRVHTVV

SEQ ID NO: 864530 - protein, 116 aa, Homo sapiens; identical to SEQ ID NO: 864527

SEQ ID NO: 864531 - protein, 116 aa, Homo sapiens; identical to SEQ ID NO: 864527

SEQ ID NO: 864532 - protein, 119 aa, Homo sapiens
MREAETEPHEGKRKVESLWPIFRIHHQKTRYIFDLFYKRKAISRELYEYCIKEGYADKNLIAKWKKQGYENLCCLRCIQTRDTNFGNKIEFCRGAPKSKAWESWGPLLYGGGPHPLWVC

SEQ ID NO: 864533 - protein, 89 aa, Homo sapiens
AAAAASVAAVAARTRTSGRPPHEVGPSCAPPKSRLARLLPGNNAPSLSVREDAWPCLPPTGSEGKWQQRLWNSIQALLRTPKMTQSPRG

SEQ ID NO: 864534 - protein, 89 aa, Homo sapiens; identical to SEQ ID NO: 864533

SEQ ID NO: 864535 - protein, 116 aa, Homo sapiens; identical to SEQ ID NO: 864527

SEQ ID NO: 864536 - protein, 116 aa, Homo sapiens; identical to SEQ ID NO: 864527

SEQ ID NO: 864537 - protein, 116 aa, Homo sapiens; identical to SEQ ID NO: 864527

SEQ ID NO: 864538 - protein, 142 aa, Homo sapiens
GFLHVGQAGLELLASSDPPTSASQSDGITAETEPHEGKRKVESLWPIFRIHHQKTRYIFDLFYKRKAISRELYEYCIKEGYADKNLIAKWKKQGYENLCCLRCIQTRDTNFGTNCICRVPKSKLEVGRIIECTHCGCRGCSG

SEQ ID NO: 864539 - protein, 1051 aa, Homo sapiens
GDLLSLLPKMADAFGDELFSVFEGDSTTAAGTKKDKEKDKGKWKGPPGSADKAGKRFDGKLQSESTNNGKNKRDVDFEGTDEPIFGKKPRIEESITEDLSLADLMPRVKVQSVETVEGCTHEVALPAEEDYLPLKPRVGKAAKEYPFILDAFQREAIQCVDNNQSVLVSAHTSAGKTVCAEYAIALALREKQRVIFTSPIKALSNQKYREMYEEFQDVGLMTGDVTINPTASCLVMTTEILRSMLYRGSEVMREVAWVIFDEIHYMRDSERGVVWEETIILLPDNVHYVFLSATIPNARQFAEWICHLHKQPCHVIYTDYRPTPLQHYIFPAGGDGLHLVVDENGDFREDNFNTAMQVLRDAGDLAKGDQKGRKGGTKGPSNVFKIVKMIMERNFQPVIIFSFSKKDCEAYALQMTKLDFNTDEEKKMVEEVFSNAIDCLSDEDKKLPQVEHVLPLLKRGIGIHHGGLLPILKETIEILFSEGLIKALFATETFAMGINMPARTVLFTNARKFDGKDFRWISSGEYIQMSGRAGRRGMDDRGIVILMVDEKMSPTIGKQLLKGSADPLNSAFHLTYNMVLNLLRVEEINPEYMLEKSFYQFQHYRAIPGVVEKVKNSEEQYNKIVIPNEESVVIYYKIRQQLAKLGKEIEEYIHKPKYCLPFLQPGRLVKVKNEGDDFGWGVVVNFSKKSNVKPNSGELDPLYVVEVLLRCSKESLKNSATEAAKPAKPDEKGEMQVVPVLVHLLSAISSVRLYIPKDLRPVDNRQSVLKSIQEVQKRFPDGIPLLDPIDDMGIQDQGLKKVIQKVEAFEHRMYSHPLHNDPNLETVYTLCEKKAQIAIDIKSAKRELKKARTVLQMDELKCRKRVLRRLGFATSSDVIEMKGRVACEISSADELLLTEMMFNGLFNDLSAEQATALLSCFVFQENSSEMPKLTEQLAGPLRQMQECAKRIAKVSAEAKLEIDEETYLSSFKPHLMDVVYTWATGATFAHICKMTDVFEGSIIRCMRRLEELLRQMCQAAKAIGNTELENKFAEGITKIKRDIVFAASLYL

SEQ ID NO: 864540 - protein, 1051 aa, Homo sapiens; identical to SEQ ID NO: 864539

SEQ ID NO: 864541 - protein, 1051 aa, Homo sapiens; identical to SEQ ID NO: 864539

SEQ ID NO: 864542 - protein, 872 aa, Homo sapiens
MRYAIALALREKQRVIFTSPIKALSNQKYREMYEEFQDVGLMTGDVTINPTASCLVMTTEILRSMLYRGSEVMREVAWVIFDEIHYMRDSERGVVWEETIILLPDNVHYVFLSATIPNARQFAEWICHLHKQPCHVIYTDYRPTPLQHYIFPAGGDGLHLVVDENGDFREDNFNTAMQVLRDAGDLAKGDQKGRKGGTKGPSNVFKIVKMIMERNFQPVIIFSFSKKDCEAYALQMTKLDFNTDEEKKMVEEVFSNAIDCLSDEDKKLPQVEHVLPLLKRGIGIHHGGLLPILKETIEILFSEGLIKALFATETFAMGINMPARTVLFTNARKFDGKDFRWISSGEYIQMSGRAGRRGMDDRGIVILMVDEKMSPTIGKQLLKGSADPLNSAFHLTYNMVLNLLRVEEINPEYMLEKSFYQFQHYRAIPGVVEKVKNSEEQYNKIVIPNEESVVIYYKIRQQLAKLGKEIEEYIHKPKYCLPFLQPGRLVKVKNEGDDFGWGVVVNFSKKSNVKPNSGELDPLYVVEVLLRCSKESLKNSATEAAKPAKPDEKGEMQVVPVLVHLLSAISSVRLYIPKDLRPVDNRQSVLKSIQEVQKRFPDGIPLLDPIDDMGIQDQGLKKVIQKVEAFEHRMYSHPLHNDPNLETVYTLCEKKAQIAIDIKSAKRELKKARTVLQMDELKCRKRVLRRLGFATSSDVIEMKGRVACEISSADELLLTEMMFNGLFNDLSAEQATALLSCFVFQENSSEMPKLTEQLAGPLRQMQECAKRIAKVSAEAKLEIDEETYLSSFKPHLMDVVYTWATGATFAHICKMTDVFEGSIIRCMRRLEELLRQMCQAAKAIGNTELENKFAEGITKIKRDIVFAASLYL

SEQ ID NO: 864543 - protein, 1051 aa, Homo sapiens; identical to SEQ ID NO: 864539

SEQ ID NO: 864544 - protein, 1037 aa, Homo sapiens
GDLLSLLPKMADAFGDELFSVFEGDSTTAAGTKKDKEKDKGKWKGPPGSADKAGKRFDGKLQSESTNNGKNKRDVDFEGTDEPIFGKKPRIEESITEDLSLADLMPRVKVQSVETVEGCTHEVALPAEEDYLPLKPRVGKAAKEYPFILDAFQREAIQCVDNNQSVLVSAHTSAGKTVCAEYAIALALREKQRVIFTSPIKALSNQKYREMYEEFQDVGLMTGDVTINPTASCLVMTTEILRSMLYRGSEVMREVAWVIFDEIHYMRDSERGVVWEETIILLPDNVHYVFLSATIPNARQFAEWICHLHKQPCHVIYTDYRPTPLQHYIFPAGGDGLHLVVDENGDFREDNFNTAMQVLRDAGDLAKGDQKGRKGGTKGPSNVFKIVKMIMERNFQPVIIFSFSKKDCEAYALQMTKLDFNTDEEKKMVEEVFSNAIDCLSDEDKKSLSHHGGLLPILKETIEILFSEGLIKALFATETFAMGINMPARTVLFTNARKFDGKDFRWISSGEYIQMSGRAGRRGMDDRGIVILMVDEKMSPTIGKQLLKGSADPLNSAFHLTYNMVLNLLRVEEINPEYMLEKSFYQFQHYRAIPGVVEKVKNSEEQYNKIVIPNEESVVIYYKIRQQLAKLGKEIEEYIHKPKYCLPFLQPGRLVKVKNEGDDFGWGVVVNFSKKSNVKPNSGELDPLYVVEVLLRCSKESLKNSATEAAKPAKPDEKGEMQVVPVLVHLLSAISSVRLYIPKDLRPVDNRQSVLKSIQEVQKRFPDGIPLLDPIDDMGIQDQGLKKVIQKVEAFEHRMYSHPLHNDPNLETVYTLCEKKAQIAIDIKSAKRELKKARTVLQMDELKCRKRVLRRLGFATSSDVIEMKGRVACEISSADELLLTEMMFNGLFNDLSAEQATALLSCFVFQENSSEMPKLTEQLAGPLRQMQECAKRIAKVSAEAKLEIDEETYLSSFKPHLMDVVYTWATGATFAHICKMTDVFEGSIIRCMRRLEELLRQMCQAAKAIGNTELENKFAEGITKIKRDIVFAASLYL

SEQ ID NO: 864545 - protein, 837 aa, Homo sapiens
GDLLSLLPKMADAFGDELFSVFEGDSTTAAGTKKDKEKDKGKWKGPPGSADKAGKRFDGKLQSESTNNGKNKRDVDFEGTDEPIFGKKPRIEESITEDLSLADLMPRVKVQSVETVEGCTHEVALPAEEDYLPLKPRVGKAAKEYPFILDAFQREAIQCVDNNQSVLVSAHTSAGKTVCAEYAIALALREKQRVIFTSPIKALSNQKYREMYEEFQDVGLMTGDVTINPTASCLVMTTEILRSMLYRGSEVMREVAWVIFDEIHYMRDSERGVVWEETIILLPDNVHYVFLSATIPNARQFAEWICHLHKQPCHVIYTDYRPTPLQHYIFPAGGDGLHLVVDENGDFREDNFNTAMQVLRDAGDLAKGDQKGRKGGTKGPSNVFKIVKMIMERNFQPVIIFSFSKKDCEAYALQMTKLDFNTDEEKKMVEEVFSNAIDCLSDEDKKLPQVEHVLPLLKRGIGIHHGGLLPILKETIEILFSEGLIKALFATETFAMGINMPARTVLFTNARKFDGKDFRWISSGEYIQMSGRAGRRGMDDRGIVILMVDEKMSPTIGKQLLKGSADPLNSAFHLTYNMVLNLLRVEEINPEYMLEKSFYQFQHYRAIPGVVEKVKNSEEQYNKIVIPNEESVVIYYKIRQQLAKLGKEIEEYIHKPKYCLPFLQPGRLVKVKNEGDDFGWGVVVNFSKKSNVKPNSGELDPLYVVEVLLRCSKESLKNSATEAAKPAKPDEKGEMQVVPVLVHLLSAISSVRLYIPKDLRPVDNRQSVLKSIQEVQKRFPDGIPLLDPIDDMGIQDQGLKKVIQKVEAFEHRMYSHPLHNDPNLETVYTLCEKKAQC

SEQ ID NO: 864546 - protein, 1041 aa, Homo sapiens
GDLLSLLPKMADAFGDELFSVFEGDSTTAAGTKKDKEKDKGKWKGPPGSADKAGKRFDGKLQSESTNNGKNKRDVDFEGTDEPIFGKKPRIEESITEDLSLADLMPRVKVQSVETVEGCTHEVALPAEEDYLPLKPRVGKAAKEYPFILDAFQREAIQCVDNNQSVLVSAHTSAGKTVCAEYAIALALREKQRVIFTSPIKALSNQKYREMYEEFQDVGLMTGDVTINPTASCLVMTTEILRSMLYRGSEVMREVAWVIFDEIHYMRDSERGVVWEETIILLPDNVHYVFLSATIPNARQFAEWICHLHKQPCHVIYTDYRPTPLQHYIFPAGGDGLHLVVDENGDFREDNFNTAMQVLRDAGDLAKGDQKGRKGGTKGPSNVFKIVKMIMERNFQPVIIFSFSKKDCEAYALQMTKLDFNTDEEKKMVEEVFSNAIDCLSDEDKKLPQVEHVLPLLKRGIGIHHGGLLPILKETIEILFSEGLIKALFATETFAMGINMPARTVLFTNARKFDGKDFRWISSGEYIQMSGRAGRRGMDDRGIVILMVDEKMSPTIGKQLLKGSADPLNSAFHLTYNMVLNLLRVEEINPEYMLEKSFYQFQHYRAIPGVVEKVKNSEEQYNKIVIPNEESVVIYYKIRQQLAKLGKEIEEYIHKPKYCLPFLQPGRLVKVKNEGDDFGWGVVVNFSKKSNVKPNSGELDPLYVVEVLLRCSKESLKNSATEAAKPAKPDEKGEMQVVPVLVHLLSAISSVRLYIPKDLRPVDNRQSVLKSIQEVQKRFPDGIPLLDPIDDMGIQDQGLKKVIQKVEAFEHRMYSHPLHNDPNLETVYTLCEKKAQIAIDIKSAKRELKKARTVLQMDELKCRKRVLRRLGFATSSDVIEMKGRVACEISSADELLLTEMMFNGLFNDLSAEQATALLSCFVFQENSSEMPKLTEQLAGPLRQMQECAKRIAKVSAEAKLEIDEETYLSSFKPHLMDVVYTWATGATFAHICKMTDVFEGSIIRCMRRLEELLRQMCQAAKAIGNTELENKFAEGRSVSNG

SEQ ID NO: 864547 - protein, 1051 aa, Homo sapiens; identical to SEQ ID NO: 864539

SEQ ID NO: 864548 - protein, 265 aa, Homo sapiens
SCVLRLSRSRSRSLPCVGISQAESHQSRASARCISPPCQLNCVYACEKQQIAIDIKSAKRELKKARTVLQMDELKCRKRVLRRLGFATSSDVIEMKGRVACEISSADELLLTEMMFNGLFNDLSAEQATALLSCFVFQENSSEMPKLTEQLAGPLRQMQECAKRIAKVSAEAKLEIDEETYLSSFKPHLMDVVYTWATGATFAHICKMTDVFEGSIIRCMRRLEELLRQMCQAAKAIGNTELENKFAEGITKIKRDIVFAASLYL

SEQ ID NO: 864549 - protein, 529 aa, Homo sapiens
GDLLSLLPKMADAFGDELFSVFEGDSTTAAGTKKDKEKDKGKWKGPPGSADKAGKRFDGKLQSESTNNGKNKRDVDFEGTDEPIFGKKPRIEESITEDLSLADLMPRVKVQSVETVEGCTHEVALPAEEDYLPLKPRVGKAAKEYPFILDAFQREAIQCVDNNQSVLVSAHTSAGKTVCAEYAIALALREKQRVIFTSPIKALSNQKYREMYEEFQDVGLMTGDVTINPTASCLVMTTEILRSMLYRGSEVMREVAWVIFDEIHYMRDSERGVVWEETIILLPDNVHYVFLSATIPNARQFAEWICHLHKQPCHVIYTDYRPTPLQHYIFPAGGDGLHLVVDENGDFREDNFNTAMQVLRDAGDLAKGDQKGRKGGTKGPSNVFKIVKMIMERNFQPVIIFSFSKKDCEAYALQMTKLDFNTDEEKKMVEEVFSNAIDCLSDEDKKLPQVEHVLPLLKRGIGIHHGGLLPILKETIEILFSEGLIKALFATETFAMGINMPARTVLFTNARKFDGKDFRWVSKAIHISK

SEQ ID NO: 864550 - protein, 466 aa, Homo sapiens
  misc_feature (454)..(455): Xaa can be any naturally occurring amino acid
  misc_feature (458)..(458): Xaa can be any naturally occurring amino acid
  misc_feature (460)..(460): Xaa can be any naturally occurring amino acid
GDLLSLLPKMADAFGDELFSVFEGDSTTAAGTKKDKEKDKGKWKGPPGSADKAGKRFDGKLQSESTNNGKNKRDVDFEGTDEPIFGKKPRIEESITEDLSLADLMPRVKVQSVETVEGCTHEVALPAEEDYLPLKPRVGKAAKEYPFILDAFQREAIQCVDNNQSVLVSAHTSAGKTVCAEYAIALALREKQRVIFTSPIKALSNQKYREMYEEFQDVGLMTGDVTINPTASCLVMTTEILRSMLYRGSEVMREVAWVIFDEIHYMRDSERGVVWEETIILLPDNVHYVFLSATIPNARQFAEWICHLHKQPCHVIYTDYRPTPLQHYIFPAGGDGLHLVVDENGDFREDNFNTAMQVLRDAGDLAKGDQKGRKGGTKGPSNVFKIVKMIMERNFQPVIIFSFSKKDCEAYALQMTKLDFNTDEEKKMVEEVFSNAIDCLSDEDKKLPQSPWWXXFYXEXTIEISF

SEQ ID NO: 864551 - protein, 1051 aa, Homo sapiens; identical to SEQ ID NO: 864539

SEQ ID NO: 864552 - protein, 1044 aa, Homo sapiens
GDLLSLLPKMADAFGDELFSVFEGDSTTAAGTKKDKEKDKGKWKGPPGSADKAGKRFDGKLQSESTNNGKNKRDVDFEGTDEPIFGKKPRIEESITEDLSLADLMPRVKVQSVETVEGCTHEVALPAEEDYLPLKPRVGKAAKEYPFILDAFQREAIQCVDNNQSVLVSAHTSAGKTVCAEYAIALALREKQRVIFTSPIKALSNQKYREMYEEFQDVGLMTGDVTINPTASCLVMTTEILRSMLYRGSEVMREVAWVIFDEIHYMRDSERGVVWEETIILLPDNVHYVFLSATIPNARQFAEWICHLHKQIIGPLHCNTTFFQQGEMALHLVVDENGDFREDNFNTAMQVLRDAGDLAKGDQKGRKGGTKGPSNVFKIVKMIMERNFQPVIIFSFSKKDCEAYALQMTKLDFNTDEEKKMVEEVFSNAIDCLSDEDKKLPQVEHVLPLLKRGIGIHHGGLLPILKETIEILFSEGLIKALFATETFAMGINMPARTVLFTNARKFDGKDFRWISSGEYIQMSGRAGRRGMDDRGIVILMVDEKMSPTIGKQLLKGSADPLNSAFHLTYNMVLNLLRVEEINPEYMLEKSFYQFQHYRAIPGVVEKVKNSEEQYNKIVIPNEESVVIYYKIRQQLAKLGKEIEEYIHKPKYCLPFLQPGRLVKVKNEGDDFGWGVVVNFSKKSNVKPNSGELDPLYVVEVLLRCSKESLKNSATEAAKPAKPDEKGEMQVVPVLVHLLSAISSVRLYIPKDLRPVDNRQSVLKSIQEVQKRFPDGIPLLDPIDDMGIQDQGLKKVIQKVEAFEHRMYSHPLHNDPNLETVYTLCEKKAQIAIDIKSAKRELKKARTVLQMDELKCRKRVLRRLGFATSSDVIEMKGRVACEISSADELLLTEMMFNGLFNDLSAEQATALLSCFVFQENSSEMPKLTEQLAGPLRQMQECAKRIAKVSAEAKLEIDEETYLSSFKPHLMDVVYTWATGATFAHICKMTDVFEGSIIRCMRRLEELLRQMCQAAKAIGNTELENKFAEGITKIKRDIVFAASLYL

SEQ ID NO: 864553 - protein, 1051 aa, Homo sapiens; identical to SEQ ID NO: 864539

SEQ ID NO: 864554 - protein, 701 aa, Homo sapiens
ILINKTDLVPEEDVKKLRTTLRSINGLGQILETQRSSLQKKLQHVPGTQPHLDHKKDCEAYALQMTKLDFNTDEEKKMVEEVFSNAIDCLSDEDKKLPQVEHVLPLLKRGIGIHHGGLLPILKETIEILFSEGLIKALFATETFAMGINMPARTVLFTNARKFDGKDFRWISSGEYIQMSGRAGRRGMDDRGIVILMVDEKMSPTIGKQLLKGSADPLNSAFHLTYNMVLNLLRVEEINPEYMLEKSFYQFQHYRAIPGVVEKVKNSEEQYNKIVIPNEESVVIYYKIRQQLAKLGKEIEEYIHKPKYCLPFLQPGRLVKVKNEGDDFGWGVVVNFSKKSNVKPNSGELDPLYVVEVLLRCSKESLKNSATEAAKPAKPDEKGEMQVVPVLVHLLSAISSVRLYIPKDLRPVDNRQSVLKSIQEVQKRFPDGIPLLDPIDDMGIQDQGLKKVIQKVEAFEHRMYSHPLHNDPNLETVYTLCEKKAQIAIDIKSAKRELKKARTVLQMDELKCRKRVLRRLGFATSSDVIEMKGRVACEISSADELLLTEMMFNGLFNDLSAEQATALLSCFVFQENSSEMPKLTEQLAGPLRQMQECAKRIAKVSAEAKLEIDEETYLSSFKPHLMDVVYTWATGATFAHICKMTDVFEGSIIRCMRRLEELLRQMCQAAKAIGNTELENKFAEGITKIKRDIVFAASLYL

SEQ ID NO: 864555 - protein, 195 aa, Homo sapiens
MDELKCRKRVLRRLGFATSSDVIEMKGRVACEISSADELLLTEMMFNGLFNDLSAEQATALLSCFVFQENSSEMPKLTEQLAGPLRQMQECAKRIAKVSAEAKLEIDEETYLSSFKPHLMDVVYTWATGATFAHICKMTDVFEGSIIRCMRRLEELLRQMCQAAKAIGNTELENKFAEGITKIKRDIVFAASLYL

SEQ ID NO: 864556 - protein, 845 aa, Homo sapiens
GDLLSLLPKMADAFGDELFSVFEGDSTTAAGTKKDKEKDKGKWKGPPGSADKAGKRFDGKLQSESTNNGKNKRDVDFEGTDEPIFGKKPRIEESITEDLSLADLMPRVKVQSVETVEGCTHEVALPAEEDYLPLKPRVGKAAKEYPFILDAFQREAIQCVDNNQSVLVSAHTSAGKTVCAEYAIALALREKQRVIFTSPIKALSNQKYREMYEEFQDVGLMTGDVTINPTASCLVMTTEILRSMLYRGSEVMREVAWVIFDEIHYMRDSERGVVWEETIILLPDNVHYVFLSATIPNARQFAEWICHLHKQPCHVIYTDYRPTPLQHYIFPAGGDGLHLVVDENGDFREDNFNTAMQVLRDAGDLAKGDQKGRKGGTKGPSNVFKIVKMIMERNFQPVIIFSFSKKDCEAYALQMTKLDFNTDEEKKMVEEVFSNAIDCLSDEDKKLPQVEHVLPLLKRGIGIHHGGLLPILKETIEILFSEGLIKALFATETFAMGINMPARTVLFTNARKFDGKDFRWISSGEYIQMSGRAGRRGMDDRGIVILMVDEKMSPTIGKQLLKGSADPLNSAFHLTYNMVLNLLRVEEINPEYMLEKSFYQFQHYRAIPGVVEKVKNSEEQYNKIVIPNEESVVIYYKIRQQLAKLGKEIEEYIHKPKYCLPFLQPGRLVKVKNEGDDFGWGVVVNFSKKSNVKPNSGELDPLYVVEVLLRCSKESLKNSATEAAKPAKPDEKGEMQVVPVLVHLLSAISSVRLYIPKDLRPVDNRQSVLKSIQEVQKRFPDGIPLLDPIDDMGIQDQGLKKVIQKVEAFEHRMYSHPLHNDPNLETVYTLCEKKAQTGMAEIWFL

SEQ ID NO: 864557 - protein, 211 aa, Homo sapiens
LGNLYTVYCEPSEAGTNAHIQYIQCGTICGFTHTHTRYHRKRGGISSQNRAGEKYVVEFSLTPALWFQGVKELCLLLLNQSLLLPSLKLLLESRDEHLHEMALEQITAVTTVNDSNCDQELLSLLLDAKLLVKCVSTPFYPRIVDHLLASLQQGRWDAEELGRHLREAGHEAEAGSLLLAVRGTHQAFRTFSTALRAAQHWVLRATCGPAP

SEQ ID NO: 864558 - protein, 1345 aa, Homo sapiens
MVDQLEQILSVSELLEKHGLEKPISFVKNTQSSSEEARKLMVRLTRHTGRKQPPVSESHWRTLLQDMLTMQQNVYTCLDSDACYEIFTESLLCSSRLENIHLAGQMMHCSACSENPPAGIAHKGKPHYRVSYEKSIDLVLAASREYFNSSTNLTDSCMDLARCCLQLITDRPPAIQEELDLIQAVGCLEEFGVKILPLQVRLCPDRISLIKECISQSPTCYKQSTKLLGLAELLRVAGENPEERRGQVLILLVEQALRFHDYKAASMHCQELMATGYPKSWDVCSQLGQSEGYQDLATRQELMAFALTHCPPSSIELLLAASSSLQTEILYQRVNFQIHHEGGENISASPLTSKAVQEDEVGVPGSNSADLLRWTTATTMKVLSNTTTTTKAVLQAVSDGQWWKKSLTYLRPLQGQKCGGAYQIGTTANEDLEKQGCHPFYESVISNPFVAESEGTYDTYQHVPVESFAEVLLRTGKLAEAKNKGEVFPTTEVLLQLASEALPNDMTLALAYLLALPQVLDANRCFEKQSPSALSLQLAAYYYSLQIYARLAPCFRDKCHPLYRADPKELIKMVTRHVTRHEHEAWPEDLISLTKQLHCYNERLLDFTQAQILQGLRKGVDVQRFTADDQYKRETILGLAETLEESVYSIAISLAQRYSVSRWEVFMTHLEFLFTDSGLSTLEIENRAQDLHLFETLKTDPEAFHQHMVKYIYPTIGGFDHERLQYYFTLLENCGCADLGNCAIKPETHIRLLKKFKVVASGLNYKKLTDENMSPLEALEPVLSSQNILSISKLVPKIPEKDGQMLSPSSLYTIWLQKLFWTGDPHLIKQVPGSSPEWLHAYDVCMKYFDRLHPGDLITVVDAVTFSPKAVTKLSVEARKEMTRKAIKTVKHFIEKPRKRNSEDEAQEAKDSKVTYADTLNHLEKSLAHLETLSHSFILSLKNSEQETLQKYSHLYDLSRSEKEKLHDEAVAICLDGQPLAMIQQLLEVAVGPLDISPKDIVQSAIMKIISALSGGSADLGGPRDPLKVLEGVVAAVHASVDKGEELVSPEDLLEWLRPFCADDAWPVRPRIHVLQILGQSFHLTEEDSKLLVFFRTEAILKASWPQRQVDIADIENEENRYCLFMELLESSHHEAEFQHLVLLLQAWPPMKSEYVITNNPWVRLATVMLTRCTMENKEGLGNEVLKMCRSLYNTKQMLPAEGVKELCLLLLNQSLLLPSLKLLLESRDEHLHEMALEQITAVTTVNDSNCDQELLSLLLDAKLLVKCVSTPFYPRIVDHLLASLQQGRWDAEELGRHLREAGHEAEAGSLLLAVRGTHQAFRTFSTALRAAQHWVLRATCGPAP

SEQ ID NO: 864559 - protein, 174 aa, Homo sapiens
MIAVGFLCLLMLEEPRLSSQSVTYLRGARDPHTLLNPGQGMNDDEGSPVESEGSKGEAEQSKHPLTLCLSYFLKVNDSNCDQELLSLLLDAKLLVKCVSTPFYPRIVDHLLASLQQGRWDAEELGRHLREAGHEAEAGSLLLAVRGTHQAFRTFSTALRAAQHWVLRATCGPAP

SEQ ID NO: 864560 - protein, 118 aa, Homo sapiens
YNNNRPASHQPLQRQRLQVNDSNCDQELLSLLLDAKLLVKCVSTPFYPRIVDHLLASLQQGRWDAEELGRHLREAGHEAEAGSLLLAVRGTHQAFRTFSTALRAAQHWVLRATCGPAP

SEQ ID NO: 864561 - protein, 243 aa, Homo sapiens
SEQRYDAEFFKKFRNQNIVLSARTYAQESNVQALEILFTYHGSDLLPHRLAILSNFPETTSPHEYSVLLPEACFNGDSLMIIPWHEHKHRAKDWCEELACRMVVEPNLQDESEFLYAAQPELLRFRMTQLTVEKVMDWYQTRAEEIEHYARQVDCALSLIRLGMERNIPGLLVLCDNLVTLETLVYEARCDVTLTLKELQQMKDIEKLRLLMNSVGFILTSFLNILKHFLCTLIHMCLKPKMK

SEQ ID NO: 864562 - protein, 1673 aa, Homo sapiens
SEQRYDAEFFKKFRNQNIVLSARTYAQESNVQALEILFTYHGSDLLPHRLAILSNFPETTSPHEYSVLLPEACFNGDSLMIIPWHEHKHRAKDWCEELACRMVVEPNLQDESEFLYAAQPELLRFRMTQLTVEKVMDWYQTRAEEIEHYARQVDCALSLIRLGMERNIPGLLVLCDNLVTLETLVYEARCDVTLTLKELQQMKDIEKLRLLMNSCSEDKYVTSAYQWMVPFLHRCEKQSPGVANELLKEYLVTLAKGDLKFPLKIFQHSKPDLQQKIIPDQDQLMAIALECIYTCERNDQLCLCYDLLECLPERGYGDKTEATTKLHDMVDQLEQILSVSELLEKHGLEKPISFVKNTQSSSEEARKLMVRLTRHTGRKQPPVSESHWRTLLQDMLTMQQNVYTCLDSDACYEIFTESLLCSSRLENIHLAGQMMHCSACSENPPAGIAHKGKPHYRVSYEKSIDLVLAASREYFNSSTNLTDSCMDLARCCLQLITDRPPAIQEELDLIQAVGCLEEFGVKILPLQVRLCPDRISLIKECISQSPTCYKQSTKLLGLAELLRVAGENPEERRGQVLILLVEQALRFHDYKAASMHCQELMATGYPKSWDVCSQLGQSEGYQDLATRQELMAFALTHCPPSSIELLLAASSSLQTEILYQRVNFQIHHEGGENISASPLTSKAVQEDEVGVPGSNSADLLRWTTATTMKVLSNTTTTTKAVLQAVSDGQWWKKSLTYLRPLQGQKCGGAYQIGTTANEDLEKQGCHPFYESVISNPFVAESEGTYDTYQHVPVESFAEVLLRTGKLAEAKNKGEVFPTTEVLLQLASEALPNDMTLALAYLLALPQVLDANRCFEKQSPSALSLQLAAYYYSLQIYARLAPCFRDKCHPLYRADPKELIKMVTRHVTRHEHEAWPEDLISLTKQLHCYNERLLDFTQAQILQGLRKGVDVQRFTADDQYKRETILGLAETLEESVYSIAISLAQRYSVSRWEVFMTHLEFLFTDSGLSTLEIENRAQDLHLFETLKTDPEAFHQHMVKYIYPTIGGFDHERLQYYFTLLENCGCADLGNCAIKPETHIRLLKKFKVVASGLNYKKLTDENMSPLEALEPVLSSQNILSISKLVPKIPEKDGQMLSPSSLYTIWLQKLFWTGDPHLIKQVPGSSPEWLHAYDVCMKYFDRLHPGDLITVVDAVTFSPKAVTKLSVEARKEMTRKAIKTVKHFIEKPRKRNSEDEAQEAKDSKVTYADTLNHLEKSLAHLETLSHSFILSLKNSEQETLQKYSHLYDLSRSEKEKLHDEAVAICLDGQPLAMIQQLLEVAVGPLDISPKDIVQSAIMKIISALSGGSADLGGPRDPLKVLEGVVAAVHASVDKGEELVSPEDLLEWLRPFCADDAWPVRPRIHVLQILGQSFHLTEEDSKLLVFFRTEAILKASWPQRQVDIADIENEENRYCLFMELLESSHHEAEFQHLVLLLQAWPPMKSEYVITNNPWVRLATVMLTRCTMENKEGLGNEVLKMCRSLYNTKQMLPAEGVKELCLLLLNQSLLLPSLKLLLESRDEHLHEMALEQITAVTTVNDSNCDQELLSLLLDAKLLVKCVSTPFYPRIVDHLLASLQQGRWDAEELGRHLREAGHEAEAGSLLLAVRGTHQAFRTFSTALRAAQHWVLRATCGPAP

SEQ ID NO: 864563 - protein, 597 aa, Homo sapiens
MLFLLKKFKVVASGLNYKKLTDENMSPLEALEPVLSSQNILSISKLVPKIPEKDGQMLSPSSLYTIWLQKLFWTGDPHLIKQVPGSSPEWLHAYDVCMKYFDRLHPGDLITVVDAVTFSPKAVTKLSVEARKEMTRKAIKTVKHFIEKPRKRNSEDEAQEAKDSKVTYADTLNHLEKSLAHLETLSHSFILSLKNSEQETLQKYSHLYDLSRSEKEKLHDEAVAICLDGQPLAMIQQLLEVAVGPLDISPKDIVQSAIMKIISALSGGSADLGGPRDPLKVLEGVVAAVHASVDKGEELVSPEDLLEWLRPFCADDAWPVRPRIHVLQILGQSFHLTEEDSKLLVFFRTEAILKASWPQRQVDIADIENEENRYCLFMELLESSHHEAEFQHLVLLLQAWPPMKSEYVITNNPWVRLATVMLTRCTMENKEGLGNEVLKMCRSLYNTKQMLPAEGVKELCLLLLNQSLLLPSLKLLLESRDEHLHEMALEQITAVTTVNDSNCDQELLSLLLDAKLLVKCVSTPFYPRIVDHLLASLQQGRWDAEELGRHLREAGHEAEAGSLLLAVRGTHQAFRTFSTALRAAQHWVLRATCGPAP

SEQ ID NO: 864564 - protein, 1673 aa, Homo sapiens; identical to SEQ ID NO: 864562

SEQ ID NO: 864565 - protein, 253 aa, Homo sapiens
  misc_feature (13)..(13): Xaa can be any naturally occurring amino acid
MKGRGSSLSAFKXTSRYVDIADIENEENRYCLFMELLESSHHEAEFQHLVLLLQAWPPMKSEYVITNNPWVRLATVMLTRCTMENKEGLGNEVLKMCRSLYNTKQMLPAEGVKELCLLLLNQSLLLPSLKLLLESRDEHLHEMALEQITAVTTVNDSNCDQELLSLLLDAKLLVKCVSTPFYPRIVDHLLASLQQGRWDAEELGRHLREAGHEAEAGSLLLAVRGTHQAFRTFSTALRAAQHWVLRATCGPAP

SEQ ID NO: 864566 - protein, 1606 aa, Homo sapiens
SEQRYDAEFFKKFRNQNIVLSARTYAQESNVQALEILFTYHGSDLLPHRLAILSNFPETTSPHEYSVLLPEACFNGDSLMIIPWHEHKHRAKDWCEELACRMVVEPNLQDESEFLYAAQPELLRFRMTQLTVEKVMDWYQTRAEEIEHYARQVDCALSLIRLGMERNIPGLLVLCDNLVTLETLVYEARCDVTLTLKELQQMKDIEKLRLLMNSCSEDKYVTSAYQWMVPFLHRCEKQSPGVANELLKEYLVTLAKGDLKFPLKIFQHSKPDLQQKIIPDQDQLMAIALECIYTCERNDQLCLCYDLLECLPERGYGDKTEATTKLHDMVDQLEQILSVSELLEKHGLEKPISFVKNTQSSSEEARKLMVRLTRHTGRKQPPVSESHWRTLLQDMLTMQQNVYTCLDSDACYEIFTESLLCSSRLENIHLAGQMMHCSACSENPPAGIAHKGKPHYRVSYEKSIDLVLAASREYFNSSTNLTDSCMDLARCCLQLITDRPPAIQEELDLIQAVGCLEEFGVKILPLQVRLCPDRISLIKECISQSPTCYKQSTKLLGLAELLRVAGENPEERRGQVLILLVEQALRFHDYKAASMHCQELMATGYPKSWDVCSQLGQSEGYQDLATRQELMAFALTHCPPSSIELLLAASSSLQTEILYQRVNFQIHHEGGENISASPLTSKAVQEDEVGVPGSNSADLLRWTTATTMKVLSNTTTTTKAVLQAVSDGQWWKKSLTYLRPLQGQKCGGAYQIGTTANEDLEKQGCHPFYESVISNPFVAESEGTYDTYQHVPVESFAEVLLRTGKLAEAKNKGEVFPTTEVLLQLASEALPNDMTLALAYLLALPQVLDANRCFEKQSPSALSLQLAAYYYSLQIYARLAPCFRDKCHPLYRADPKELIKMVTRHVTRHEHEAWPEDLISLTKQLHCYNERLLDFTQAQILQGLRKGVDVQRFTADDQYKRETILGLAETLEESVYSIAISLAQRYSVSRWEVFMTHLEFLFTDSGLSTLEIENRAQDLHLFETLKTDPEAFHQHMVKYIYPTIGGFDHERLQYYFTLLENCGCADLGNCAIKPETHIRLLKKFKVVASGLNYKKLTDENMSPLEALEPVLSSQNILSISKLVPKIPEKDGQMLSPSSLYTIWLQKLFWTGDPHLIKQVPGSSPEWLHAYDVCMKYFDRLHPGDLITVVDAVTFSPKAVTKLSVEARKEMTRKAIKTVKHFIEKPRKRNSEDEAQEAKDSKVTYADTLNHLEKSLAHLETLSHSFILSLKNSEQETLQKYSHLYDLSRSEKEKLHDEAVAICLDGQPLAMIQQLLEVAVGPLDISPKDIVQSAIMKIISALSGGSADLGGPRDPLKVLEGVVAAVHASVDKGEELVSPEDLLEWLRPFCADDAWPVRPRIHVLQILGQSFHLTEEDSKLLVFFRTEAILKASWPQRQVDIADIENEENRYCLFMELLESSHHEAEFQHLVLLLQAWPPMKSEYVITNNPWVRLATVMLTRCTMENKEGLGNEVLKMCRSLYNTKQMLPAEGVKELCLLLLNQSLLLPSLKLLLESRDEHLHEMALEQITAVTTVNDSNCDQELLSLLLDCRKLGLGVGQKGWVGSS

SEQ ID NO: 864567 - protein, 1576 aa, Homo sapiens
SEQRYDAEFFKKFRNQNIVLSARTYAQESNVQALEILFTYHGSDLLPHRLAILSNFPETTSPHEYSVLLPEACFNGDSLMIIPWHEHKHRAKDWCEELACRMVVEPNLQDESEFLYAAQPELLRFRMTQLTVEKVMDWYQTRAEEIEHYARQVDCALSLIRLGMERNIPGLLVLCDNLVTLETLVYEARCDVTLTLKELQQMKDIEKLRLLMNSCSEDKYVTSAYQWMVPFLHRCEKQSPGVANELLKEYLVTLAKGDLKFPLKIFQHSKPDLQQKIIPDQDQLMAIALECIYTCERNDQLCLCYDLLECLPERGYGDKTEATTKLHDMVDQLEQILSVSELLEKHGLEKPISFVKNTQSSSEEARKLMVRLTRHTGRKQPPVSESHWRTLLQDMLTMQQNVYTCLDSDACYEIFTESLLCSSRLENIHLAGQMMHCSACSENPPAGIAHKGKPHYRVSYEKSIDLVLAASREYFNSSTNLTDSCMDLARCCLQLITDRPPAIQEELDLIQAVGCLEEFGVKILPLQVRLCPDRISLIKECISQSPTCYKQSTKLLGLAELLRVAGENPEERRGQVLILLVEQALRFHDYKAASMHCQELMATGYPKSWDVCSQLGQSEGYQDLATRQELMAFALTHCPPSSIELLLAASSSLQTEILYQRVNFQIHHEGGENISASPLTSKAVQEDEVGVPGSNSADLLRWTTATTMKVLSNTTTTTKAVLQAVSDGQWWKKSLTYLRPLQGQKCGGAYQIGTTANEDLEKQGCHPFYESVISNPFVAESEGTYDTYQHVPVESFAEVLLRTGKLAEAKNKGEVFPTTEVLLQLASEALPNDMTLALAYLLALPQVLDANRCFEKQSPSALSLQLAAYYYSLQIYARLAPCFRDKCHPLYRADPKELIKMVTRHVTRHEHEAWPEDLISLTKQLHCYNERLLDFTQAQILQGLRKGVDVQRFTADDQYKRETILGLAETLEESVYSIAISLAQRYSVSRWEVFMTHLEFLFTDSGLSTLEIENRAQDLHLFETLKTDPEAFHQHMVKYIYPTIGGFDHERLQYYFTLLENCGCADLGNCAIKPETHIRLLKKFKVVASGLNYKKLTDENMSPLEALEPVLSSQNILSISKLVPKIPEKDGQMLSPSSLYTIWLQKLFWTGDPHLIKQVPGSSPEWLHAYDVCMKYFDRLHPGDLITVVDAVTFSPKAVTKLSVEARKEMTRKAIKTVKHFIEKPRKRNSEDEAQEAKDSKVTYADTLNHLEKSLAHLETLSHSFILSLKNSEQETLQKYSHLYDLSRSEKEKLHDEAVAICLDGQPLAMIQQLLEVAVGPLDISPKDIVQSAIMKIISALSGGSADLGGPRDPLKVLEGVVAAVHASVDKGEELVSPEDLLEWLRPFCADDAWPVRPRIHVLQILGQSFHLTEEDSKLLVFFRTEAILKASWPQRQVDIADIENEENRYCLFMELLESSHHEAEFQHLVLLLQAWPPMKSEYVITNNPWVRLATVMLTRCTMENKEGLGNEVLKMCRSLYNTKQMLPAEGVKELCLLLLNQSLLLPSLKLLLESRDEHLHEMALEQITAVTTDIF

SEQ ID NO: 864568 - protein, 537 aa, Homo sapiens
SEQRYDAEFFKKFRNQNIVLSARTYAQESNVQALEILFTYHGSDLLPHRLAILSNFPETTSPHEYSVLLPEACFNGDSLMIIPWHEHKHRAKDWCEELACRMVVEPNLQDESEFLYAAQPELLRFRMTQLTVEKVMDWYQTRAEEIEHYARQVDCALSLIRLGMERNIPGLLVLCDNLVTLETLVYEARCDVTLTLKELQQMKDIEKLRLLMNSCSEDKYVTSAYQWMVPFLHRCEKQSPGVANELLKEYLVTLAKGDLKFPLKIFQHSKPDLQQKIIPDQDQLMAIALECIYTCERNDQLCLCYDLLECLPERGYGDKTEATTKLHDMVDQLEQILSVSELLEKHGLEKPISFVKNTQSSSEEARKLMVRLTRHTGRKQPPVSESHWRTLLQDMLTMQQNVYTCLDSDACYEIFTESLLCSSRLENIHLAGQMMHCSACSENPPAGIAHKGKPHYRVSYEKSIDLVLAASREYFNSSTNLTDSCMDLARCCLQLITDRPPAIQEELDLIQAVGCLEEFGVKILPLQGEFSTYCCIV

SEQ ID NO: 864569 - protein, 840 aa, Homo sapiens
MTLALAYLLALPQVLDANRCFEKQSPSALSLQLAAYYYSLQIYARLAPCFRDKCHPLYRADPKELIKMVTRHVTRHEHEAWPEDLISLTKQLHCYNERLLDFTQAQILQGLRKGVDVQRFTADDQYKRETILGLAETLEESVYSIAISLAQRYSVSRWEVFMTHLEFLFTDSGLSTLEIENRAQDLHLFETLKTDPEAFHQHMVKYIYPTIGGFDHERLQYYFTLLENCGCADLGNCAIKPETHIRLLKKFKVVASGLNYKKLTDENMSPLEALEPVLSSQNILSISKLVPKIPEKDGQMLSPSSLYTIWLQKLFWTGDPHLIKQVPGSSPEWLHAYDVCMKYFDRLHPGDLITVVDAVTFSPKAVTKLSVEARKEMTRKAIKTVKHFIEKPRKRNSEDEAQEAKDSKVTYADTLNHLEKSLAHLETLSHSFILSLKNSEQETLQKYSHLYDLSRSEKEKLHDEAVAICLDGQPLAMIQQLLEVAVGPLDISPKDIVQSAIMKIISALSGGSADLGGPRDPLKVLEGVVAAVHASVDKGEELVSPEDLLEWLRPFCADDAWPVRPRIHVLQILGQSFHLTEEDSKLLVFFRTEAILKASWPQRQVDIADIENEENRYCLFMELLESSHHEAEFQHLVLLLQAWPPMKSEYVITNNPWVRLATVMLTRCTMENKEGLGNEVLKMCRSLYNTKQMLPAEGVKELCLLLLNQSLLLPSLKLLLESRDEHLHEMALEQITAVTTVNDSNCDQELLSLLLDAKLLVKCVSTPFYPRIVDHLLASLQQGRWDAEELGRHLREAGHEAEAGSLLLAVRGTHQAFRTFSTALRAAQHWVLRATCGPAP

SEQ ID NO: 864570 - protein, 638 aa, Homo sapiens
MVKYIYPTIGGFDHERLQYYFTLLENCGCADLGNCAIKPETHIRLLKKFKVVASGLNYKKLTDENMSPLEALEPVLSSQNILSISKLVPKIPEKDGQMLSPSSLYTIWLQKLFWTGDPHLIKQVPGSSPEWLHAYDVCMKYFDRLHPGDLITVVDAVTFSPKAVTKLSVEARKEMTRKAIKTVKHFIEKPRKRNSEDEAQEAKDSKVTYADTLNHLEKSLAHLETLSHSFILSLKNSEQETLQKYSHLYDLSRSEKEKLHDEAVAICLDGQPLAMIQQLLEVAVGPLDISPKDIVQSAIMKIISALSGGSADLGGPRDPLKVLEGVVAAVHASVDKGEELVSPEDLLEWLRPFCADDAWPVRPRIHVLQILGQSFHLTEEDSKLLVFFRTEAILKASWPQRQVDIADIENEENRYCLFMELLESSHHEAEFQHLVLLLQAWPPMKSEYVITNNPWVRLATVMLTRCTMENKEGLGNEVLKMCRSLYNTKQMLPAEGVKELCLLLLNQSLLLPSLKLLLESRDEHLHEMALEQITAVTTVNDSNCDQELLSLLLDAKLLVKCVSTPFYPRIVDHLLASLQQGRWDAEELGRHLREAGHEAEAGSLLLAVRGTHQAFRTFSTALRAAQHWVLRATCGPAP

SEQ ID NO: 864571 - protein, 267 aa, Homo sapiens
  misc_feature (9)..(9): Xaa can be any naturally occurring amino acid
NNTRTKPRXQQHPISHQYTPPRFRTNHLESVVDIADIENEENRYCLFMELLESSHHEAEFQHLVLLLQAWPPMKSEYVITNNPWVRLATVMLTRCTMENKEGLGNEVLKMCRSLYNTKQMLPAEGVKELCLLLLNQSLLLPSLKLLLESRDEHLHEMALEQITAVTTVNDSNCDQELLSLLLDAKLLVKCVSTPFYPRIVDHLLASLQQGRWDAEELGRHLREAGHEAEAGSLLLAVRGTHQAFRTFSTALRAAQHWVLRATCGPAP

SEQ ID NO: 864572 - protein, 263 aa, Homo sapiens
TPTCPARDHDPDFYNTNPPLAYCTMKDVDIADIENEENRYCLFMELLESSHHEAEFQHLVLLLQAWPPMKSEYVITNNPWVRLATVMLTRCTMENKEGLGNEVLKMCRSLYNTKQMLPAEGVKELCLLLLNQSLLLPSLKLLLESRDEHLHEMALEQITAVTTVNDSNCDQELLSLLLDAKLLVKCVSTPFYPRIVDHLLASLQQGRWDAEELGRHLREAGHEAEAGSLLLAVRGTHQAFRTFSTALRAAQHWVLRATCGPAP

SEQ ID NO: 864573 - protein, 268 aa, Homo sapiens
GIRSEPPGCNRTTPRPRAPAFAHQRSVRPAPDVDIADIENEENRYCLFMELLESSHHEAEFQHLVLLLQAWPPMKSEYVITNNPWVRLATVMLTRCTMENKEGLGNEVLKMCRSLYNTKQMLPAEGVKELCLLLLNQSLLLPSLKLLLESRDEHLHEMALEQITAVTTVNDSNCDQELLSLLLDAKLLVKCVSTPFYPRIVDHLLASLQQGRWDAEELGRHLREAGHEAEAGSLLLAVRGTHQAFRTFSTALRAAQHWVLRATCGPAP

SEQ ID NO: 864574 - protein, 1630 aa, Homo sapiens
SEQRYDAEFFKKFRNQNIVLSARTYAQESNVQALEILFTYHGSDLLPHRLAILSNFPETTSPHEYSVLLPEACFNGDSLMIIPWHEHKHRAKDWCEELACRMVVEPNLQDESEFLYAAQPELLRFRMTQLTVEKVMDWYQTRAEEIEHYARQVDCALSLIRLGMERNIPGLLVLCDNLVTLETLVYEARCDVTLTLKELQQMKDIEKLRLLMNSCSEDKYVTSAYQWMVPFLHRCEKQSPGVANELLKEYLVTLAKGDLKFPLKIFQHSKPDLQQKIIPDQDQLMAIALECIYTCERNDQLCLCYDLLECLPERGYGDKTEATTKLHDMVDQLEQILSVSELLEKHGLEKPISFVKNTQSSSEEARKLMVRLTRHTGRKQPPVSESHWRTLLQDMLTMQQNVYTCLDSDACYEIFTESLLCSSRLENIHLAGQMMHCSACSENPPAGIAHKGKPHYRVSYEKSIDLVLAASREYFNSSTNLTDSCMDLARCCLQLITDRPPAIQEELDLIQAVGCLEEFGVKILPLQVRLCPDRISLIKECISQSPTCYKQSTKLLGLAELLRVAGENPEERRGQVLILLVEQALRFHDYKAASMHCQELMATGYPKSWDVCSQLGQSEGYQDLATRQELMAFALTHCPPSSIELLLAASSSLQTEILYQRVNFQIHHEGGENISASPLTSKAVQEDEVGVPGSNSADLLRWTTATTMKVLSNTTTTTKAVLQAVSDGQWWKKSLTYLRPLQGQKCGGAYQIGTTANEDLEKQGCHPFYESVISNPFVAESEGTYDTYQHVPVESFAEVLLRTGKLAEAKNKGEVFPTTEVLLQLASEALPNDMTLALAYLLALPQVLDANRCFEKQSPSALSLQLAAYYYSLQIYARLAPCFRDKCHPLYRADPKELIKMVTRHVTRHEHEAWPEDLISLTKQLHCYNERLLDFTQAQILQGLRKGVDVQRFTADDQYKRETILGLAETLEESVYSIAISLAQRYSVSRWEVFMTHLEFLFTDSGLSTLEIENRAQDLHLFETLKTDPEAFHQHMVKYIYPTIGGFDHERLQYYFTLLENCGCADLGNCAIKPETHIRLLKKFKVVASGLNYKKLTDENMSPLEALEPVLSSQNILSISKLVPKIPEKDGQMLSPSSLYTIWLQKLFWTGDPHLIKQVPGSSPEWLHAYDVCMKYFDRLHPGDLITVVDAVTFSPKAVTKLSVEARKEMTRKAIKTVKHFIEKPRKRNSEDEAQEAKDSKVTYADTLNHLEKSLAHLETLSHSFILSLKNSEQETLQKYSHLYDLSRSEKEKLHDEAVAICLDGQPLAMIQQLLEVAVGPLDISPKDIVQSAIMKIISALSGGSADLGGPRDPLKVLEGVVAAVHASVDKGEELVSPEDLLEWLRPFCADDAWPVRPRIHVLQILGQSFHLTEEDSKLLVFFRTEAILKASWPQRQVDIADIENEENRYCLFMELLESSHHEAEFQHLVLLLQAWPPMKSEYVITNNPWVRLATVMLTRCTMENKEGLGNEVLKMCRSLYNTKQMLPAEVNDSNCDQELLSLLLDAKLLVKCVSTPFYPRIVDHLLASLQQGRWDAEELGRHLREAGHEAEAGSLLLAVRGTHQAFRTFSTALRAAQHWVLRATCGPAP

SEQ ID NO: 864575 - protein, 1141 aa, Homo sapiens [sequence omitted]

SEQ ID NO: 864576 - protein, 1141 aa, Homo sapiens [sequence omitted]

SEQ ID NO: 864577 - protein, 958 aa, Homo sapiens
MLTSFPCCVSSCNSFSPTDNKFATCSDDGTVRIWDFLRCHEERILRGHGADVKCVDWHPTKGLVVSGSKDSQQPIKFWDPKTGQSLATLHAHKNTVMEVKLNLNGNWLLTASRDHLCKLFDIRNLKEELQVFRGHKKEATAVAWHPVHEGLFASGGSDGSLLFWHVGVEKEVGGMEMAHEGMIWSLAWHPLGHILCSGSNDHTSKFWTRNRPGDKMRDRYNLNLLPGMSEDGVEYDDLEPNSLAVIPGMGIPEQLKLAMEQEQMGKDESNEIEMTIPGLDWGMEEVMQKDQKKVPQKKVPYAKPIPAQFQQAWMQNKVPIPAPNEVLNDRKEDIKLEEKKKTQAEIEQEMATLQYTNPQLLEQLKIERLAQKQVEQIQPPPSSGTPLLGPQPFPGQGPMSQIPQGFQQPHPSQQMPMNMAQMGPPGPQGQFRPPGPQGQMGPQGPPLHQGGGGPQGFMGPQGPQGPPQGLPRPQDMHGPQGMQRHPGPHGPLGPQGPPGPQGSSGPQGHMGPQGPPGPQGHIGPQGPPGPQGHLGPQGPPGTQGMQGPPGPRGMQGPPHPHGIQGGPGSQGIQGPVSQGPLMGLNPRGMQGPPGPRENQGPAPQGMIMGHPPQEMRGPHPPGGLLGHGPQEMRGPQEIRGMQGPPPQGSMLGPPQELRGPPGSQSQQGPPQGSLGPPPQGGMQGPPGPQGQQNPARGPHPSQGPIPFQQQKTPLLGDGPRAPFNQEGQSTGPPPLIPGNSARGMAGVQPEALRGHGKAAGPEMNVSPGIPRTHVFEGAEKKVSEEEPRRGMRAVLPPEEGMVFLVLKTLVQRRILMLLRKRPEDEISEVEVGVPHEEEGRVYFPLLTSSLALKEGGSQIPGMETESLGQVMNIFVILPALIIPLTTVIPQPAENAPLLSKAWTWHPYLPESAPGMMAQALLSTERWRPQEALLKTEEAKAEGAQDLLRECPNLGVPAP

SEQ ID NO: 864578 - protein, 326 aa, Homo sapiens
MATEIGSPPRFFHMPRFQHQAPRQLFYKRPDFAQQQAMQQLTFDGKRMRKAVNRKTIDYNPSVIKYLENRIWQRDQRDMRAIQPDAGYYNDLVPPIGMLNNPMNAVTTKFVRTSTNKVKCPVFVVRWTPEGRRLVTGASSGEFTLWNGLTFNFETILQAHDSPVRAMTWSHNDMWMLTADHGGYVKYWQSNMNNVKMFQAHKEAIREARFIHNIPFSVVPIVMVKLFSKCILGAEMHGLCQFLGNFLHPINTIFFFVFTHSPFCWHLSEVVLSRYQPLQYVRDVLSAAFCTGFLFSFMINNVYTLFLFIIYCVRQEYFIPNKEFSL

SEQ ID NO: 864579 - protein, 326 aa, Homo sapiens; identical to SEQ ID NO: 864578

SEQ ID NO: 864580 - protein, 1141 aa, Homo sapiens [sequence omitted]

SEQ ID NO: 864581 - protein, 243 aa, Homo sapiens
MDILLFSLYSFRRGAPPRHEGRAPPRGRDGFPGPEDFGPEENFDASEEAARGRDLRGRGRGTPRGGRKGLLPTPDEFPRFEGGRKPDSWDGNREPGPGHEHFRDTPRPDHPPHDGHSPASRERSSSLQGMDMASLPPRKRPWHDGPGTSEHREMEAPGGPSEDRGGKGRGGPGPAQRVPKSGRSSSLDGEHHDGYHRDEPFGGPPGSGTPSRGGRSGSNWGRGSNMNSGPPRRGASRGGGRGR

SEQ ID NO: 864582 - protein, 326 aa, Homo sapiens; identical to SEQ ID NO: 864578

SEQ ID NO: 864583 - protein, 1336 aa, Homo sapiens
MATEIGSPPRFFHMPRFQHQAPRQLFYKRPDFAQQQAMQQLTFDGKRMRKAVNRKTIDYNPSVIKYLENRIWQRDQRDMRAIQPDAGYYNDLVPPIGMLNNPMNAVTTKFVRTSTNKVKCPVFVVRWTPEGRRLVTGASSGEFTLWNGLTFNFETILQAHDSPVRAMTWSHNDMWMLTADHGGYVKYWQSNMNNVKMFQAHKEAIREASFSPTDNKFATCSDDGTVRIWDFLRCHEERILRGHGADVKCVDWHPTKGLVVSGSKDSQQPIKFWDPKTGQSLATLHAHKNTVMEVKLNLNGNWLLTASRDHLCKLFDIRNLKEELQVFRGHKKEATAVAWHPVHEGLFASGGSDGSLLFWHVGVEKEVGGMEMAHEGMIWSLAWHPLGHILCSGSNDHTSKFWTRNRPGDKMRDRYNLNLLPGMSEDGVEYDDLEPNSLAVIPGMGIPEQLKLAMEQEQMGKDESNEIEMTIPGLDWGMEEVMQKDQKKVPQKKVPYAKPIPAQFQQAWMQNKVPIPAPNEVLNDRKEDIKLEEKKKTQAEIEQEMATLQYTNPQLLEQLKIERLAQKQVEQIQPPPSSGTPLLGPQPFPGQGPMSQIPQGFQQPHPSQQMPMNMAQMGPPGPQGQFRPPGPQGQMGPQGPPLHQGGGGPQGFMGPQGPQGPPQGLPRPQDMHGPQGMQRHPGPHGPLGPQGPPGPQGSSGPQGHMGPQGPPGPQGHIGPQGPPGPQGHLGPQGPPGTQGMQGPPGPRGMQGPPHPHGIQGGPGSQGIQGPVSQGPLMGLNPRGMQGPPGPRENQGPAPQGMIMGHPPQEMRGPHPPGGLLGHGPQEMRGPQEIRGMQGPPPQGSMLGPPQELRGPPGSQSQQGPPQGSLGPPPQGGMQGPPGPQGQQNPARGPHPSQGPIPFQQQKTPLLGDGPRAPFNQEGQSTGPPPLIPGLGQQGAQGRIPPLNPGQGPGPNKGDSRGPPNHHMGPMSERRHEQSGGPEHGPERGPFRGGQDCRGPPDRRGPHPDFPDDFSRPDDFHPDKRFGHRLREFEGRGGPLPQEEKWRRGGPGPPFPPDHREFSEGDGRGAARGPPGAWEGRRPGDERFPRDPEDPRFRGRREESFRRGAPPRHEGRAPPRGRDGFPGPEDFGPEENFDASEEAARGRDLRGRGRGTPRGGRKGLLPTPDEFPRFEGGRKPDSWDGNREPGPGHEHFRDTPRPDHPPHDGHSPASRERSSSLQGMDMASLPPRKRPWHDGPGTSEHREMEAPGGPSEDRGGKGRGGPGPAQRVPKSGRSSSLDGEHHDGYHRDEPFGGPPGSGTPSRGGRSGSNWGRGSNMNSGPPRRGASRGGGRGR

SEQ ID NO: 864584 - protein, 95 aa, Homo sapiens
PPVRDDPESVRSVAHRGRWRLLLWRSGIERIGVGRPNKRDISGSEGERFAGHLGALLKARRILEGKHHHGYRNWFSSSFFPYAKVPAPGTSTAVL

SEQ ID NO: 864585 - protein, 97 aa, Homo sapiens
PPVRDDPESVRSVAHRGRWRLLLWRSGIERIGVGRPNKRDISGSEGERFAGHLGALLKARRLPSACHCRHAPPRLTGFGGDGVSLCWPGRSPAPNRE

SEQ ID NO: 864586 - protein, 938 aa, Homo sapiens
MLTSFPCCVSSCNSFSPTDNKFATCSDDGTVRIWDFLRCHEERILRGHGADVKCVDWHPTKGLVVSGSKDSQQPIKFWDPKTGQSLATLHAHKNTVMEVKLNLNGNWLLTASRDHLCKLFDIRNLKEELQVFRGHKKEATAVAWHPVHEGLFASGGSDGSLLFWHVGVEKEVGGMEMAHEGMIWSLAWHPLGHILCSGSNDHTSKFWTRNRPGDKMRDRYNLNLLPGMSEDGVEYDDLEPNSLAVIPGMGIPEQLKLAMEQEQMGKDESNEIEMTIPGLDWGMEEVMQKDQKKVPQKKVPYAKPIPAQFQQAWMQNKVPIPAPNEVLNDRKEDIKLEEKKKTQAEIEQEMATLQYTNPQLLEQLKIERLAQKQVEQIQPPPSSGTPLLGPQPFPGQGPMSQIPQGFQQPHPSQQMPMNMAQMGPPGPQGQFRPPGPQGQMGPQGPPLHQGGGGPQGFMGPQGPQGPPQGLPRPQDMHGPQGMQRHPGPHGPLGPQGPPGPQGSSGPQGHMGPQGPPGPQGHIGPQGPPGPQGHLGPQGPPGTQGMQGPPGPRGMQGPPHPHGIQGGPGSQGIQGPVSQGPLMGLNPRGMQGPPGPRENQGPAPQGMIMGHPPQEMRGPHPPGGLLGHGPQEMRGPQEIRGMQGPPPQGSMLGPPQELRGPPGSQSQQGPPQGSLGPPPQGGMQGPPGPQGQQNPARGPHPSQGPIPFQQQKTPLLGDGPRAPFNQEGQSTGPPPLIPGLGQQGAQGRIPPLNPGQGPGPNKVSEEEPRRGMRAVLPPEEGMVFLVLKTLVQRRILMLLRKRPEDEISEVEVGVPHEEEGRVYFPLLTSSLALKEGGSQIPGMETESLGQVMNIFVILPALIIPLTTVIPQPAENAPLLSKAWTWHPYLPESAPGMMAQALLSTERWRPQEALLKTEEAKAEGAQDLLRECPNLGVPAP

SEQ ID NO: 864587 - protein, 1141 aa, Homo sapiens [sequence omitted]

SEQ ID NO: 864588 - protein, 999 aa, Homo sapiens
MSFLRGREKLGNFCEQIFSLWCCCRVEKEVGGMEMAHEGMIWSLAWHPLGHILCSGSNDHTSKFWTRNRPGDKMRDRYNLNLLPGMSEDGVEYDDLEPNSLAVIPGMGIPEQLKLAMEQEQMGKDESNEIEMTIPGLDWGMEEVMQKDQKKVPQKKVPYAKPIPAQFQQAWMQNKVPIPAPNEVLNDRKEDIKLEEKKKTQAEIEQEMATLQYTNPQLLEQLKIERLAQKQVEQIQPPPSSGTPLLGPQPFPGQGPMSQIPQGFQQPHPSQQMPMNMAQMGPPGPQGQFRPPGPQGQMGPQGPPLHQGGGGPQGFMGPQGPQGPPQGLPRPQDMHGPQGMQRHPGPHGPLGPQGPPGPQGSSGPQGHMGPQGPPGPQGHIGPQGPPGPQGHLGPQGPPGTQGMQGPPGPRGMQGPPHPHGIQGGPGSQGIQGPVSQGPLMGLNPRGMQGPPGPRENQGPAPQGMIMGHPPQEMRGPHPPGGLLGHGPQEMRGPQEIRGMQGPPPQGSMLGPPQELRGPPGSQSQQGPPQGSLGPPPQGGMQGPPGPQGQQNPARGPHPSQGPIPFQQQKTPLLGDGPRAPFNQEGQSTGPPPLIPGLGQQGAQGRIPPLNPGQGPGPNKGDSRGPPNHHMGPMSERRHEQSGGPEHGPERGPFRGGQDCRGPPDRRGPHPDFPDDFSRPDDFHPDKRFGHRLREFEGRGGPLPQEEKWRRGGPGPPFPPDHREFSEGDGRGAARGPPGAWEGRRPGDERFPRDPEDPRFRGRREESFRRGAPPRHEGRAPPRGRDGFPGPEDFGPEENFDASEEAARGRDLRGRGRGTPRGGRKGLLPTPDEFPRFEGGRKPDSWDGNREPGPGHEHFRDTPRPDHPPHDGHSPASRERSSSLQGMDMASLPPRKRPWHDGPGTSEHREMEAPGGPSEDRGGKGRGGPGPAQRVPKSGRSSSLDGEHHDGYHRDEPFGGPPGSGTPSRGGRSGSNWGRGSNMNSGPPRRGASRGGGRGR

SEQ ID NO: 864589 - protein, 322 aa, Homo sapiens
MATEIGSPPRFFHMPRFQHQAPRQLFYKRPDFAQQQAMQQLTFDGKRMRKAVNRKTIDYNPSVIKYLENRIWQRDQRDMRAIQPDAGYYNDLVPPIGMLNNPMNAVTTKFVRTSTNKVKCPVFVVRWTPEGRRLVTGASSGEFTLWNGLTFNFETILQAHDSPVRAMTWSHNDMWMLTADHGGYVKYWQSNMNNVKMFQAHKEAIREASFSPTDNKFATCSDDGTVRIWDFLRCHEERILRGMADVNCVQRLPPRVIVQKSRITAISSGPHGRVWNFCHKHDGGDTPRVGYTQDPGWLNQKRSGKTCAFKSRENIMTQQTRS

SEQ ID NO: 864590 - protein, 477 aa, Homo sapiens
GLTSSYSLWWMLRSSLKQYSFEALREKSNYSDIPDVKNDFAFILHLADQYDPLYSKRFSIFLSEVSENKLKQINLNNEWTVEKLKSKLVKNAQDKIELHLFMLNGLPDNVFELTEMEVLSLELIPEVKLPSAVSQLVNLKELRVYHSSLVVDHPALAFLEENLKILRLKFTEMGKIPRWVFHLKNLKELYLSGCVLPEQLSTMQLEGFQDLKNLRTLYLKSSLSRIPQVVTDLLPSLQKLSLDNEGSKLVVLNNLKKMVNLKSLELISCDLERIPHSIFSLNNLHELDLRENNLKTVEEIISFQHLQNLSCLKLWHNNIAYIPAQIGALSNLEQLSLDHNNIENLPLQLFLCTKLHYLDLSYNHLTFIPEEIQYLSNLQYFAVTNNNIEMLPDGLFQCKKLQCLLLGKNSLMNLSPHVGELSNLTHLELIGNYLETLPPELEGCQSLKRNCLIVEENLLNTLPLPVTERLQTCLDKC

SEQ ID NO: 864591 - protein, 477 aa, Homo sapiens; identical to SEQ ID NO: 864590

SEQ ID NO: 864592 - protein, 477 aa, Homo sapiens; identical to SEQ ID NO: 864590

SEQ ID NO: 864593 - protein, 231 aa, Homo sapiens
LTWSVRVSGCGELRDWGATGRAGPSGPRRRRRYKAGDWEHVMSECGGRGGGSSSSEDAEDEGGGGGGPAGSDCLSSSPTLATASSAGRLRRGLRGAFLMARQRPELLCGAVALGCALLLALKFTCSRAKDVIIPAKPPVSFFSLRSPVLDLFQGQLDYAEYVRRDSEVVLLFFYAPWCGQSIAARAEIEQAASRLSDQVLFVAINCWWNQGKCRKQKHFFYFPVIYLYHRR

SEQ ID NO: 864594 - protein, 703 aa, Homo sapiens
LTWSVRVSGCGELRDWGATGRAGPSGPRRRRRYKAGDWEHVMSECGGRGGGSSSSEDAEDEGGGGGGPAGSDCLSSSPTLATASSAGRLRRGLRGAFLMARQRPELLCGAVALGCALLLALKFTCSRAKDVIIPAKPPVSFFSLRSPVLDLFQGQLDYAEYVRRDSEVVLLFFYAPWCGQSIAARAEIEQAASRLSDQVLFVAINCWWNQGKCRKQKHFFYFPVIYLYHRSFGPIEYKGPMSAVYIEKFVRRVMKPLLYIPSQSELLDFLSNYEPGVLGYFEFSGSPQPPGYLTFFTSALHSLKKDYLGTVRFGVITNKHLAKLVSLVHSGSVYLHRHFNTSLVFPREVLNYTAENICKWALENQETLFRWLRPHGGKSLLLNNELKKGPALFLFIPFNPLAESHPLIDEITEVALEYNNCHGDQVVERLLQHLRRVDAPVLESLALEVPAQLPDPPTITASPCCNTVVLPQWHSFSRTHNVCELCVNQTSGGMKPSSVSVPQCSFFEMAAALDSFYLKEQTFYHVASDSIECSNFLTSYSPFSYYTACCRTISRGVSGFIDSEQGVFEAPTVAFSSLEKKCEVDAPSSVPHIEENRYLFPEVDMTSTNFTGLSCRTNKTLNIYLLDSNLFWLYAERLGAPSSTQVKEFAAIVDVKEESHYILDPKQALMKLTLGTAGSLFPQALYILLDFIWVNFIDGSHYI

SEQ ID NO: 864595 - protein, 999 aa, Homo sapiens
LTWSVRVSGCGELRDWGATGRAGPSGPRRRRRYKAGDWEHVMSECGGRGGGSSSSEDAEDEGGGGGGPAGSDCLSSSPTLATASSAGRLRRGLRGAFLMARQRPELLCGAVALGCALLLALKFTCSRAKDVIIPAKPPVSFFSLRSPVLDLFQGQLDYAEYVRRDSEVVLLFFYAPWCGQSIAARAEIEQAASRLSDQVLFVAINCWWNQGKCRKQKHFFYFPVIYLYHRSFGPIEYKGPMSAVYIEKFVRRVMKPLLYIPSQSELLDFLSNYEPGVLGYFEFSGSPQPPGYLTFFTSALHSLKKDYLGTVRFGVITNKHLAKLVSLVHSGSVYLHRHFNTSLVFPREVLNYTAENICKWALENQETLFRWLRPHGGKSLLLNNELKKGPALFLFIPFNPLAESHPLIDEITEVALEYNNCHGDQVVERLLQHLRRVDAPVLESLALEVPAQLPDPPTITASPCCNTVVLPQWHSFSRTHNVCELCVNQTSGGMKPSSVSVPQCSFFEMAAALDSFYLKEQTFYHVASDSIECSNFLTSYSPFSYYTACCRTISRGVSGFIDSEQGVFEAPTVAFSSLEKKCEVDAPSSVPHIEENRYLFPEVDMTSTNFTGLSCRTNKTLNIYLLDSNLFWLYAERLGAPSSTQVKEFAAIVDVKEESHYILDPKQALMKLTLESFIQNFSVLYSPLKRHLIGSGSAQFPSQHLITEVTTDTFWEVVLQKQDVLLLYYAPWCGFCPSLNHIFIQLARNLPMDTFTVARIDVSQNDLPWEFMVDRLPTVLFFPCNRKDLSVKYPEDVPITLPNLLRFILHHSDPASSPQNVANSPTKECLQSEAVLQRGHISHLEREIQKLRAEISSLQRAQVQVESQLSSARRDEHRLRQQQRALEEQHSLLHAHSEQLQALYEQKTRELQELARKLQELADASENLLTENTWLKILVATMERKLEGRDGAESLAAQREVHPKQPEPSATPQLPGSSPPPANVSATLVSERNKENRTD

SEQ ID NO: 864596 - protein, 786 aa, Homo sapiens
LTWSVRVSGCGELRDWGATGRAGPSGPRRRRRYKAGDWEHVMSECGGRGGGSSSSEDAEDEGGGGGGPAGSDCLSSSPTLATASSAGRLRRGLRGAFLMARQRPELLCGAVALGCALLLALKFTCSRAKDVIIPAKPPVSFFSLRSPVLDLFQGQLDYAEYVRRDSEVVLLFFYAPWCGQSIAARAEIEQAASRLSDQVLFVAINCWWNQGKCRKQKHFFYFPVIYLYHRSFGPIEYKGPMSAVYIEKFVRRVMKPLLYIPSQSELLDFLSNYEPGVLGYFEFSGSPQPPGYLTFFTSALHSLKKDYLGTVRFGVITNKHLAKLVSLVHSGSVYLHRHFNTSLVFPREVLNYTAENICKWALENQETLFRWLRPHGGKSLLLNNELKKGPALFLFIPFNPLAESHPLIDEITEVALEYNNCHGDQVVERLLQHLRRVDAPVLESLALEVPAQLPDPPTITASPCCNTVVLPQWHSFSRTHNVCELCVNQTSGGMKPSSVSVPQCSFFEMAAALDSFYLKEQTFYHVASDSIECSNFLTSYSPFSYYTACCRTISRGVSGFIDSEQGVFEAPTVAFSSLEKKCEVDAPSSVPHIEENRYLFPEVDMTSTNFTGLSCRTNKTLNIYLLDSNLFWLYAERLGAPSSTQVKEFAAIVDVKEESHYILDPKQALMKLTLESFIQNFSVLYSPLKRHLIGSGSAQFPSQHLITEVTTDTFWEVVLQKQDVLLLYYAPWCGFCPSLNHIFIQLARNLPMDTFTVARIDVSQNDLPWEFMVDRLPTVLFFPCNR

SEQ ID NO: 864597 - protein, 123 aa, Homo sapiens
VSLSLSTRWAVPRISLWPPQRFAASGPAVPLSSLDQDGEHPRNPPHQHSRRTLPEVAAETSQLARPPTRTTAPSTPQGPTPARTTIPGVLRKLKCTQARCLLGIVVDVGQHGGHRIPARPLWD

SEQ ID NO: 864598 - protein, 123 aa, Homo sapiens; identical to SEQ ID NO: 864597

SEQ ID NO: 864599 - protein, 123 aa, Homo sapiens; identical to SEQ ID NO: 864597

SEQ ID NO: 864600 - protein, 123 aa, Homo sapiens; identical to SEQ ID NO: 864597

SEQ ID NO: 864601 - protein, 123 aa, Homo sapiens; identical to SEQ ID NO: 864597

SEQ ID NO: 864602 - protein, 123 aa, Homo sapiens; identical to SEQ ID NO: 864597

SEQ ID NO: 864603 - protein, 123 aa, Homo sapiens; identical to SEQ ID NO: 864597

SEQ ID NO: 864604 - protein, 123 aa, Homo sapiens; identical to SEQ ID NO: 864597

SEQ ID NO: 864605 - protein, 123 aa, Homo sapiens; identical to SEQ ID NO: 864597

SEQ ID NO: 864606 - protein, 145 aa, Homo sapiens
MNELQRRLGPRGLVVLGFPCNQFGHQENAKNEEILNSLKYVRPGGGFEPNFMLFEKCEVNGAGAHPLFAFLREALPAPSDDATALMTDPKLITWSPVCRNDVAWNFEKFLVGPDGVPLRRYSRRFQTIDIEPDIEALLSQGPSCA

SEQ ID NO: 864607 - protein, 74 aa, Homo sapiens
FLEDPRTALITTALMTDPKLITWSPVCRNDVAWNFEKFLVGPDGVPLRRYSRRFQTIDIEPDIEALLSQGPSCA

SEQ ID NO: 864608 - protein, 135 aa, Homo sapiens
MTGNKSHDEEGNLAVAENAKNEEILNSLKYVRPGGGFEPNFMLFEKCEVNGAGAHPLFAFLREALPAPSDDATALMTDPKLITWSPVCRNDVAWNFEKFLVGPDGVPLRRYSRRFQTIDIEPDIEALLSQGPSCA

SEQ ID NO: 864609 - protein, 145 aa, Homo sapiens; identical to SEQ ID NO: 864606

SEQ ID NO: 864610 - protein, 145 aa, Homo sapiens; identical to SEQ ID NO: 864606

SEQ ID NO: 864611 - protein, 145 aa, Homo sapiens; identical to SEQ ID NO: 864606

SEQ ID NO: 864612 - protein, 145 aa, Homo sapiens; identical to SEQ ID NO: 864606

SEQ ID NO: 864613 - protein, 145 aa, Homo sapiens; identical to SEQ ID NO: 864606

SEQ ID NO: 864614 - protein, 145 aa, Homo sapiens; identical to SEQ ID NO: 864606

SEQ ID NO: 864615 - protein, 145 aa, Homo sapiens; identical to SEQ ID NO: 864606

SEQ ID NO: 864616 - protein, 145 aa, Homo sapiens; identical to SEQ ID NO: 864606

SEQ ID NO: 864617 - protein, 145 aa, Homo sapiens; identical to SEQ ID NO: 864606

SEQ ID NO: 864618 - protein, 145 aa, Homo sapiens; identical to SEQ ID NO: 864606

SEQ ID NO: 864619 - protein, 145 aa, Homo sapiens; identical to SEQ ID NO: 864606

SEQ ID NO: 864620 - protein, 145 aa, Homo sapiens; identical to SEQ ID NO: 864606

SEQ ID NO: 864621 - protein, 145 aa, Homo sapiens; identical to SEQ ID NO: 864606

SEQ ID NO: 864622 - protein, 118 aa, Homo sapiens
MCAARLAAARGGGPVGVCLLGAPAGRRGACEPGLPAGQGERQERRDSEFPQVRPAWWWVRAQLHALREVRGERCGGAPSLRLPAGGPASSQRRRHRAYDRPQAHHLVSGVSQRCCLEL

SEQ ID NO: 864623 - protein, 148 aa, Homo sapiens
MCAARLAAARGGGPVGVCLLGAPAGRRGACEPGLPAGQGTTYRECGVPLRHHGPGLHPDERAAAAPRTPGPGGARLPVQPVWASGAPGGAGRGGGGRAVVAGGAGGVLVGAVGSMRGESGYSLVSFLLLVAAEIPLRPWDCAWRAKSR

SEQ ID NO: 864624 - protein, 144 aa, Homo sapiens
MNELQRRLGPRGLVVLGFPCNQFGHQENAKNEEILNSLKYVRPGGGFEGGLCLGGGFSGVFVLGVLVGGGGEALPAPSDDATALMTDPKLITWSPVCRNDVAWNFEKFLVGPDGVPLRRYSRRFQTIDIEPDIEALLSQGPSCA

SEQ ID NO: 864625 - protein, 118 aa, Homo sapiens; identical to SEQ ID NO: 864622

SEQ ID NO: 864626 - protein, 184 aa, Homo sapiens
MCAARLAAARGGGPVGVCLLGAPAGRRGACEPGLPAGQGTTYRECGVPLRHHGPGLHPDERAAAAPRTPGPGGARLPVQPVWASGERQERRDSEFPQVRPAWWWVRAQLHALREVRGERCPYAGTAAASRPLTSSLTSKPCCLKGPAVPRAPLLPRLLGSCSAAVSGGFSSMRVFPLNLRGRNT

SEQ ID NO: 864627 - protein, 145 aa, Homo sapiens; identical to SEQ ID NO: 864606

SEQ ID NO: 864628 - protein, 145 aa, Homo sapiens; identical to SEQ ID NO: 864606

SEQ ID NO: 864629 - protein, 145 aa, Homo sapiens; identical to SEQ ID NO: 864606

SEQ ID NO: 864630 - protein, 120 aa, Homo sapiens
  misc_feature (8)..(8): Xaa can be any naturally occurring amino acid
  misc_feature (10)..(11): Xaa can be any naturally occurring amino acid
NFVYIPHXLXXLRQYVRPGGGFEPNFMLFEKCEVNGAGAHPLFAFLREALPAPSDDATALMTDPKLITWSPVCRNDVAWNFEKFLVGPDGVPLRRYSRRFQTIDIEPDIEALLSQGPSCA

SEQ ID NO: 864631 - protein, 127 aa, Homo sapiens
GGFEPNFMLFEKCEGILNSLKYVRPGGGFEPNFMLFEKCEVNGAGAHPLFAFLREALPAPSDDATALMTDPKLITWSPVCRNDVAWNFEKFLVGPDGVPLRRYSRRFQTIDIEPDIEALLSQGPSCA

SEQ ID NO: 864632 - protein, 145 aa, Homo sapiens; identical to SEQ ID NO: 864606

SEQ ID NO: 864633 - protein, 145 aa, Homo sapiens; identical to SEQ ID NO: 864606

SEQ ID NO: 864634 - protein, 145 aa, Homo sapiens; identical to SEQ ID NO: 864606

SEQ ID NO: 864635 - protein, 145 aa, Homo sapiens; identical to SEQ ID NO: 864606

SEQ ID NO: 864636 - protein, 148 aa, Homo sapiens; identical to SEQ ID NO: 864623

SEQ ID NO: 864637 - protein, 136 aa, Homo sapiens
MPPACRSGRYIYSRFLGENAKNEEILNSLKYVRPGGGFEPNFMLFEKCEVNGAGAHPLFAFLREALPAPSDDATALMTDPKLITWSPVCRNDVAWNFEKFLVGPDGVPLRRYSRRFQTIDIEPDIEALLSQGPSCA

SEQ ID NO: 864638 - protein, 135 aa, Homo sapiens
MNELQRRLGPRGLVVLGFPCNQFGHQENAKNEEILNSLKYVRPGGGFEPNFMLFEKCEVNGAGAHPLFAFLPTALMTDPKLITWSPVCRNDVAWNFEKFLVGPDGVPLRRYSRRFQTIDIEPDIEALLSQGPSCA

SEQ ID NO: 864639 - protein, 151 aa, Homo sapiens
MNELQRRLGPRGLVVLGFPCNQFGHQENAKNEEILNSLKYVRPGGGFEPNFMLFEKCEVNGAGAHPLFAFLREALPAPSDDATALMTDPKLITWSPVCRNDVAWNFEKFLVGPDGVPLRRYSRRFQTIDIEPDIEACLAVAVLLSRGGFHL

SEQ ID NO: 864640 - protein, 544 aa, Homo sapiens
MATGQDRVVALVDMDCFFVQVEQRQNPHLRNKPCAVVQYKSWKGGGIIAVSYEARAFGVTRSMWADDAKKLCPDLLLAQVRESRGKANLTKYREASVEVMEIMSRFAVIERASIDEAYVDLTSAVQERLQKLQGQPISADLLPSTYIEGLPQGPTTAEETVQKEGMRKQGLFQWLDSLQIDNLTSPDLQLTVGAVIVEEMRAAIERETGFQCSAGISHNKVLAKLACGLNKPNRQTLVSHGSVPQLFSQMPIRKIRSLGGKLGASVIEILGIEYMGELTQFTESQLQSHFGEKNGSWLYAMCRGIEHDPVKPRQLPKTIGCSKNFPGKTALATREQVQWWLLQLAQELEERLTKDRNDNDRVATQLVVSIRVQGDKRLSSLRRCCALTRYDAHKMSHDAFTVIKNCNTSGIQTEWSPPLTMLFLCATKFSASAPSSSTDITSFLSSDPSSLPKVPVTSSEAKTQGSGPAVTATKKATTSLESFFQKAAERQKVKEASLSSLTAPTQAPMSNSPSKPSLPFQTSQSTGTEPFFEAEKSASKAETA

SEQ ID NO: 864641 - protein, 129 aa, Homo sapiens
MWADDAKKLCPDLLLAQVRESRGKANLTKYREASVEVMEIMSRFAVIERASIDEAYVDLTSAVQERLQKLQGQPISADLLPSTYIEGLPQGPTTAEETVQKGTSIASYCFCFLPLEPALLGHADSPWNN

SEQ ID NO: 864642 - protein, 713 aa, Homo sapiens
MATGQDRVVALVDMDCFFVQVEQRQNPHLRNKPCAVVQYKSWKGGGIIAVSYEARAFGVTRSMWADDAKKLCPDLLLAQVRESRGKANLTKYREASVEVMEIMSRFAVIERASIDEAYVDLTSAVQERLQKLQGQPISADLLPSTYIEGLPQGPTTAEETVQKEGMRKQGLFQWLDSLQIDNLTSPDLQLTVGAVIVEEMRAAIERETGFQCSAGISHNKVLAKLACGLNKPNRQTLVSHGSVPQLFSQMPIRKIRSLGGKLGASVIEILGIEYMGELTQFTESQLQSHFGEKNGSWLYAMCRGIEHDPVKPRQLPKTIGCSKNFPGKTALATREQVQWWLLQLAQELEERLTKDRNDNDRVATQLVVSIRVQGDKRLSSLRRCCALTRYDAHKMSHDAFTVIKNCNTSGIQTEWSPPLTMLFLCATKFSASAPSSSTDITSFLSSDPSSLPKVPVTSSEAKTQGSGPAVTATKKATTSLESFFQKAAERQKVKEASLSSLTAPTQAPMSNSPSKPSLPFQTSQSTGTEPFFKQKSLLLKQKQLNNSSVSSPQQNPWSNCKALPNSLPTEYPGCVPVCEGVSKLEESSKATPAEMDLAHNSQSMHASSASKSVLEVTQKATPNPSLLAAEDQVPCEKCGSLVPVWDMPEHMDYHFALELQKSFLQPHSSNPQVVSAVSHQGKRNPKSPLACTNKRPRPEGMQTLESFFKPLTH

SEQ ID NO: 864643 - protein, 713 aa, Homo sapiens; identical to SEQ ID NO: 864642

SEQ ID NO: 864644 - protein, 651 aa, Homo sapiens
MWADDAKKLCPDLLLAQVRESRGKANLTKYREASVEVMEIMSRFAVIERASIDEAYVDLTSAVQERLQKLQGQPISADLLPSTYIEGLPQGPTTAEETVQKEGMRKQGLFQWLDSLQIDNLTSPDLQLTVGAVIVEEMRAAIERETGFQCSAGISHNKVLAKLACGLNKPNRQTLVSHGSVPQLFSQMPIRKIRSLGGKLGASVIEILGIEYMGELTQFTESQLQSHFGEKNGSWLYAMCRGIEHDPVKPRQLPKTIGCSKNFPGKTALATREQVQWWLLQLAQELEERLTKDRNDNDRVATQLVVSIRVQGDKRLSSLRRCCALTRYDAHKMSHDAFTVIKNCNTSGIQTEWSPPLTMLFLCATKFSASAPSSSTDITSFLSSDPSSLPKVPVTSSEAKTQGSGPAVTATKKATTSLESFFQKAAERQKVKEASLSSLTAPTQAPMSNSPSKPSLPFQTSQSTGTEPFFKQKSLLLKQKQLNNSSVSSPQQNPWSNCKALPNSLPTEYPGCVPVCEGVSKLEESSKATPAEMDLAHNSQSMHASSASKSVLEVTQKATPNPSLLAAEDQVPCEKCGSLVPVWDMPEHMDYHFALELQKSFLQPHSSNPQVVSAVSHQGKRNPKSPLACTNKRPRPEGMQTLESFFKPLTH

SEQ ID NO: 864645 - protein, 598 aa, Homo sapiens
MATGQDRVVALVDMDCFFVQVEQRQNPHLRNKPCAVVQYKSWKGGGIIAVSYEARAFGVTRSMWADDAKKLCPDLLLAQVRESRGKANLTKYREASVEVMEIMSRFAVIERASIDEAYVDLTSAVQERLQKLQGQPISADLLPSTYIEGLPQGPTTAEETVQKEGMRKQGLFQWLDSLQIDNLTSPDLQLTVGAVIVEEMRAAIERETGFQCSAGISHNKVLAKLACGLNKPNRQTLVSHGSVPQLFSQMPIRKIRSLGGKLGASVIEILGIEYMGELTQFTESQLQSHFGEKNGSWLYAMCRGIEHDPVKPRQLPKTIGCSKNFPGKTALATREQVQWWLLQLAQELEERLTKDRNDNDRVATQLVVSIRVQGDKRLSSLRRCCALTRYDAHKMSHDAFTVIKNCNTSGIQTEWSPPLTMLFLCATKFSASAPSSSTDITSFLSSDPSSLPKVPVTSSEAKTQGSGPAVTATKKATTSLESFFQKAAERQKVKEASLSSLTAPTQAPMSNSPSKPSLPFQTSQSTGTEPFSRKVVLGRTAYNLGFPPKPAPVGSPSPVRGRWWGARPHPGLAGGVHVGGAPLVVWGSWVPFRRRLLS

SEQ ID NO: 864646 - protein, 414 aa, Homo sapiens
MATGQDRVVALVDMDCFFVQVEQRQNPHLRNKPCAVVQYKSWKGGGIIAVSYEARAFGVTRSMWADDAKKLCPDLLLAQVRESRGKANLTKYREASVEVMEIMSRFAVIERASIDEAYVDLTSAVQERLQKLQGQPISADLLPSTYIEGLPQGPTTAEETVQKEGMRKQGLFQWLDSLQIDNLTSPDLQLTVGAVIVEEMRAAIERETGFQCSAGISHNKVLAKLACGLNKPNRQTLVSHGSVPQLFSQMPIRKIRSLGGKLGASVIEILGIEYMGELTQFTESQLQSHFGEKNGSWLYAMCRGIEHDPVKPRQLPKTIGCSKNFPGKTALATREQVQWWLLQLAQELEERLTKDRNDNDRVATQLVVSIRVQGDKRLSSLRRCCALTRYDAHKMSHDAFTVIKNCNTSGIQTE

SEQ ID NO: 864647 - protein, 713 aa, Homo sapiens; identical to SEQ ID NO: 864642

SEQ ID NO: 864648 - protein, 713 aa, Homo sapiens; identical to SEQ ID NO: 864642

SEQ ID NO: 864649 - protein, 319 aa, Homo sapiens
MSHDAFTVIKNCNTSGIQTEWSPPLTMLFLCATKFSASAPSSSTDITSFLSSDPSSLPKVPVTSSEAKTQGSGPAVTATKKATTSLESFFQKAAERQKVKEASLSSLTAPTQAPMSNSPSKPSLPFQTSQSTGTEPFFKQKSLLLKQKQLNNSSVSSPQQNPWSNCKALPNSLPTEYPGCVPVCEGVSKLEESSKATPAEMDLAHNSQSMHASSASKSVLEVTQKATPNPSLLAAEDQVPCEKCGSLVPVWDMPEHMDYHFALELQKSFLQPHSSNPQVVSAVSHQGKRNPKSPLACTNKRPRPEGMQTLESFFKPLTH

SEQ ID NO: 864650 - protein, 191 aa, Homo sapiens
MATGQDRVVALVDMDCFFVQVEQRQNPHLRNKPCAVVQYKSWKGGGIIAVSYEARAFGVTRSMWADDAKKLCPDLLLAQVRESRGKANLTKYREASVEVMEIMSRFAVIERASIDEAYVDLTSAVQERLQKLQGQPISADLLPSTYIEGLPQGPTTAEETVQKGTSIASYCFCFLPLEPALLGHADSPWNN

SEQ ID NO: 864651 - protein, 40 aa, Homo sapiens
MSMKAQHIQKNTNKNPSQKSPPKPKQQHTRKNTQNRNEPT

SEQ ID NO: 864652 - protein, 520 aa, Homo sapiens
MASNDKGMAPSLGSPWASQMGPWDAILKAVKDQLPSLDSDSPLSDYGEEELFIFQRNQTSLIPDLSEELAEDPADGDKSRAWVAAAEESLPEPVLVPAELATEPGCRQNTRTKDASSQEGRDPGRPFESSGEVSALLGMAEEPPRWLEGDLGSLSFNTKGSQGPPWDPQAEATLSCHEGDPKAEPLSTASQESVNRRALRQERRKMIETDILQKVTRDACGPTSSDKGGVKEAPCHAAESAPRSKMPLVEPPEGPPVLSLQQLEAWDLDDILQSLAGQEDNQGNRAPGTVWWAADHRQVQDRMVPSAHNRLMEQLALLCTTQSKASACARKVPADTPQDTKEADSGSRCASRKQGSQAGPGPQLAQGMRLNAESPTIFIDLRQMELPDHLSPESSSHSSSDSEEEEEEEMAALGDAEGASPSSLGLRTCTGKSQLLQQLRAFQKGTAQPELPASKGPAGGRAQAPEDTAGSRTGRKQHMKLCAKGQSAQARLPRGRPRALGDVPEPGAAREALMPPLEQL

SEQ ID NO: 864653 - protein, 247 aa, Homo sapiens
MSGLRPGTQVDPEIELFVKAGSDGESIGNCPFCQRLFMILWLKGVKFNVTTVDMTRKPEELKDLAPGTNPPFLVYNKELKTDFIKIEEFLEQTLAPPRYPHLSPKYKESFDVGCNLFAKFSAYIKNTQKEANKNFEKSLLKEFKRLDDYLNTPLLDEIDPDSAEEPPVSRRLFLDGDQLTLADCSLLPKLNIIKVAAKKYRDFDIPAEFSGVWRYLHNAYAREEFTHTCPEDKEIENTYANVAKQKS

SEQ ID NO: 864654 - protein, 247 aa, Homo sapiens; identical to SEQ ID NO: 864653

SEQ ID NO: 864655 - protein, 120 aa, Homo sapiens
SGLLLKHFEKSLLKEFKRLDDYLNTPLLDEIDPDSAEEPPVSRRLFLDGDQLTLADCSLLPKLNIIKVAAKKYRDFDIPAEFSGVWRYLHNAYAREEFTHTCPEDKEIENTYANVAKQKS

SEQ ID NO: 864656 - protein, 247 aa, Homo sapiens; identical to SEQ ID NO: 864653

SEQ ID NO: 864657 - protein, 205 aa, Homo sapiens
MSGLRPGTQVDPEIELFVKAGSDGESIGNCPFCQRLFMILWLKGVKFNVTTVDMTRYPHLSPKYKESFDVGCNLFAKFSAYIKNTQKEANKNFEKSLLKEFKRLDDYLNTPLLDEIDPDSAEEPPVSRRLFLDGDQLTLADCSLLPKLNIIKVAAKKYRDFDIPAEFSGVWRYLHNAYAREEFTHTCPEDKEIENTYANVAKQKS

SEQ ID NO: 864658 - protein, 229 aa, Homo sapiens
MSGLRPGTQVDPEIELFVKAGSDGESIGNCPFCQRLFMILWLKGVKFNVTTVDMTRKPEELKDLAPGTNPPFLVYNKELKTDFIKIEEFLEQTLAPPRYPHLSPKYKESFDVGCNLFAKFSAYIKNTQKEANKNFEKSLLKEFKRLDDYLNTPLLDEIDPDSAEEPPVSRRLFLDGDQLTLADCSLLPKLNIIKIGSCSVTQVGVQWHDQGLLQPPPLRLKQSSHPTLE

SEQ ID NO: 864659 - protein, 227 aa, Homo sapiens
MSGLRPGTQVDPEIELFVKAGSDGESIGNCPFCQRLFMILWLKGVKFNVTTVDMTRKPEELKDLAPGTNPPFLVYNKELKTDFIKIEEFLEQTLAPPRYPHLSPKYKESFDVGCNLFAKFSAYIKNTQKEANKILDEIDPDSAEEPPVSRRLFLDGDQLTLADCSLLPKLNIIKVAAKKYRDFDIPAEFSGVWRYLHNAYAREEFTHTCPEDKEIENTYANVAKQKS

SEQ ID NO: 864660 - protein, 245 aa, Homo sapiens
MSPPRPQTVPKALRDATARPSNAWASDIRPPGAWLDARAASPLISPPSRRVERLLGPEPPGGGGIGAGRRHLPPSTAPLAAPSPACARPRSGAGRLAPSAIRRAARLGLGPARWQSRAAAFYFVRGFRTGWSFVGWVVLGTSAKRTRLFFFLSKMAASSRAQVLSLYRAMLRESKRFSAYNYRTYAVRRIRDAFRENKNVKDPVEIQTLVNKAKRDLGVIRRQVHIGQLYSTDKLIIENRDMPRT

SEQ ID NO: 864661 - protein, 245 aa, Homo sapiens; identical to SEQ ID NO: 864660

SEQ ID NO: 864662 - protein, 245 aa, Homo sapiens; identical to SEQ ID NO: 864660

SEQ ID NO: 864663 - protein, 99 aa, Homo sapiens
SVTRATRPPGCRKGRCPRNTNVSAKTPDGSQRLSVMQLHVPRMPGPPISVRQELGWMHGRPVLLFPRPPAAWSGCWVPSLRAGAGSGRGGGISLPAPPP

SEQ ID NO: 864664 - protein, 99 aa, Homo sapiens
MAASSRAQVLSLYRAMLRESKRFSAYNYRTYAVRRIRDAFRENKNVKDPVEIQTLVNKAKRDLGVIRRQMDSHSVAQAGVHWNDLSSLQPLPPWFKQFS

SEQ ID NO: 864665 - protein, 245 aa, Homo sapiens; identical to SEQ ID NO: 864660

SEQ ID NO: 864666 - protein, 99 aa, Homo sapiens; identical to SEQ ID NO: 864663

SEQ ID NO: 864667 - protein, 917 aa, Homo sapiens
RCWPRRGSFWKALLFRFSVPVPGVAQTDPVNMSGFSPELIDYLEGKISFEEFERRREERKTREKKSLQEKGKLSAEENPDDSEVPSSSGINSTKSQDKDVNEGETSDGVRKSVHKVFASMLGENEDDEEEEEEEEEEEEEEETPEQPTAGDVFVLEMVLNRETKKMMKEKRPRSKLPRALRGLMGEANIRFARGEREEAILMCMEIIRQAPLAYEPFSTLAMIYEDQGDMEKSLQFELIAAHLNPSDTEEWVRLAEMSLEQDNIKQAIFCYTKALKYEPTNVRYLWERSSLYEQMGDHKMAMDGYRRILNLLSPSDGERFMQLARDMAKSYYEANDVTSAINIIDEAFSKHQGLVSMEDVNIAAELYISNKQYDKALEIITDFSGIVLEKKTSEEGTSEENKAPENVTCTIPDGVPIDITVKLMVCLVHLNILEPLNPLLTTLVEQNPEDMGDLYLDVAEAFLDVGEYNSALPLLSALVCSERYNLAVVWLRHAECLKALGYMERAAESYGKVVDLAPLHLDARISLSTLQQQLGQPEKALEALEPMYDPDTLAQDANAAQQELKLLLHRSTLLFSQGKMYGYVDTLLTMLAMLLKVAMNRAQVCLISSSKSGERHLYLIKVSRDKISDSNDQESANCDAKAIFAVLTSVLTKDDWWNLLLKAIYSLCDLSRFQEAELLVDSSLEYYSFYDDRQKRKELEYFGLSAAILDKNFRKAYNYIRIMVMENVNKPQLWNIFNQVTMHSQDVRHHRFCLRLMLKNPENHALCVLNGHNAFVSGSFKHALGQYVQAFRTHPDEPLYSFCIGLTFIHMASQKYVLRRHALIVQGFSFLNRYLSLRGPCQESFYNLGRGLHQLGLIHLAIHYYQKALELPPLVVEGIELDQLDLRRDIAYNLSLIYQSSGNTGMAQTLLYTYCSI

SEQ ID NO: 864668 - protein, 734 aa, Homo sapiens [sequence omitted]

SEQ ID NO: 864669 - protein, 891 aa, Homo sapiens
RCWPRRGSFWKALLFRFSVPVPGVAQTDPVNMSGFSPELIDYLEGKISFEEFERRREERKTREKKSLQEKGKLSAEENPDDSEVPSSSGINSTKSQDKDVNEGETSDGVRKSVHKVFASMLGENEDDEEEEEEEEEEEEEEETPEQPTAGDVFVLEMVLNRETKKMMKEKRPRSKLPRALRGLMGEANIRFARGEREEAILMCMEIIRQAPLAYEPFSTLAMIYEDQGDMEKSLQFELIAAHLNPSDTEEWVRLAEMSLEQDNIKQAIFCYTKALKYEPTNVRYLWERSSLYEQMGDHKMAMDGYRRILNLLSPSDGERFMQLARDMAKSYYEANDVTSAINIIDEAFSKHQGLVSMEDVNIAAELYISNKQYDKALEIITDFSGIVLEKKTSEEGTSEENKAPENVTCTIPDGVPIDITVKLMVCLVHLNILEPLNPLLTTLVEQNPEDMGDLYLDVAEAFLDVGEYNSALPLLSALVCSERYNLAVVWLRHAECLKALGYMERAAESYGKVVDLAPLHLDARISLSTLQQQLGQPEKALEALEPMYDPDTLAQDANAAQQELKLLLHRSTLLFSQGKMYGYVDTLLTMLAMLLKMVLSSCRKTSSGLPLILHYAIFAVLTSVLTKDDWWNLLLKAIYSLCDLSRFQEAELLVDSSLEYYSFYDDRQKRKELEYFGLSAAILDKNFRKAYNYIRIMVMENVNKPQLWNIFNQVTMHSQDVRHHRFCLRLMLKNPENHALCVLNGHNAFVSGSFKHALGQYVQAFRTHPDEPLYSFCIGLTFIHMASQKYVLRRHALIVQGFSFLNRYLSLRGPCQESFYNLGRGLHQLGLIHLAIHYYQKALELPPLVVEGIELDQLDLRRDIAYNLSLIYQSSGNTGMAQTLLYTYCSI

SEQ ID NO: 864670 - protein, 558 aa, Homo sapiens
KPWQLLLYVLSIQFDKAKDIITDFSGIVLEKKTSEEGTSEENKAPENVTCTIPDGVPIDITVKLMVCLVHLNILEPLNPLLTTLVEQNPEDMGDLYLDVAEAFLDVGEYNSALPLLSALVCSERYNLAVVWLRHAECLKALGYMERAAESYGKVVDLAPLHLDARISLSTLQQQLGQPEKALEALEPMYDPDTLAQDANAAQQELKLLLHRSTLLFSQGKMYGYVDTLLTMLAMLLKVAMNRAQVCLISSSKSGERHLYLIKVSRDKISDSNDQESANCDAKAIFAVLTSVLTKDDWWNLLLKAIYSLCDLSRFQEAELLVDSSLEYYSFYDDRQKRKELEYFGLSAAILDKNFRKAYNYIRIMVMENVNKPQLWNIFNQVTMHSQDVRHHRFCLRLMLKNPENHALCVLNGHNAFVSGSFKHALGQYVQAFRTHPDEPLYSFCIGLTFIHMASQKYVLRRHALIVQGFSFLNRYLSLRGPCQESFYNLGRGLHQLGLIHLAIHYYQKALELPPLVVEGIELDQLDLRRDIAYNLSLIYQSSGNTGMAQTLLYTYCSI

SEQ ID NO: 864671 - protein, 825 aa, Homo sapiens
RCWPRRGSFWKALLFRFSVPVPGVAQTDPVNMSGFSPELIDYLEGKISFEEFERRREERKTREKKSLQEKGKLSAEENPDDSEVPSSSGINSTKSQDKDVNEGETSDGVRKSVHKVFASMLGENEDDEEEEEEEEEEEEEEETPEQPTAGDVFVLEMVLNRETKKMMKEKRPRSKLPRALRGLMGEANIRFARGEREEAILMCMEIIRQAPLAYEPFSTLAMIYEDQGDMEKSLQFELIAAHLNPSDTEEWVRLAEMSLEQDNIKQAIFCYTKALKYEPTNVRYLWERSSLYEQMGDHKMAMDGYRRILNLLSPSDGERFMQLARDMAKSYYEANDVTSAINIIDEAFSKHQGLVSMEDVNIAAELYISNKQYDKALEIITDFSGIVLEKKTSEEGTSEENKAPENVTCTIPDGVPIDITVKLMVCLVHLNILEPLNPLLTTLVEQNPEDMGDLYLDVAEAFLDVGEYNSALPLLSALVCSERYNLAVVWLRHAECLKALGYMERAAESYGKVVDLAPLHLDARISLSTLQQQLGQPEKALEALEPMYDPDTLAQDANAAQQELKLLLHRSTLLFSQGKMYGYVDTLLTMLAMLLKVAMNRAQVCLISSSKSGERHLYLIKVSRDKISDSNDQESANCDAKAIFAVLTSVLTKDDWWNLLLKAIYSLCDLSRFQEAELLVDSSLEYYSFYDDRQKRKELEYFGLSAAILDKNFRKAYNYIRIMVMENVNKPQLWNIFNQVTMHSQDVRHHRFCLRLMLKNPENHALCVLNGHNAFVSGSFKHALGQYVQAFRTHPDEPLYSFVSLTGQVLYPLPQVDAAANLVVV

SEQ ID NO: 864672 - protein, 507 aa, Homo sapiens
RCWPRRGSFWKALLFRFSVPVPGVAQTDPVNMSGFSPELIDYLEGKISFEEFERRREERKTREKKSLQEKGKLSAEENPDDSEVPSSSGINSTKSQDKDVNEGETSDGVRKSVHKVFASMLGENEDDEEEEEEEEEEEEEEETPEQPTAGDVFVLEMVLNRETKKMMKEKRPRSKLPRALRGLMGEANIRFARGEREEAILMCMEIIRQAPLAYEPFSTLAMIYEDQGDMEKSLQFELIAAHLNPSDTEEWVRLAEMSLEQDNIKQAIFCYTKALKYEPTNVRYLWERSSLYEQMGDHKMAMDGYRRILNLLSPSDGERFMQLARDMAKSYYEANDVTSAINIIDEAFSKHQGLVSMEDVNIAAELYISNKQYDKALEIITDFSGIVLEKKTSEEGTSEENKAPENVTCTIPDGVPIDITVKLMVCLVHLNILEPLNPLLTTLVEQNPEDMGDLYLDVAEAFLDVGEYNSALPLLSALVCSERYNLAVVWLRHAGNTFLWEEEVLII

SEQ ID NO: 864673 - protein, 69 aa, Homo sapiens
RCWPRRGSFWKALLFRFSVPVPGVAQTDPVNMSGFSPELIDYLEGKISFEEFERRREERKTREKKVRRC

SEQ ID NO: 864674 - protein, 917 aa, Homo sapiens; identical to SEQ ID NO: 864667

SEQ ID NO: 864675 - protein, 752 aa, Homo sapiens
MRKEKRPRSKLPRALRGLMGEANIRFARGEREEAILMCMEIIRQAPLAYEPFSTLAMIYEDQGDMEKSLQFELIAAHLNPSDTEEWVRLAEMSLEQDNIKQAIFCYTKALKYEPTNVRYLWERSSLYEQMGDHKMAMDGYRRILNLLSPSDGERFMQLARDMAKSYYEANDVTSAINIIDEAFSKHQGLVSMEDVNIAAELYISNKQYDKALEIITDFSGIVLEKKTSEEGTSEENKAPENVTCTIPDGVPIDITVKLMVCLVHLNILEPLNPLLTTLVEQNPEDMGDLYLDVAEAFLDVGEYNSALPLLSALVCSERYNLAVVWLRHAECLKALGYMERAAESYGKVVDLAPLHLDARISLSTLQQQLGQPEKALEALEPMYDPDTLAQDANAAQQELKLLLHRSTLLFSQGKMYGYVDTLLTMLAMLLKVAMNRAQVCLISSSKSGERHLYLIKVSRDKISDSNDQESANCDAKAIFAVLTSVLTKDDWWNLLLKAIYSLCDLSRFQEAELLVDSSLEYYSFYDDRQKRKELEYFGLSAAILDKNFRKAYNYIRIMVMENVNKPQLWNIFNQVTMHSQDVRHHRFCLRLMLKNPENHALCVLNGHNAFVSGSFKHALGQYVQAFRTHPDEPLYSFCIGLTFIHMASQKYVLRRHALIVQGFSFLNRYLSLRGPCQESFYNLGRGLHQLGLIHLAIHYYQKALELPPLVVEGIELDQLDLRRDIAYNLSLIYQSSGNTGMAQTLLYTYCSI

SEQ ID NO: 864676 - protein, 917 aa, Homo sapiens; identical to SEQ ID NO: 864667

SEQ ID NO: 864677 - protein, 656 aa, Homo sapiens
RCWPRRGSFWKALLFRFSVPVPGVAQTDPVNMSGFSPELIDYLEGKISFEEFERRREERKTREKKSLQEKGKLSAEENPDDSEVPSSSGINSTKSQDKDVNEGETSDGVRKSVHKVFASMLGENEDDEEEEEEEEEEEEEEETPEQPTAGDVFVLEMVLNRETKKMMKEKRPRSKLPRALRGLMGEANIRFARGEREEAILMCMEIIRQAPLAYEPFSTLAMIYEDQGDMEKSLQFELIAAHLNPSDTEEWVRLAEMSLEQDNIKQAIFCYTKALKYEPTNVRYLWERSSLYEQMGDHKMAMDGYRRILNLLSPSDGERFMQLARDMAKSYYEANDVTSAINIIDEAFSKHQGLVSMEDVNIAAELYISNKQYDKALEIITDFSGIVLEKKTSEEGTSEENKAPENVTCTIPDGVPIDITVKLMVCLVHLNILEPLNPLLTTLVEQNPEDMGDLYLDVAEAFLDVGEYNSALPLLSALVCSERYNLAVVWLRHAECLKALGYMERAAESYGKVVDLAPLHLDARISLSTLQQQLGQPEKALEALEPMYDPDTLAQDANAAQQELKLLLHRSTLLFSQGKMYGYVDTLLTMLAMLLKVAMNRAQVCLISSSKSGERHLYLIKVSRDKISDSNDQESANCDAKGNNFICIMLYKIWLN

SEQ ID NO: 864678 - protein, 165 aa, Homo sapiens
RKGKGPICLFSRPTLRPSRSKVSLIEGRGANMAARWRFWCVSVTMVVALLIVCDVPSASAQRKKEMVLSEKVSQLMEWTNKRPVIRMNGDKFRRLVKAPPRNYSVIVMFTALQLHRQCVVCKQADEEFQILANSWRYSSAFTNRIFFAMVDFDEGSDVFQMFQVF

SEQ ID NO: 864679 - protein, 366 aa, Homo sapiens
RKGKGPICLFSRPTLRPSRSKVSLIEGRGANMAARWRFWCVSVTMVVALLIVCDVPSASAQRKKEMVLSEKVSQLMEWTNKRPVIRMNGDKFRRLVKAPPRNYSVIVMFTALQLHRQCVVCKQADEEFQILANSWRYSSAFTNRIFFAMVDFDEGSDVFQMLNMNSAPTFINFPAKGKPKRGDTYELQVRGFSAEQIARWIADRTDVNIRVIRPPNYAGPLMLGLLLAVIGGLVYLRRSNMEFLFNKTGWAFAALCFVLAMTSGQMWNHIRGPPYAHKNPHTGHVNYIHGSSQAQFVAETHIVLLFNGGVTLGMVLLCEAATSDMDIGKRKIMCVAGIGLVVLFFSWMLSIFRSKYHGYPYSFLMS

SEQ ID NO: 864680 - protein, 335 aa, Homo sapiens
MAARWRFWCVSVTMVVALLIVCDVPSASAQRKKEMVLSEKVSQLMEWTNKRPVIRMNGDKFRRLVKAPPRNYSVIVMFTALQLHRQCVVCKQADEEFQILANSWRYSSAFTNRIFFAMVDFDEGSDVFQMLNMNSAPTFINFPAKGKPKRGDTYELQVRGFSAEQIARWIADRTDVNIRVIRPPNYAGPLMLGLLLAVIGGLVYLRRSNMEFLFNKTGWAFAALCFVLAMTSGQMWNHIRGPPYAHKNPHTGHVNYIHGSSQAQFVAETHIVLLFNGGVTLGMVLLCEAATSDMDIGKRKIMCVAGIGLVVLFFSWMLSIFRSKYHGYPYSFLMS

SEQ ID NO: 864681 - protein, 366 aa, Homo sapiens; identical to SEQ ID NO: 864679

SEQ ID NO: 864682 - protein, 366 aa, Homo sapiens; identical to SEQ ID NO: 864679

SEQ ID NO: 864683 - protein, 301 aa, Homo sapiens
MVLSEKVSQLMEWTNKRPVIRMNGDKFRRLVKAPPRNYSVIVMFTALQLHRQCVVCKQADEEFQILANSWRYSSAFTNRIFFAMVDFDEGSDVFQMLNMNSAPTFINFPAKGKPKRGDTYELQVRGFSAEQIARWIADRTDVNIRVIRPPNYAGPLMLGLLLAVIGGLVYLRRSNMEFLFNKTGWAFAALCFVLAMTSGQMWNHIRGPPYAHKNPHTGHVNYIHGSSQAQFVAETHIVLLFNGGVTLGMVLLCEAATSDMDIGKRKIMCVAGIGLVVLFFSWMLSIFRSKYHGYPYSFLMS

SEQ ID NO: 864684 - protein, 366 aa, Homo sapiens; identical to SEQ ID NO: 864679

SEQ ID NO: 864685 - protein, 112 aa, Homo sapiens
RKGKGPICLFSRPTLRPSRSKVSLIEGRGANMAARWRFWCVSVTMVVALLIVCDVPSASAQRKKEMVLSEKVSQLMEWTNKRPVIRMNGDKFRRLVKAPPRNYSVISSPVCS

SEQ ID NO: 864686 - protein, 281 aa, Homo sapiens
RKGKGPICLFSRPTLRPSRSKVSLIEGRGANMAARWRFWCVSVTMVVALLIVCDVPSASAQRKKEMVLSEKVSQLMEWTNKRPVIRMNGDKFRRLVKAPPRNYSVIVMFTALQLHRQCVVCKQADEEFQILANSWRYSSAFTNRIFFAMVDFDEGSDVFQMLNMNSAPTFINFPAKGKPKRGDTYELQVRGFSAEQIARWIADRTDVNIRVIRPPNYAGPLMLGLLLAVIGGLVYLRRSNMEFLFNKTGWAFAALVSEFQKTKNYLNKIPNSVFLGKLLFM

SEQ ID NO: 864687 - protein, 366 aa, Homo sapiens; identical to SEQ ID NO: 864679

SEQ ID NO: 864688 - protein, 366 aa, Homo sapiens; identical to SEQ ID NO: 864679

SEQ ID NO: 864689 - protein, 366 aa, Homo sapiens; identical to SEQ ID NO: 864679

SEQ ID NO: 864690 - protein, 366 aa, Homo sapiens; identical to SEQ ID NO: 864679

SEQ ID NO: 864691 - protein, 148 aa, Homo sapiens
RKGKGPICLFSRPTLRPSRSKVSLIEGRGANMAARWRFWCVSVTMVVALLIVCDVPSASAQRKKEMVLSEKVSQLMEWTNKRPVIRMNGDKFRRLVKAPPRNYSVIVMFTALQCTPAWQQSETPSQKKKKKVRKKRTPLEWERKIIKY

SEQ ID NO: 864692 - protein, 110 aa, Homo sapiens
MDGEWAPERQGMDDVSLPSLCTGRLGECWCWGHRASTRAFIFARVLVSVNLCVHVSLHGSECLCECTNVCLYICGGLRAKAPRLGFGIQEPHLGLGMEGQHKAAHLSATS

SEQ ID NO: 864693 - protein, 521 aa, Homo sapiens
MGRKKIQIQRITDERNRQVTFTKRKFGLMKKAYELSVLCDCEIALIIFNHSNKLFQYASTDMDKVLLKYTEYNEPHESRTNADIIETLRKKGFNGCDSPEPDGEDSLEQSPLLEDKYRRASEELDGLFRRYGSTVPAPNFAMPVTVPVSNQSSLQFSNPSGSLVTPSLVTSSLTDPRLLSPQQPALQRNSVSPGLPQRPASAGAMLGGDLNSANGACPSPVGNGYVSARASPGLLPVANGNSLNKVIPAKSPPPPTHSTQLGAPSRKPDLRVITSQAGKGLMHHLTEDHLDLNNAQRLGVSQSTHSLTTPVVSVATPSLLSQGLPFSSMPTAYNTDYQLTSAELSSLPAFSSPGGLSLGNVTAWQQPQQPQQPQQPQPPQQQPPQPQQPQPQQPQQPQQPPQQQSHLVPVSLSNLIPGSPLPHVGAALTVTTHPHISIKSEPVSPSRERSPAPPPPAVFPAARPEPGDGLSSPAGGSYETGDRDDGRGDFGPTLGLLRPAPEPEAEGSAVKRMRLDTWTLK

SEQ ID NO: 864694 - protein, 521 aa, Homo sapiens; identical to SEQ ID NO: 864693

SEQ ID NO: 864695 - protein, 521 aa, Homo sapiens; identical to SEQ ID NO: 864693

SEQ ID NO: 864696 - protein, 150 aa, Homo sapiens
MSLPGNSHSSPSSRSSHSLHSSSHRSHSSHSHSSLSSRNSHLSNSPTWSLYLSATSSRAAPCPTWVLPSQSPPTPTSASSQNRCPQAVSAALRLPLQLCSQLPALSLAMVSAAQPGDPMRRETGMTDGGTSGPHWACCAQPQSLRLRAQL

SEQ ID NO: 864697 - protein, 122 aa, Homo sapiens
QAVLARGLRWRKEAKYQQQPRRLRRSAPVPRLPAARLLAPAPTTGAQASRRRPGPARTPASFIILPARSCGFPVLKIPRTRGEGYPLFAVTTPFPQPGWRLCRRYPADHELSTVPRPFMSTV

SEQ ID NO: 864698 - protein, 521 aa, Homo sapiens; identical to SEQ ID NO: 864693

SEQ ID NO: 864699 - protein, 426 aa, Homo sapiens
MGRKKIQIQRITDERNRQVTFTKRKFGLMKKAYELSVLCDCEIALIIFNHSNKLFQYASTDMDKVLLKYTEYNEPHESRTNADIIETLRKKGFNGCDSPEPDGEDSLEQSPLLEDKYRRASEELDGLFRRYGSTVPAPNFAMPVTVPVSNQSSLQFSNPSGSLVTPSLVTSSLTDPRLLSPQQPALQRNSVSPGLPQRPASAGAMLGGDLNSANGACPSPVGNGYVSARASPGLLPVANGNSLNKVIPAKSPPPPTHSTQLGAPSRKPDLRVITSQAGKGLMHHLNNAQRLGVSQSTHSLTTPVVSVATPSLLSQGLPFSSMPTAYNTDYQLTSAELSSLPAFSSPGGLSLGNVTAWQQPQQPQQPQQPQPPQQQPPQPQQPQPQQPQQPQQPPPCSWRPYCLWLPPCPTTSRLHPTFPLGYCNCK

SEQ ID NO: 864700 - protein, 146 aa, Homo sapiens [sequence omitted]

SEQ ID NO: 864701 - protein, 514 aa, Homo sapiens
MGRKKIQIQRITDERNRQVTFTKRKFGLMKKAYELSVLCDCEIALIIFNHSNKLFQYASTDMDKVLLKYTEYNEPHESRTNADIIETLRKKGFNGCDSPEPDGEDSLEQSPLLEDKYRRASEELDGLFRRYGSTVPAPNFAMPVTVPVSNQSSLQFSNPSGSLVTPSLVTSSLTDPRLLSPQQPALQRNSVSPGLPQRPASAGAMLGGDLNSANGACPSPVGNGYVSARASPGLLPVANGNSLNKVIPAKSPPPPTHSTQLGAPSRKPDLRVITSQAGKGLMHHLNNAQRLGVSQSTHSLTTPVVSVATPSLLSQGLPFSSMPTAYNTDYQLTSAELSSLPAFSSPGGLSLGNVTAWQQPQQPQQPQQPQPPQQQPPQPQQPQPQQPQQPQQPPQQQSHLVPVSLSNLIPGSPLPHVGAALTVTTHPHISIKSEPVSPSRERSPAPPPPAVFPAARPEPGDGLSSPAGGSYETGDRDDGRGDFGPTLGLLRPAPEPEAEGSAVKRMRLDTWTLK

SEQ ID NO: 864702 - protein, 521 aa, Homo sapiens; identical to SEQ ID NO: 864693

SEQ ID NO: 864703 - protein, 521 aa, Homo sapiens; identical to SEQ ID NO: 864693

SEQ ID NO: 864704 - protein, 521 aa, Homo sapiens; identical to SEQ ID NO: 864693

SEQ ID NO: 864705 - protein, 347 aa, Homo sapiens
MDGEWAPERQGMDDVSLPSLCTGRLGECWCWGHRASTRAFIFARVLVSVNLCVHVSLHGSECLCECTNVCLYICGGLRAKAPRLGFGIQEPHLGLGMEGQHKAAHLSSHLLTDSFLLQNNAQRLGVSQSTHSLTTPVVSVATPSLLSQGLPFSSMPTAYNTDYQLTSAELSSLPAFSSPGGLSLGNVTAWQQPQQPQQPQQPQPPQQQPPQPQQPQPQQPQQPQQPPQQQSHLVPVSLSNLIPGSPLPHVGAALTVTTHPHISIKSEPVSPSRERSPAPPPPAVFPAARPEPGDGLSSPAGGSYETGDRDDGRGDFGPTLGLLRPAPEPEAEGSAVKRMRLDTWTLK

SEQ ID NO: 864706 - protein, 521 aa, Homo sapiens; identical to SEQ ID NO: 864693

SEQ ID NO: 864707 - protein, 303 aa, Homo sapiens
MGRKKIQIQRITDERNRQVTFTKRKFGLMKKAYELSVLCDCEIALIIFNHSNKLFQYASTDMDKVLLKYTEYNEPHESRTNADIIETLRKKGFNGCDSPEPDGEDSLEQSPLLEDKYRRASEELDGLFRRYGSTVPAPNFAMPVTVPVSNQSSLQFSNPSGSLVTPSLVTSSLTDPRLLSPQQPALQRNSVSPGLPQRPASAGAMLGGDLNSANGACPSPVGNGYVSARASPGLLPVANGNSLNKVIPAKSPPPPTHSTQLGAPSRKPDLRVITSQAGKGLMHHLTEDHLDLVSEAVSSLLWL

SEQ ID NO: 864708 - protein, 309 aa, Homo sapiens [sequence omitted]

SEQ ID NO: 864709 - protein, 146 aa, Homo sapiens [sequence omitted]

SEQ ID NO: 864710 - protein, 779 aa, Homo sapiens
QPVPALRLQAGPAVPGGMEGPRSSTHVPLVLPLLVLLLLAPARQAAAQRCPQACICDNSRRHVACRYQNLTEVPDAIPELTQRLDLQGNLLKVIPAAAFQGVPHLTHLDLRHCEVELVAEGAFRGLGRLLLLNLASNHLRELPQEALDGLGSLRRLELEGNALEELRPGTFGALGALATLNLAHNALVYLPAMAFQGLLRVRWLRLSHNALSVLAPEALAGLPALRRLSLHHNELQALPGPVLSQARGLARLELGHNPLTYAGEEDGLALPGLRELLLDGGALQALGPRAFAHCPRLHTLDLRGNQLDTLPPLQGPGQLRRLRLQGNPLWCGCQARPLLEWLARARVRSDGACQGPRRLRGEALDALRPWDLRCPGDAAQEEEELEERAVAGPRAPPRGPPRGPGEERAVAPCPRACVCVPESRHSSCEGCGLQAVPRGFPSDTQLLDLRRNHFPSVPRAAFPGLGHLVSLHLQHCGIAELEAGALAGLGRLIYLYLSDNQLAGLSAAALEGAPRLGYLYLERNRFLQVPGAALRALPSLFSLHLQDNAVDRLAPGDLGRTRALRWVYLSGNRITEVSLGALGPARELEKLHLDRNQLREVPTGALEGLPALLELQLSGNPLRALRDGAFQPVGRSLQHLFLNSSGLEQICPGAFSGLGPGLQSLHLQKNQLRALPALPSLSQLELIDLSSNPFHCDCQLLPLHRWLTGLNLRVGATCATPPNARGQRVKAAAAVFEDCPGWAARKAKRTPASRPSARRTPIKGRQCGADKVGKEKGRL

SEQ ID NO: 864711 - protein, 272 aa, Homo sapiens
TACPCAAPPGWTSSSRRHGGVSLWARWCKGGFRAAQWPQDNAVDRLAPGDLGRTRALRWVYLSGNRITEVSLGALGPARELEKLHLDRNQLREVPTGALEGLPALLELQLSGNPLRALRDGAFQPVGRSLQHLFLNSSGLEQICPGAFSGLGPGLQSLHLQKNQLRALPALPSLSQLELIDLSSNPFHCDCQLLPLHRWLTGLNLRVGATCATPPNARGQRVKAAAAVFEDCPGWAARKAKRTPASRPSARRTPIKGRQCGADKVGKEKGRL

SEQ ID NO: 864712 - protein, 499 aa, Homo sapiens
MLERPPALAMPMPTEGTPPPLSGTPIPVPAYFRHAEPGFSLKRPRGLSRSLPPPPPAKGSIPISRLFPPRTPGWHQLQPRRVSFRGEASETLQSPGYDPSRPESFFQQSFQRLSRLGHGSYGEVFKVRSKEDGRLYAVKRSMSPFRGPKDRARKLAEVGSHEKVGQHPCCVRLEQAWEEGGILYLQTELCGPSLQQHCEAWGASLPEAQVWGYLRDTLLALAHLHSQGLVHLDVKPANIFLGPRGRCKLGDFGLLVELGTAGAGEVQEGDPRYMAPELLQGSYGTAADVFSLGLTILEVACNMELPHGGEGWQQLRQGYLPPEFTAGLSSELRSVLVMMLEPDPKLRATAEALLALPVLRQPRAWGVLWCMAAEALSRGWALWQALLALLCWLWHGLAHPASWLQPLGPPATPPGSPPCSLLLDSSLSSNWDDDSLGPSLSPEAVLARTVGSTSTPRSRCTPRDALDLSDINSEPPRGSFPSFEPRNLLSLFEDTLDPT

SEQ ID NO: 864713 - protein, 499 aa, Homo sapiens; identical to SEQ ID NO: 864712

SEQ ID NO: 864714 - protein, 499 aa, Homo sapiens; identical to SEQ ID NO: 864712

SEQ ID NO: 864715 - protein, 499 aa, Homo sapiens; identical to SEQ ID NO: 864712

SEQ ID NO: 864716 - protein, 499 aa, Homo sapiens; identical to SEQ ID NO: 864712

SEQ ID NO: 864717 - protein, 499 aa, Homo sapiens; identical to SEQ ID NO: 864712

SEQ ID NO: 864718 - protein, 430 aa, Homo sapiens
MLERWHQLQPRRVSFRGEASETLQSPGYDPSRPESFFQQSFQRLSRLGHGSYGEVFKVRSKEDGRLYAVKRSMSPFRGPKDRARKLAEVGSHEKVGQHPCCVRLEQAWEEGGILYLQTELCGPSLQQHCEAWGASLPEAQVWGYLRDTLLALAHLHSQGLVHLDVKPANIFLGPRGRCKLGDFGLLVELGTAGAGEVQEGDPRYMAPELLQGSYGTAADVFSLGLTILEVACNMELPHGGEGWQQLRQGYLPPEFTAGLSSELRSVLVMMLEPDPKLRATAEALLALPVLRQPRAWGVLWCMAAEALSRGWALWQALLALLCWLWHGLAHPASWLQPLGPPATPPGSPPCSLLLDSSLSSNWDDDSLGPSLSPEAVLARTVGSTSTPRSRCTPRDALDLSDINSEPPRGSFPSFEPRNLLSLFEDTLDPT

SEQ ID NO: 864719 - protein, 234 aa, Homo sapiens
PRGSPGLGLCPRANPAPFCPHPVPASLGLTILEVACNMELPHGGEGWQQLRQGYLPPEFTAGLSSELRSVLVMMLEPDPKLRATAEALLALPVLRQPRAWGVLWCMAAEALSRGWALWQALLALLCWLWHGLAHPASWLQPLGPPATPPGSPPCSLLLDSSLSSNWDDDSLGPSLSPEAVLARTVGSTSTPRSRCTPRDALDLSDINSEPPRGSFPSFEPRNLLSLFEDTLDPT

SEQ ID NO: 864720 - protein, 105 aa, Homo sapiens
TVSSHLYFLLERSFPLYESCMKTILLKSTNNIGPQVSFLTGEPTFHTTAWAACVALQLLFPPRDTSKRSPGVSAGRPWLLRRWVSTDPARGMEVCLVLLLPWAGV

SEQ ID NO: 864721 - protein, 52 aa, Homo sapiens
MHRPRSPSVPGLGLEAVLVTSDLQDPNTLAPDLEKPWAGTLRYLESEEESPQ

SEQ ID NO: 864722 - protein, 112 aa, Homo sapiens
MSWKHPRSQPLADELGGTPGVANSRRLLWAGWHGSSVPGTGVVGSPEQVGHDAGVQLQDGAHAQQVHDLVGVAPVVKAARSPALGQTGYIYQSPKQRQCVHAQVAGQGAWSP

SEQ ID NO: 864723 - protein, 499 aa, Homo sapiens; identical to SEQ ID NO: 864712

SEQ ID NO: 864724 - protein, 499 aa, Homo sapiens; identical to SEQ ID NO: 864712

SEQ ID NO: 864725 - protein, 463 aa, Homo sapiens
MLERPPALAMPMPTEGTPPPLSGTPIPVPAYFRHAEPGFSLKRPRGLSRSLPPPPPAKGSIPISRLFPPRTPGWHQLQPRRVSFRGEASETLQSPGYDPSRPESFFQQSFQRLSRLGHGSYGEVFKVRSKEDGRLYAVKRSMSPFRGPKDRARKLAEVGSHEKVGQHPCCVRLEQAWEEGGILYLQTELCGPSLQQHCEAWGASLPEAQVWGYLRDTLLALAHLHSQGLVHLDVKPANIFLGPRGRCKLGDFGLLVELGTAGAGEVQEGDPRYMAPELLQGSYGTAADVFSLGLTILEVACNMELPHGGEGWQQLRQGYLPPEFTAGLSSELRSVLVMMLEPDPKLRATAEALLALPVLRQPRAWGVLWCMAAEALSRGWALWQALLALLCWLWHGLAHPASWLQPLGPPATPPGSPPCSLLLDSSLSSNWDDDSLGPSLSPEAVLARTVGSTSTPRSRCTPR

SEQ ID NO: 864726 - protein, 490 aa, Homo sapiens
MPMPTEGTPPPLSGTPIPVPAYFRHAEPGFSLKRPRGLSRSLPPPPPAKGSIPISRLFPPRTPGWHQLQPRRVSFRGEASETLQSPGYDPSRPESFFQQSFQRLSRLGHGSYGEVFKVRSKEDGRLYAVKRSMSPFRGPKDRARKLAEVGSHEKVGQHPCCVRLEQAWEEGGILYLQTELCGPSLQQHCEAWGASLPEAQVWGYLRDTLLALAHLHSQGLVHLDVKPANIFLGPRGRCKLGDFGLLVELGTAGAGEVQEGDPRYMAPELLQGSYGTAADVFSLGLTILEVACNMELPHGGEGWQQLRQGYLPPEFTAGLSSELRSVLVMMLEPDPKLRATAEALLALPVLRQPRAWGVLWCMAAEALSRGWALWQALLALLCWLWHGLAHPASWLQPLGPPATPPGSPPCSLLLDSSLSSNWDDDSLGPSLSPEAVLARTVGSTSTPRSRCTPRDALDLSDINSEPPRGSFPSFEPRNLLSLFEDTLDPT

SEQ ID NO: 864727 - protein, 360 aa, Homo sapiens
MSAAGAGAGVEAGFSSEELLSLRFPLHRACRDGDLATLCSLLQQTPHAHLASEDSFYGWTPVHWAAHFGKLECLVQLVRAGATLNVSTTRYAQTPAHIAAFGGHPQCLVWLIQAGANINKPDCEGETPIHKAARSGSLECISALVANGAHVDLGLTILEVACNMELPHGGEGWQQLRQGYLPPEFTAGLSSELRSVLVMMLEPDPKLRATAEALLALPVLRQPRAWGVLWCMAAEALSRGWALWQALLALLCWLWHGLAHPASWLQPLGPPATPPGSPPCSLLLDSSLSSNWDDDSLGPSLSPEAVLARTVGSTSTPRSRCTPRDALDLSDINSEPPRGSFPSFEPRNLLSLFEDTLDPT

SEQ ID NO: 864728 - protein, 112 aa, Homo sapiens; identical to SEQ ID NO: 864722

SEQ ID NO: 864729 - protein, 178 aa, Homo sapiens
SSFRRHERIHTGERPYKCKLCGKGFRSSSYIQLHERTHTGEKPYGCQQCGKALSDLSSFRRHMITHTGNGPHKCKICGKGFDYPSSVQRHERTHTGEKPYECKECGKAFSHSSYLRIHERVHTGEKPYKCKECGKPFHCPSAFHKHERTHSMEKPYKCKECGEAFHCISSFHKHEMTH

SEQ ID NO: 864730 - protein, 223 aa, Homo sapiens
ASLLNFWNPPTTAQVTIEAQPPKVSEGKDVLLLVHNLPQNLAGYIWYKGQMTYLYHYITSYVVDGQRIIYGPAYSGRERVYSNASLLIQNVTQEDAGSYTLHIIKRRDETREEIGHFTFTLYLETPKPYISSSNLNPREAMEAVRLICDPETLDASYLWWMNGQSLPVTHRLQLSKTNRTLYLFGVTKYIAGPYECEIRNPVSASRSDPVTLNLLREYPLFLC

SEQ ID NO: 864731 - protein, 258 aa, Homo sapiens
MNGQSLPVTHRLQLSKTNRTLYLFGVTKYIAGPYECEIRNPVSASRSDPVTLNLLPKLPIPYITINNLNPRENKDVLAFTCEPKSENYTYIWWLNGQSLPVSPGVKRPIENRILILPSVTRNETGPYQCEIRDRYGGLRSNPVILNVLYGPDLPRIYPSFTYYRSGENLDLSCFTESNPPAEYFWTINGKFQQSGQKLFIPQITRNHSGLYACSVHNSATGKEISKSMTVKVSGSLPWRPDRVSVMTATTETLRKRTG

SEQ ID NO: 864732 - protein, 258 aa, Homo sapiens; identical to SEQ ID NO: 864731

SEQ ID NO: 864733 - protein, 258 aa, Homo sapiens; identical to SEQ ID NO: 864731

SEQ ID NO: 864734 - protein, 258 aa, Homo sapiens; identical to SEQ ID NO: 864731

SEQ ID NO: 864735 - protein, 258 aa, Homo sapiens; identical to SEQ ID NO: 864731

SEQ ID NO: 864736 - protein, 246 aa, Homo sapiens
MNGQSLPVTHRLQLSKTNRTLYLFGVTKYIAGPYECEIRNPVSASRSDPVTLNLLPKLPIPYITINNLNPRENKDVLAFTCEPKSENYTYIWWLNGQSLPVSPGVKRPIENRILILPSVTRNETGPYQCEIRDRYGGLRSNPVILNVLYGPDLPRIYPSFTYYRSGENLDLSCFTESNPPAEYFWTINGKFQQSGQKLFIPQITRNHSGLYACSVHNSATGKEISKSMTVKVSGGPCHGDLTESQS

SEQ ID NO: 864737 - protein, 177 aa, Homo sapiens
MRSDPVTLNVLYGPDLPSIYPSFTYYRSGENLYLSCFAESNPPAEYFWTINGKFQQSGQKLSIPQITTKHRGLYACSVRNSATGKESSKSMTVKVSGKWIPASLAVGFYVESIWLSEKSQENIFIPSLCPMGTSKSQILLLNPPNLSLQTLFSLFFCFLMADLVSGLKKVGRGLYQP

SEQ ID NO: 864738 - protein, 329 aa, Homo sapiens
MSRRKDAGTYTLHIIKRGDETREEIRHFTFTLYLETPKPSISSSNLNPREAMEAVILTCDPATPAASYQWWMNGQSLPMTHRLQLSKTNRTLFIFGVTKYIAGPYECEIRNPVSASRSDPVTLNLLPKLPIPYITINNLNPRENKDVLAFTCEPKSENYTYIWWLNGQSLPVSPGVKRPIENRILILPSVTRNETGPYQCEIRDRYGGLRSNPVILNVLYGPDLPRIYPSFTYYRSGENLDLSCFTESNPPAEYFWTINGKFQQSGQKLFIPQITRNHSGLYACSVHNSATGKEISKSMTVKVSGSLPWRPDRVSVMTATTETLRKRTG

SEQ ID NO: 864739 - protein, 329 aa, Homo sapiens; identical to SEQ ID NO: 864738

SEQ ID NO: 864740 - protein, 144 aa, Homo sapiens
MSPGKDAGSYTLHIIKRRDGTGGVTGHFTFTLHLETPKPSISSSNLNPREAMEAVILTCDPATPAASYQWWMNGQSLPMTHRLQLSKTNRTLFIFGVTKYIAGPYECEIRNPVSASRSDPVTLNLLPKLPKPYITINNLNPQGE

SEQ ID NO: 864741 - protein, 144 aa, Homo sapiens; identical to SEQ ID NO: 864740

SEQ ID NO: 864742 - protein, 148 aa, Homo sapiens
MNGQSLPVTHRLQLSKTNRTLYLFGVTKYIAGPYECEIRNPVSASRSDPVTLNLLPKLPIPYITINNLNPRENKDVLAFTCEPKSENYTYIWWLNGQSLPVSPGVKRPIENRILILPSVTRNVSRTLCNVNIGTVVCAPRIYPGHHII

SEQ ID NO: 864743 - protein, 165 aa, Homo sapiens
MNGQSLPVTHRLQLSKTNRTLYLFGVTKYIAGPYECEIRNPVSASRSDPVTLNLLHGPDLPRIYPSFTYYRSGENLDLSCFTESNPPAEYFWTINGKFQQSGQKLFIPQITRNHSGLYACSVHNSATGKEISKSMTVKVSGSLPWRPDRVSVMTATTETLRKRTG

SEQ ID NO: 864744 - protein, 81 aa, Homo sapiens
PDNDRRGVDDRRVEGQHSLTAVLRKFLDPRLSSTEENTQAAETMGPLSAPPCTQHITWKGVLLTASLLNFWNPPTTARSHD

SEQ ID NO: 864745 - protein, 258 aa, Homo sapiens; identical to SEQ ID NO: 864731

SEQ ID NO: 864746 - protein, 131 aa, Homo sapiens
MSRRKDAGTYTLHIIKRGDETREEIRHFTFTLYYGPDLPRIYPSFTYYRSGENLDLSCFTESNPPAEYFWTINGKFQQSGQKLFIPQITRNHSGLYACSVHNSATGKEISKSMTVKVSGGPCHGDLTESQS

SEQ ID NO: 864747 - protein, 258 aa, Homo sapiens; identical to SEQ ID NO: 864731

SEQ ID NO: 864748 - protein, 258 aa, Homo sapiens; identical to SEQ ID NO: 864731

SEQ ID NO: 864749 - protein, 258 aa, Homo sapiens; identical to SEQ ID NO: 864731

SEQ ID NO: 864750 - protein, 314 aa, Homo sapiens
MNGQSLPVTHRLQLSKTNRTLYLFGVTKYIAGPYECEIRNPVSASRSDPVTLNLLPKLPIPYITINNLNPRENKDVLAFTCEPKSENYTYIWWLNGQSLPVSPGVKRPIENRILILPSVTRNETGPYQCEIRDRYGGLRSNPVILNVLYGPDLPRIYPSFTYYRSGENLDLSCFTESNPPAEYFWTINGKFQQSGQKLFIPQITRNHSGLYACSVHNSATGKEISKSMTVKVSGKWIPASLAVGFYVESIWLSEKSQENIFIPSLCPMGTSKSQILLLNPPNLSLQTLFSLFFCFLMADLVSGLKKVGRGLYQP

SEQ ID NO: 864751 - protein, 314 aa, Homo sapiens
MNGQSLPVTHRLQLSKTNRTLYLFGVTKYIAGPYECEIRNPVSASRSDPVTLNLLPKLPIPYITINNLNPRENKDVLAFTCEPKSENYTYIWWLNGQSLPVSPGVKRPIENRILILPSVTRNETGPYQCEIRDRYGGLRSNPVILNVLYGPDLPRIYPSFTYYRSGENLDLSCFTESNPPAEYFWTINGKFQQSGQKLSIPQITTKHRGLYACSVRNSATGKESSKSMTVKVSGKWIPASLAVGFYVESIWLSEKSQENIFIPSLCPMGTSKSQILLLNPPNLSLQTLFSLFFCFLMADLVSGLKKVGRGLYQP

SEQ ID NO: 864752 - protein, 329 aa, Homo sapiens
MSPGKDAGSYTLHIIKRRDGTGGVTGHFTFTLHLETPKPSISSSNLNPREAMEAVILTCDPATPAASYQWWMNGQSLPMTHRLQLSKTNRTLFIFGVTKYIAGPYECEIRNPVSASRSDPVTLNLLPKLPIPYITINNLNPRENKDVLAFTCEPKSENYTYIWWLNGQSLPVSPGVKRPIENRILILPSVTRNETGPYQCEIRDRYGGLRSNPVILNVLYGPDLPRIYPSFTYYRSGENLDLSCFTESNPPAEYFWTINGKFQQSGQKLFIPQITRNHSGLYACSVHNSATGKEISKSMTVKVSGSLPWRPDRVSVMTATTETLRKRTG

SEQ ID NO: 864753 - protein, 177 aa, Homo sapiens
MNGQSLPVTHRLQLSKTNRTLYLFGVTKYIAGPYECEIRNPVSASRSDPVTLNLLPKLPIPYITINNLNPRENKDVLAFTCEPKSENYTYIWWLNGQSLPVSPGVKRPIENRILILPSVTRNETGPYECEIRDRDGGMRSDPVTLNVLYGPDLPSIYPSFTYYRSGGKPRLVLLHGI

SEQ ID NO: 864754 - protein, 177 aa, Homo sapiens; identical to SEQ ID NO: 864753

SEQ ID NO: 864755 - protein, 221 aa, Homo sapiens
MNGQSLPVTHRLQLSKTNRTLYLFGVTKYIAGPYECEIRNPVSASRSDPVTLNLLHGPDLPRIYPSFTYYRSGENLDLSCFTESNPPAEYFWTINGKFQQSGQKLFIPQITRNHSGLYACSVHNSATGKEISKSMTVKVSGKWIPASLAVGFYVESIWLSEKSQENIFIPSLCPMGTSKSQILLLNPPNLSLQTLFSLFFCFLMADLVSGLKKVGRGLYQP

SEQ ID NO: 864756 - protein, 116 aa, Homo sapiens
MRLEKKFDISPSPYTLETPKPYISSSNLNPREAMEAVRLICDPETLDASYLWWMNGQSLPVTHRLQLSKTNRTLYLFGVTKYIAGPYECEIRNPVSASRSDPVTLNLLREYPLFLC

SEQ ID NO: 864757 - protein, 740 aa, Homo sapiens
ARAPLPSGKRGQDRVASSGRAPQRELWLPEVERRQEIMAAATGDPGLSKLQFAPFSSALDVGFWHELTQKKLNEYRLDEAPKDIKGYYYNGDSAGLPARLTLEFSAFDMSAPTPARCCPAIGTLYNTNTLESFKTADKKLLLEQAANEIWESIKSGTALENPVLLNKFLLLTFADLKKYHFYYWFCYPALCLPESLPLIQGPVGLDQRFSLKQIEALECAYDNLCQTEGVTALPYFLIKYDENMVLVSLLKHYSDFFQGQRTKITIGVYDPCNLAQYPGWPLRNFLVLAAHRWSSSFQSVEVVCFRDRTMQGARDVAHSIIFEVKLPEMAFSPDCPKAVGWEKNQKGGMGPRMVNLSECMDPKRLAESSVDLNLKLMCWRLVPTLDLDKVVSVKCLLLGAGTLGCNVARTLMGWGVRHITFVDNAKISYSNPVRQPLYEFEDCLGGGKPKALAAADRLQKIFPGVNARGFNMSIPMPGHPVNFSSVTLEQARRDVEQLEQLIESHDVVFLLMDTRESRWLPAVIAASKRKLVINAALGFDTFVVMRHGLKKPKQQGAGDLCPNHPVASADLLGSSLFANIPGYKLGCYFCNDVVAPGDSTRDRTLDQQCTVSRPGLAVIAGALAVELMVSVLQHPEGGYAIASSSDDRMNEPPTSLGLVPHQIRGFLSRFDNVLPVSLAFDKCTACSSKVLDQYEREGFNFLAKVFNSSHSFLEDLTGLTLLHQETQAAEIWDMSDDETI

SEQ ID NO: 864758 - protein, 392 aa, Homo sapiens
MGPRMVNLSECMDPKRLAESSVDLNLKLMCWRLVPTLDLDKVVSVKCLLLGAGTLGCNVARTLMGWGVRHITFVDNAKISYSNPVRQPLYEFEDCLGGGKPKALAAADRLQKIFPGVNARGFNMSIPMPGHPVNFSSVTLEQARRDVEQLEQLIESHDVVFLLMDTRESRWLPAVIAASKRKLVINAALGFDTFVVMRHGLKKPKQQGAGDLCPNHPVASADLLGSSLFANIPGYKLGCYFCNDVVAPGDSTRDRTLDQQCTVSRPGLAVIAGALAVELMVSVLQHPEGGYAIASSSDDRMNEPPTSLGLVPHQIRGFLSRFDNVLPVSLAFDKCTACSSKVLDQYEREGFNFLAKVFNSSHSFLEDLTGLTLLHQETQAAEIWDMSDDETI

SEQ ID NO: 864759 - protein, 689 aa, Homo sapiens
HEGLPEVERRQEIMAAATGDPGLSKLQFAPFSSALDVGFWHELTQKKLNEYRLDEAPKDIKGYYYNGDSAGLPARLTLEFSAFDMSAPTPARCCPAIGTLYNTNTLESFKTADKKLLLEQAANEIWESIKSGTALENPVLLNKFLLLTFADLKKYHFYYWFCYPALCLPESLPLIQGPVGLDQRFSLKQIEALECAYDNLCQTEGVTALPYFLIKYDENMVLVSLLKHYSDFFQGQRTKITIGVYDPCNLAQYPGWPLRNFLVLAAHRWSSSFQSVEVVCFRDRTMQGARDVAHSIIFEVKLPEMAFSPDCPKAVGWEKNQKGGMGPRMVNLSECMDPKRLAESSVDLNLKLMCWRLVPTLDLDKVVSVKCLLLGAGTLGCNVARTLMGWGVRHITFVDNAKISYSNPVRQPLYEFEDCLGGGKPKALAAADRLQKIFPGVNARGFNMSIPMPGHPVNFSSVTLEQARRDVEQLEQLIESHDVVFLLMDTRESRWLPAVIAASKRKLVINAALGFDTFVVMRHGLKKPKQQGAGDLCPNHPVASADLLGSSLFANIPGYKLGCYFCNDVVAPGDSTRDRTLDQQCTVSRPGLAVIAGALAVELMVSVLQHPEGGYAIASSSDDRMNEPPTSLGLVPHQVLDQYEREGFNFLAKVFNSSHSFLEDLTGLTLLHQETQAAEIWDMSDDETI

SEQ ID NO: 864760 - protein, 732 aa, Homo sapiens
ARAPLPSGKRGQDRVASSGRAPQRELWLPEVERRQEIMAAATGDPGLSKLQFAPFSSALDVGFWHELTQKKLNEYRLDEAPKDIKGYYYNGDSAGLPARLTLEFSAFDMSAPTPARCCPAIGTLYNTNTLESFKTADKKLLLEQAANEIWESIKSGTALENPVLLNKFLLLTFADLKKYHFYYWFCYPALCLPESLPLIQGPVGLDQRFSLKQIEALECAYDNLCQTEGVTALPYFLIKYDENMVLVSLLKHYSDFFQGQRTKITIGVYDPCNLAQYPGWPLRNFLVLAAHRWSSSFQSVEVVCFRDRTMQGARDVAHSIIFEVKLPEMAFSPDCPKAVGWEKNQKGGMGPRMVNLSECMDPKRLAESSVDLNLKLMCWRLVPTLDLDKVVSVKCLLLGAGTLGCNVARTLMGWGVRHITFVDNAKISYSNPVRQPLYEFEDCLGGGKPKALAAADRLQKIFPGVNARGFNMSIPMPGHPVNFSSVTLEQARRDVEQLEQLIESHDVVFLLMDTRESRWLPAVIAASKRKLVINAALGFDTFVVMRHGLKKPKQQGAGDLCPNHPVASADLLGSSLFANIPGYKLGCYFCNDVVAPGDSTRDRTLDQQCTVSRPGLAVIAGALAVELMVSVLQHPEGGYAIASSSDDRMNEPPTSLGLVPHQIRGFLSRFDNVLPVSLAFDKCTACSSKVLDQYEREGFNFLAKVFNSSHSFLEDLTGLTLLHQETQAAEHL

SEQ ID NO: 864761 - protein, 740 aa, Homo sapiens; identical to SEQ ID NO: 864757

SEQ ID NO: 864762 - protein, 740 aa, Homo sapiens; identical to SEQ ID NO: 864757

SEQ ID NO: 864763 - protein, 120 aa, Homo sapiens
MSRIFNPHLNKTANGDCRRDPRERSRQPHRARCGPHHEPARKPPVHLPPQPWPGAAPAPGTRPPAPPTPPRVTPLFTDKETCPRSVLHRAGQLWVVFLLRRSVACSNNKLVAMNADAVFS

SEQ ID NO: 864764 - protein, 741 aa, Homo sapiens
ARAPLPSGKRGQDRVASSGRAPQRELWLPEVERRQEIMAAATGDPGLSKLQFAPFSSALDVGFWHELTQKKLNEYRLDEAPKDIKGYYYNGDSAGLPARLTLEFSAFDMSAPTPARCCPAIGTLYNTNTLESFKTADKKLLLEQAANEIWESIKSGTALENPVLLNKFLLLTFADLKKYHFYYWFCYPALCLPESLPLIQGPVGLDQRFSLKQIEALECAYDNLCQTEGVTALPYFLIKYDENMVLVSLLKHYSDFFQGQRTKITIGVYDPCNLAQYPGWPLRNFLVLAAHRWSSSFQSVEVVCFRDRTMQGARDVAHSIIFEVKLPEMAFSPDCPKAVGWEKNQKGGMGPRMVNLSECMDPKRLAESSVDLNLKLMCWRLVPTLDLDKVVSVKCLLLGAGTLGCNVARTLMGWGVRHITFVDNAKISYSNPVRQPLYEFEDCLGGGKPKALAAADRLQKIFPGVNARGFNMSIPMPGHPVNFSSVTLEQARRDVEQLEQLIESHDVVFLLMDTRESRWLPAVIAASKRKLVINAALGFDTFVVMRHGLKKPKQQGAGDLCPNHPVASADLLGSSLFANIPGYKLGCYFCNDVVAPGDSTRDRTLDQQCTVSRPGLAVIAGALAVELMVSVLQHPEGGYAIASSSDDRMNEPPTSLGLVPHQIRGFLSRFDNVLPVSLAFDKCTACSSKVLDQYEREGFNFLAKVFNSSHSFLEDLTGLTLLHQETQAAEVRTKQAFCSED

SEQ ID NO: 864765 - protein, 775 aa, Homo sapiens
ARAPLPSGKRGQDRVASSGRAPQRELWLPEVERRQEIMAAATGDPGLSKLQFAPFSSALDVGFWHELTQKKLNEYRLDEAPKDIKGYYYNGDSAGLPARLTLEFSAFDMSAPTPARCCPAIGTLYNTNTLESFKTADKKLLLEQAANEIWESIKSGTALENPVLLNKFLLLTFADLKKYHFYYWFCYPALCLPESLPLIQGPVGLDQRFSLKQIEALECAYDNLCQTEGVTALPYFLIKYDENMVLVSLLKHYSDFFQGQRTKITIGVYDPCNLAQYPGWPLRNFLVLAAHRWSSSFQSVEVVCFRDRTMQGARDVAHSIIFEVKLPEMAFSPDCPKAVGWEKNQKGGMGPRMVNLSECMDPKRLAESSVDLNLKLMCWRLVPTLDLDKVVSVKCLLLGAGTLGCNVARTLMGWGVRHITFVDNAKISYSNPVRQPLYEFEDCLGGGKPKALAAADRLQKIFPGVNARGFNMSIPMPGHPVNFSSVTLEQARRDVEQLEQLIESHDVVFLLMDTRESRWLPAVIAASKRKLVINAALGFDTFVVMRHGLKKPKQQGAGDLCPNHPVASADLLGSSLFANIPGYKLGCYFCNDVVAPGDSTRDRTLDQQCTVSRPGLAVIAGALAVELMVSVLQHPEGGYAIASSSDDRMNEPPTSLGLVPHQIRGFLSRFDNVLPVSLAFDKCTACSSKVLDQYEREGFNFLAKVFNSSHSFLEDLTGLTLLHQETQAAEDHLSFIRPKNGTFPAHQATCTQESAACPEIDLYQLSSRTIPCIHT

SEQ ID NO: 864766 - protein, 788 aa, Homo sapiens
ARAPLPSGKRGQDRVASSGRAPQRELWLPEVERRQEIMAAATGDPGLSKLQFAPFSSALDVGFWHELTQKKLNEYRLDEAPKDIKGYYYNGDSAGLPARLTLEFSAFDMSAPTPARCCPAIGTLYNTNTLESFKTADKKLLLEQAANEIWESIKSGTALENPVLLNKFLLLTFADLKKYHFYYWFCYPALCLPESLPLIQGPVGLDQRFSLKQIEALECAYDNLCQTEGVTALPYFLIKYDENMVLVSLLKHYSDFFQGQRTKITIGVYDPCNLAQYPGWPLRNFLVLAAHRWSSSFQSVEVVCFRDRTMQGARDVAHSIIFEVKLPEMAFSPDCPKAVGWEKNQKGGMGPRMVNLSECMDPKRLAESSVDLNLKLMCWRLVPTLDLDKVVSVKCLLLGAGTLGCNVARTLMGWGVRHITFVDNAKISYSNPVRQPLYEFEDCLGGGKPKALAAADRLQKIFPGVNARGFNMSIPMPGHPVNFSSVTLEQARRDVEQLEQLIESHDVVFLLMDTRESRWLPAVIAASKRKLVINAALGFDTFVVMRHGLKKPKQQGAGDLCPNHPVASADLLGSSLFANIPGYKLGCYFCNDVVAPGDSTRDRTLDQQCTVSRPGLAVIAGALAVELMVSVLQHPEGGYAIASSSDDRMNEPPTSLGLVPHQIRGFLSRFDNVLPVSLAFDKCTACSSKTKIPAFNKALATVLFQLFQPSTGHMKEERSFHFQKIYLAEESRSPGNIQNQDPRDMALRKPSQPSPDIRVTQLRPQSMWSRDKNCEAVPVVPCPNFLPT

SEQ ID NO: 864767 - protein, 87 aa, Homo sapiens
MAAATGDPGLSKLQFAPFSSALDVGFWHELTQKKLNEYRLDEAPKDIKGYYYNGDSAGLPARLTLEFSAFDIVPCGHVKLCAEVDSS

SEQ ID NO: 864768 - protein, 740 aa, Homo sapiens; identical to SEQ ID NO: 864757

SEQ ID NO: 864769 - protein, 740 aa, Homo sapiens; identical to SEQ ID NO: 864757

SEQ ID NO: 864770 - protein, 740 aa, Homo sapiens; identical to SEQ ID NO: 864757

SEQ ID NO: 864771 - protein, 740 aa, Homo sapiens; identical to SEQ ID NO: 864757

SEQ ID NO: 864772 - protein, 269 aa, Homo sapiens
ARAPLPSGKRGQDRVASSGRAPQRELWLPEVERRQEIMAAATGDPGLSKLQFAPFSSALDVGFWHELTQKKLNEYRLDEAPKDIKGYYYNGDSAGLPARLTLEFSAFDMSAPTPARCCPAIGTLYNTNTLESFKTADKKLLLEQAANEIWESIKSGTALENPVLLNKFLLLTFADLKKYHFYYWFCYPALCLPESLPLIQGPVGLDQRFSLKQIEALECAYDNLCQTEGVTALPYFLIKYDENMVLVSLLKHYMFGVARDSRYHQFRAK

SEQ ID NO: 864773 - protein, 148 aa, Homo sapiens [sequence omitted]

SEQ ID NO: 864774 - protein, 740 aa, Homo sapiens; identical to SEQ ID NO: 864757

SEQ ID NO: 864775 - protein, 740 aa, Homo sapiens; identical to SEQ ID NO: 864757

SEQ ID NO: 864776 - protein, 732 aa, Homo sapiens; identical to SEQ ID NO: 864760

SEQ ID NO: 864777 - protein, 731 aa, Homo sapiens
ARAPLPSGKRGQDRVASSGRAPQRELWLPEVERRQEIMAAATGDPGLSKLQFAPFSSALDVGFWHELTQKKLNEYRLDEAPKDIKGYYYNGDSAGLPARLTLEFSAFDMSAPTPARCCPAIGTLYNTNTLESFKTADKKLLLEQAANEIWESIKSGTALENPVLLNKFLLLTFADLKKYHFYYWFCYPALCLPESLPLIQGPVGLDQRFSLKQIEALECAYDNLCQTEGVTALPYFLIKYDENMVLVSLLKHYSDFFQGQRTKITIGVYDPCNLAQYPGWPLRNFLVLAAHRWSSSFQSVEVVCFRDRTMQGARDVAHSIIFEVKLPEMAFSPDCPKAVGWEKNQKGGMGPRMVNLSECMDPKRLAESSVDLNLKLMCWRLVPTLDLDKVVSVKCLLLGAGTLGCNVARTLMGWGVRHITFVDNAKISYSNPVRQPLYEFEDCLGGGKPKALAAADRLQKIFPGVNARGFNMSIPMPGHPVNFSSVTLEQARRDVEQLEQLIESHDVVFLLMDTRESRWLPAVIAASKRKLVINAALGFDTFVVMRHGLKKPKQQGAGDLCPNHPVASADLLGSSLFANIPGYKLGCYFCNDVVAPGDSTRDRTLDQQCTVSRPGLAVIAGALAVELMVSVLQHPEGGYAIASSSDDRMNEPPTSLGLVPHQIRGFLSRFDNVLPVSLAFDKCTACSSKVLDQYEREGFNFLAKVFNSSHSFLEDLTGLTLLHQETQAAEH

SEQ ID NO: 864778 - protein, 206 aa, Homo sapiens
MFEGPLVRIPSKYKNRTQIPTTWFLQINHPFPSPHPTPMIFFFLSTDCSKLRQTMQIHVLLEEALPSGDHRGGVTVADHVGRGAGGLAPARGGLRAAGCSVLGRFDLEPRVTQSFGKVVVHGARDGHGVGCRLGLLVILAQAPAENAPPPRGHRWWQLQASRKAGSQTQVAADRQARLQHPPSGSPEPDWLPRSAWALQTEPTSPG

SEQ ID NO: 864779 - protein, 894 aa, Homo sapiens
MAWRCPRMGRVPLAWCLALCGWACMAPRGTQAEESPFVGNPGNITGARGLTGTLRCQLQVQGEPPEVHWLRDGQILELADSTQTQVPLGEDEQDDWIVVSQLRITSLQLSDTGQYQCLVFLGHQTFVSQPGYVGLEGLPYFLEEPEDRTVAANTPFNLSCQAQGPPEPVDLLWLQDAVPLATAPGHGPQRSLHVPGLNKTSSFSCEAHNAKGVTTSRTATITVLPQQPRNLHLVSRQPTELEVAWTPGLSGIYPLTHCTLQAVLSDDGMGIQAGEPDPPEEPLTSQASVPPHQLRLGSLHPHTPYHIRVACTSSQGPSSWTHWLPVETPEGVPLGPPENISATRNGSQAFVHWQEPRAPLQGTLLGYRLAYQGQDTPEVLMDIGLRQEVTLELQGDGSVSNLTVCVAAYTAAGDGPWSLPVPLEAWRPGQAQPVHQLVKEPSTPAFSWPWWYVLLGAVVAAACVLILALFLVHRRKKETRYGEVFEPTVERGELVVRYRVRKSYSRRTTEATLNSLGISEELKEKLRDVMVDRHKVALGKTLGEGEFGAVMEGQLNQDDSILKVAVKTMKIAICTRSELEDFLSEAVCMKEFDHPNVMRLIGVCFQGSERESFPAPVVILPFMKHGDLHSFLLYSRLGDQPVYLPTQMLVKFMADIASGMEYLSTKRFIHRDLAARNCMLNENMSVCVADFGLSKKIYNGDYYRQGRIAKMPVKWIAIESLADRVYTSKSDVWSFGVTMWEIATRGQTPYPGVENSEIYDYLRQGNRLKQPADCLDGLYALMSRCWELNPQDRPSFTELREDLENTLKALPPAQEPDEILYVNMDEGGGYPEPPGAAGGADPPTQPDPKDSCSCLTAAEVHPAGRYVLCPSTTPSPAQPADRGSPAAPGQEDGA

SEQ ID NO: 864780 - protein, 493 aa, Homo sapiens
MCTSLPRPSASLPHHPFGSQRAGSKASSMTCSSYPLMKEPSTPAFSWPWWYVLLGAVVAAACVLILALFLVHRRKKETRYGEVFEPTVERGELVVRYRVRKSYSRRTTEATLNSLGISEELKEKLRDVMVDRHKVALGKTLGEGEFGAVMEGQLNQDDSILKVAVKTMKIAICTRSELEDFLSEAVCMKEFDHPNVMRLIGVCFQGSERESFPAPVVILPFMKHGDLHSFLLYSRLGDQPVYLPTQMLVKFMADIASGMEYLSTKRFIHRDLAARNCMLNENMSVCVADFGLSKKIYNGDYYRQGRIAKMPVKWIAIESLADRVYTSKSDVWSFGVTMWEIATRGQTPYPGVENSEIYDYLRQGNRLKQPADCLDGLYALMSRCWELNPQDRPSFTELREDLENTLKALPPAQEPDEILYVNMDEGGGYPEPPGAAGGADPPTQPDPKDSCSCLTAAEVHPAGRYVLCPSTTPSPAQPADRGSPAAPGQEDGA

SEQ ID NO: 864781 - protein, 894 aa, Homo sapiens; identical to SEQ ID NO: 864779

SEQ ID NO: 864782 - protein, 894 aa, Homo sapiens; identical to SEQ ID NO: 864779

SEQ ID NO: 864783 - protein, 894 aa, Homo sapiens; identical to SEQ ID NO: 864779

SEQ ID NO: 864784 - protein, 121 aa, Homo sapiens
MSPECQPCSMTLSTPTLHAVNSLGISEELKEKLRDVMVDRHKVALGKTLGEGESPGSITHPSELLRSCTSTLPPNYRKYSPHGPSEVSVSLWPPTGEFGAVMEGQLNQDDSILKVAVKTMK

SEQ ID NO: 864785 - protein, 80 aa, Homo sapiens
MPLLDLLGANGHRAKARGDPGAAGGRVCVQSDSVCGSLHCCWGWTLEPPSTPGGLAPRSKAMPNLLQPCLSLTALTYSLY

SEQ ID NO: 864786 - protein, 885 aa, Homo sapiens
MAWRCPRMGRVPLAWCLALCGWACMAPRGTQAEESPFVGNPGNITGARGLTGTLRCQLQVQGEPPEVHWLRDGQILELADSTQTQVPLGEDEQDDWIVVSQLRITSLQLSDTGQYQCLVFLGHQTFVSQPGYVGLEGLPYFLEEPEDRTVAANTPFNLSCQAQGPPEPVDLLWLQDAVPLATAPGHGPQRSLHVPGLNKTSSFSCEAHNAKGVTTSRTATITVLPQQPRNLHLVSRQPTELEVAWTPGLSGIYPLTHCTLQAVLSDDGMGIQAGEPDPPEEPLTSQASVPPHQLRLGSLHPHTPYHIRVACTSSQGPSSWTHWLPVETPEGVPLGPPENISATRNGSQAFVHWQEPRAPLQGTLLGYRLAYQGQDTPEVLMDIGLRQEVTLELQGDGSVSNLTVCVAAYTAAGDGPWSLPVPLEAWRPVKEPSTPAFSWPWWYVLLGAVVAAACVLILALFLVHRRKKETRYGEVFEPTVERGELVVRYRVRKSYSRRTTEATLNSLGISEELKEKLRDVMVDRHKVALGKTLGEGEFGAVMEGQLNQDDSILKVAVKTMKIAICTRSELEDFLSEAVCMKEFDHPNVMRLIGVCFQGSERESFPAPVVILPFMKHGDLHSFLLYSRLGDQPVYLPTQMLVKFMADIASGMEYLSTKRFIHRDLAARNCMLNENMSVCVADFGLSKKIYNGDYYRQGRIAKMPVKWIAIESLADRVYTSKSDVWSFGVTMWEIATRGQTPYPGVENSEIYDYLRQGNRLKQPADCLDGLYALMSRCWELNPQDRPSFTELREDLENTLKALPPAQEPDEILYVNMDEGGGYPEPPGAAGGADPPTQPDPKDSCSCLTAAEVHPAGRYVLCPSTTPSPAQPADRGSPAAPGQEDGA

SEQ ID NO: 864787 - protein, 894 aa, Homo sapiens; identical to SEQ ID NO: 864779

SEQ ID NO: 864788 - protein, 62 aa, Homo sapiens
MDIGLRQEVTLELQGDGSVSNLTVCVAAYTAAGDGPWSLPVPLEAWRPGPKPCPTCFNLSLP

SEQ ID NO: 864789 - protein, 954 aa, Homo sapiens
MVNSHRKPMFNIHRGFYCLTAILPQICICSQFSVPSSYHFTEDPGAFPVATNGERFPWQELRLPSVVIPLHYDLFVHPNLTSLDFVASEKIEVLVSNATQFIILHSKDLEITNATLQSEEDSRYMKPGKELKVLSYPAHEQIALLVPEKLTPHLKYYVAMDFQAKLGDGFEGFYKSTYRTLGGETRILAVTDFEPTQARMAFPCFDEPLFKANFSIKIRRESRHIALSNMPKVKTIELEGGLLEDHFETTVKMSTYLVAYIVCDFHSLSGFTSSGVKVSIYASPDKRNQTHYALQASLKLLDFYEKYFDIYYPLSKLDLIAIPDFAPGAMENWGLITYRETSLLFDPKTSSASDKLWVTRVIAHELAHQWFGNLVTMEWWNDIWLKEGFAKYMELIAVNATYPELQFDDYFLNVCFEVITKDSLNSSRPISKPAETPTQIQEMFDEVSYNKGACILNMLKDFLGEEKFQKGIIQYLKKFSYRNAKNDDLWSSLSNSCLESDFTSGGVCHSDPKMTSNMLAFLGENAEVKEMMTTWTLQKGIPLLVVKQDGCSLRLQQERFLQGVFQEDPEWRALQERYLWHIPLTYSTSSSNVIHRHILKSKTDTLDLPEKTSWVKFNVDSNGYYIVHYEGHGWDQLITQLNQNHTLLRPKDRVGLIHDVFQLVGAGRLTLDKALDMTYYLQHETSSPALLEGLSYLESFYHMMDRRNISDISENLKRYLLQYFKPVIDRQSWSDKGSVWDRMLRSALLKLACDLNHAPCIQKAAELFSQWMESSGKLNIPTDVLKIVYSVGAQTTAGWNYLLEQYELSMSSAEQNKILYALSTSKHQEKLLKLIELGMEGKVIKTQNLAALLHAIARRPKGQQLAWDFVRENWTHLLKKFDLGSYDIRMIISGTTAHFSSKDKLQEVKLFFESLEAQGSHLDIFQTVLETITKNIKWLEKNLPTLRTWLMVNT

SEQ ID NO: 864790 - protein, 965 aa, Homo sapiens
MFNIHRGFYCLTAILPQICICSQFSVPSSYHFTEDPGAFPVATNGERFPWQELRLPSVVIPLHYDLFVHPNLTSLDFVASEKIEVLVSNATQFIILHSKDLEITNATLQSEEDSRYMKPGKELKVLSYPAHEQIALLVPEKLTPHLKYYVAMDFQAKLGDGFEGFYKSTYRTLGGETRILAVTDFEPTQARMAFPCFDEPLFKANFSIKIRRESRHIALSNMPKVKTIELEGGLLEDHFETTVKMSTYLVAYIVCDFHSLSGFTSSGVKVSIYASPDKRNQTHYALQASLKLLDFYEKYFDIYYPLSKLDLIAIPDFAPGAMENWGLITYRETSLLFDPKTSSASDKLWVTRVIAHELAHQWFGNLVTMEWWNDIWLKEGFAKYMELIAVNATYPELQFDDYFLNVCFEVITKDSLNSSRPISKPAETPTQIQEMFDEVSYNKGACILNMLKDFLGEEKFQKGIIQYLKKFSYRNAKNDDLWSSLSNSCLESDFTSGGVCHSDPKMTSNMVRIKRVTEVEEICGIACPRLAFLGENAEVKEMMTTWTLQKGIPLLVVKQDGCSLRLQQERFLQGVFQEDPEWRALQERYLWHIPLTYSTSSSNVIHRHILKSKTDTLDLPEKTSWVKFNVDSNGYYIVHYEGHGWDQLITQLNQNHTLLRPKDRVGLIHDVFQLVGAGRLTLDKALDMTYYLQHETSSPALLEGLSYLESFYHMMDRRNISDISENLKRYLLQYFKPVIDRQSWSDKGSVWDRMLRSALLKLACDLNHAPCIQKAAELFSQWMESSGKLNIPTDVLKIVYSVGAQTTAGWNYLLEQYELSMSSAEQNKILYALSTSKHQEKLLKLIELGMEGKVIKTQNLAALLHAIARRPKGQQLAWDFVRENWTHLLKKFDLGSYDIRMIISGTTAHFSSKDKLQEVKLFFESLEAQGSHLDIFQTVLETITKNIKWLEKNLPTLRTWLMVNT

SEQ ID NO: 864791 - protein, 918 aa, Homo sapiens
MVNSHRKPMFNIHRGFYCLTAILPQICICSQFSVPSSYHFTEDPGAFPVATNGERFPWQELRLPSVVIPLHYDLFVHPNLTSLDFVASEKIEVLVSNATQFIILHSKDLEITNATLQSEEDSRYMKPGKELKVLSYPAHEQIALLVPEKLTPHLKYYVAMDFQAKLGDGFEGFYKSTYRTLGGETRILAVTDFEPTQARMAFPCFDEPLFKANFSIKIRRESRHIALSNMPKVKTIELEGGLLEDHFETTVKMSTYLVAYIVCDFHSLSGFTSSGVKVSIYASPDKRNQTHYALQASLKLLDFYEKYFDIYYPLSKLDLIAIPDFAPGAMENWGLITYRETSLLFDPKTSSASDKLWVTRVIAHELAHQWFGNLVTMEWWNDIWLKEGFAKYMELIAVNATYPELQFDDYFLNVCFEVITKDSLNSSRPISKPAETPTQIQEMFDEVSYNKGACILNMLKDFLGEEKFQKGIIQYLKKFSYRNAKNDDLWSSLSNSCLESDFTSGGVCHSDPKMTSNMLAFLGENAEVKEMMTTWTLQKGIPLLVVKQDGCSLRLQQERFLQGVFQEDPEWRALQERYLWHIPLTYSTSSSNVIHRHILKSKTDTLDLPEKTSWVKFNVDSNGYYIVHYEGHGWDQLITQLNQNHTLLRPKDRVGLIHDVFQLVGAGRLTLDKALDMTYYLQHETSSPALLEGLSYLESFYHMMDRRNISDISENLKRYLLQYFKPVIDRQSWSDKGSVWDRMLRSALLKLACDLNHAPCIQKAAELFSQWMESSGKLNIPTDVLKIVYSVGAQTTAGWNYLLEQYELSMSSAEQNKILYALSTSKHQEKLLKLIELGMEGKVIKTQNLAALLHAIARRPKGQQLAWDFVRENWTHLLKKFDLGSYDIRMIISGTTAHFSSKDKLQEVCDFLFLTISK

SEQ ID NO: 864792 - protein, 344 aa, Homo sapiens
MVNSHRKPMFNIHRGFYCLTAILPQICICSQFSVPSSYHFTEDPGAFPVATNGERFPWQELRLPSVVIPLHYDLFVHPNLTSLDFVASEKIEVLVSNATQFIILHSKDLEITNATLQSEEDSRYMKPGKELKVLSYPAHEQIALLVPEKLTPHLKYYVAMDFQAKLGDGFEGFYKSTYRTLGGETRILAVTDFEPTQARMAFPCFDEPLFKANFSIKIRRESRHIALSNMPKVKTIELEGGLLEDHFETTVKMSTYLVAYIVCDFHSLSGFTSSGVKVSIYASPDKRNQTHYALQASLKLLDFYEKYFDIYYPLSKLGMFKFHIIVFIFAHKTCFDLFPLSLSM

SEQ ID NO: 864793 - protein, 779 aa, Homo sapiens
MVNSHRKPMFNIHRGFYCLTAILPQICICSQFSVPSSYHFTEDPGAFPVATNGERFPWQELRLPSVVIPLHYDLFVHPNLTSLDFVASEKIEVLVSNATQFIILHSKDLEITNATLQSEEDSRYMKPGKELKVLSYPAHEQIALLVPEKLTPHLKYYVAMDFQAKLGDGFEGFYKSTYRTLGGETRILAVTDFEPTQARMAFPCFDEPLFKANFSIKIRRESRHIALSNMPKVKTIELEGGLLEDHFETTVKMSTYLVAYIVCDFHSLSGFTSSGVKVSIYASPDKRNQTHYALQASLKLLDFYEKYFDIYYPLSKLDLIAIPDFAPGAMENWGLITYRETSLLFDPKTSSASDKLWVTRVIAHELAHQWFGNLVTMEWWNDIWLKEGFAKYMELIAVNATYPELQFDDYFLNVCFEVITKDSLNSSRPISKPAETPTQIQEMFDEVSYNKGACILNMLKDFLGEEKFQKGIIQYLKKFSYRNAKNDDLWSSLSNSCLESDFTSGGVCHSDPKMTSNMLAFLGENAEVKEMMTTWTLQKGIPLLVVKQDGCSLRLQQERFLQGVFQEDPEWRALQERYLWHIPLTYSTSSSNVIHRHILKSKTDTLDLPEKTSWVKFNVDSNGYYIVHYEGHGWDQLITQLNQNHTLLRPKDRVGLIHDVFQLVGAGRLTLDKALDMTYYLQHETSSPALLEGLSYLESFYHMMDRRNISDISENLKRYLLQYFKPVIDRQSWSDKGSVWDRMLRSALLKLACDLNHAPCIQKAAELFSQWMESSGKLK

SEQ ID NO: 864794 - protein, 968 aa, Homo sapiens
MVNSHRKPMFNIHRGFYCLTAILPQICICSQFSVPSSYHFTEDPGAFPVATNGERFPWQELRLPSVVIPLHYDLFVHPNLTSLDFVASEKIEVLVSNATQFIILHSKDLEITNATLQSEEDSRYMKPGKELKVLSYPAHEQIALLVPEKLTPHLKYYVAMDFQAKLGDGFEGFYKSTYRTLGGETRILAVTDFEPTQARMAFPCFDEPLFKANFSIKIRRESRHIALSNMPKVKTIELEGGLLEDHFETTVKMSTYLVAYIVCDFHSLSGFTSSGVKVSIYASPDKRNQTHYALQASLKLLDFYEKYFDIYYPLSKLDLIAIPDFAPGAMENWGLITYRETSLLFDPKTSSASDKLWVTRVIAHELAHQWFGNLVTMEWWNDIWLKEGFAKYMELIAVNATYPELQFDDYFLNVCFEVITKDSLNSSRPISKPAETPTQIQEMFDEVSYNKGACILNMLKDFLGEEKFQKGIIQYLKKFSYRNAKNDDLWSSLSNSCLESDFTSGGVCHSDPKMTSNMLAFLGENAEVKEMMTTWTLQKGIPLLVVKQDGCSLRLQQERFLQGVFQEDPEWRALQERYLWHIPLTYSTSSSNVIHRHILKSKTDTLDLPEKTSWVKFNVDSNGYYIVHYEGHGWDQLITQLNQNHTLLRPKDRVGLIHDVFQLVGAGRLTLDKALDMTYYLQHETSSPALLEGLSYLESFYHMMDRRNISDISENLKRYLLQYFKPVIDRQSWSDKGSVWDRMLRSALLKLACDLNHAPCIQKAAELFSQWMESSGKLNIPTDVLKIVYSVGAQTTAGWNYLLEQYELSMSSAEQNKILYALSTSKHQEKLLKLIELGMEGKVIKTQNLAALLHAIARRPKGQQLAWDFVRENWTHLLKKFDLGSYDIRMIISGTTAHFSSKDKLQEVKLFFESLEAQGSHLDIFQTVLETITKNIKWLEKNLYFLLILYSWNRHSLASLEVLAGSSR

SEQ ID NO: 864795 - protein, 169 aa, Homo sapiens
LGEGWGCGRPWSAAVMAGPVKDREAFQRLNFLYQAAHCVLAQDPENQALARFYCYTERTIAKRLVLRRDPSVKRTLCRGCSSLLVPGLTCTQRQRRCRGQRWTVQTCLTCQRSQRFLNDPGHLLWGDRPEAQLGSQADSKPLQPLPNTAHSISDRLPEEKMQTQGSSNQ

SEQ ID NO: 864796 - protein, 169 aa, Homo sapiens; identical to SEQ ID NO: 864795

SEQ ID NO: 864797 - protein, 169 aa, Homo sapiens; identical to SEQ ID NO: 864795

SEQ ID NO: 864798 - protein, 68 aa, Homo sapiens
LGEGWGCGRPWSAAVMAGPVKDREAFQRLNFLYQAAHCVLAQDPENQALARFYCYTERTIAKRLVLRR

SEQ ID NO: 864799 - protein, 68 aa, Homo sapiens; identical to SEQ ID NO: 864798

SEQ ID NO: 864800 - protein, 129 aa, Homo sapiens
LGEGWGCGRPWSAAVMAGPVKDREAFQRLNFLYQAAHCVLAQDPENQALARFYCYTERTIAKRLVLRRDPSVKRTLCRGCSSLLVPGLTCTQRQRRECSNGGGRLRSIGGAEGGGVGGGHWRPTAPFSL

SEQ ID NO: 864801 - protein, 129 aa, Homo sapiens; identical to SEQ ID NO: 864800

SEQ ID NO: 864802 - protein, 192 aa, Homo sapiens
LGEGWGCGRPWSAAVMAGPVKDREAFQRLNFLYQVSLRQGPHGDGARRPRVTAPLPQAAHCVLAQDPENQALARFYCYTERTIAKRLVLRRDPSVKRTLCRGCSSLLVPGLTCTQRQRRCRGQRWTVQTCLTCQRSQRFLNDPGHLLWGDRPEAQLGSQADSKPLQPLPNTAHSISDRLPEEKMQTQGSSNQ

SEQ ID NO: 864803 - protein, 161 aa, Homo sapiens
LGEGWGCGRPWSAAVMAGPVKDREAFQRLNFLYQDPENQALARFYCYTERTIAKRLVLRRDPSVKRTLCRGCSSLLVPGLTCTQRQRRCRGQRWTVQTCLTCQRSQRFLNDPGHLLWGDRPEAQLGSQADSKPLQPLPNTAHSISDRLPEEKMQTQGSSNQ

SEQ ID NO: 864804 - protein, 177 aa, Homo sapiens
LGEGWGCGRPWSAAVMAGPVKDREAFQRLNFLYQAAHCVLAQDPENQALARFYCYTERTIAKRLVLRRPLSSSAPRDPSVKRTLCRGCSSLLVPGLTCTQRQRRCRGQRWTVQTCLTCQRSQRFLNDPGHLLWGDRPEAQLGSQADSKPLQPLPNTAHSISDRLPEEKMQTQGSSNQ

SEQ ID NO: 864805 - protein, 192 aa, Homo sapiens; identical to SEQ ID NO: 864802

SEQ ID NO: 864806 - protein, 129 aa, Homo sapiens; identical to SEQ ID NO: 864800

SEQ ID NO: 864807 - protein, 153 aa, Homo sapiens
LGEGWGCGRPWSAAVMAGPVKDREAFQRLNFLYQAAHCVLAQDPENQALARFYCYTERTIAKRLVLRRDPSVKRTLCRGCSSLLVPGLTCTQRQRRCRGQRWTVQTCLTCQRSQRFLNDPGHLLWGDRPEAQLGSQADRLPEEKMQTQGSSNQ

SEQ ID NO: 864808 - protein, 99 aa, Homo sapiens
GLLLLLNSRPRRLRGSWDRRSVANMQLFVRAQELHTFEVTGQETVAQIKAHVASLGGHCPGKIKVVLLAGAPLEDEATLGQCGVEALTTPGSSRPHAWR

SEQ ID NO: 864809 - protein, 99 aa, Homo sapiens
HASRTRGSTHASLRGSWDRRSVANMQLFVRAQELHTFEVTGQETVAQIKAHVASLGGHCPGKIKVVLLAGAPLEDEATLGQCGVEALTTPGSSRPHAWR

SEQ ID NO: 864810 - protein, 105 aa, Homo sapiens
  misc_feature (1)..(1): Xaa can be any naturally occurring amino acid
  misc_feature (7)..(7): Xaa can be any naturally occurring amino acid
XRIRQRXAPSLLPLSRLHLRGSWDRRSVANMQLFVRAQELHTFEVTGQETVAQIKAHVASLGGHCPGKIKVVLLAGAPLEDEATLGQCGVEALTTPGSSRPHAWR

SEQ ID NO: 864811 - protein, 99 aa, Homo sapiens; identical to SEQ ID NO: 864809

SEQ ID NO: 864812 - protein, 117 aa, Homo sapiens
PHPPPHLPARYEDSVNRRGSASLLPLSRLHLRGSWDRRSVANMQLFVRAQELHTFEVTGQETVAQIKAHVASLGGHCPGKIKVVLLAGAPLEDEATLGQCGVEALTTPGSSRPHAWR

SEQ ID NO: 864813 - protein, 103 aa, Homo sapiens
PPGCRNWHELPLSRLHLRGSWDRRSVANMQLFVRAQELHTFEVTGQETVAQIKAHVASLGGHCPGKIKVVLLAGAPLEDEATLGQCGVEALTTPGSSRPHAWR

SEQ ID NO: 864814 - protein, 118 aa, Homo sapiens
IIFRLKEFNKGQGDPTVCTDAPSLLPLSRLHLRGSWDRRSVANMQLFVRAQELHTFEVTGQETVAQIKAHVASLGGHCPGKIKVVLLAGAPLEDEATLGQCGVEALTTPGSSRPHAWR

SEQ ID NO: 864815 - protein, 105 aa, Homo sapiens; identical to SEQ ID NO: 864810
  misc_feature (1)..(1): Xaa can be any naturally occurring amino acid
  misc_feature (7)..(7): Xaa can be any naturally occurring amino acid

SEQ ID NO: 864816 - protein, 116 aa, Homo sapiens
TARSLSRRGDTQPTVCTDAPSLLPLSRLHLRGSWDRRSVANMQLFVRAQELHTFEVTGQETVAQIKAHVASLGGHCPGKIKVVLLAGAPLEDEATLGQCGVEALTTPGSSRPHAWR

SEQ ID NO: 864817 - protein, 116 aa, Homo sapiens; identical to SEQ ID NO: 864816

SEQ ID NO: 864818 - protein, 116 aa, Homo sapiens; identical to SEQ ID NO: 864816

SEQ ID NO: 864819 - protein, 103 aa, Homo sapiens; identical to SEQ ID NO: 864813

SEQ ID NO: 864820 - protein, 118 aa, Homo sapiens; identical to SEQ ID NO: 864814

SEQ ID NO: 864821 - protein, 99 aa, Homo sapiens; identical to SEQ ID NO: 864808

SEQ ID NO: 864822 - protein, 116 aa, Homo sapiens; identical to SEQ ID NO: 864816

SEQ ID NO: 864823 - protein, 116 aa, Homo sapiens; identical to SEQ ID NO: 864816

SEQ ID NO: 864824 - protein, 116 aa, Homo sapiens; identical to SEQ ID NO: 864816

SEQ ID NO: 864825 - protein, 116 aa, Homo sapiens; identical to SEQ ID NO: 864816

SEQ ID NO: 864826 - protein, 116 aa, Homo sapiens; identical to SEQ ID NO: 864816

SEQ ID NO: 864827 - protein, 117 aa, Homo sapiens; identical to SEQ ID NO: 864812

SEQ ID NO: 864828 - protein, 103 aa, Homo sapiens
GSLIKLIPPPPSPVLSRGIFAELGSVANMQLFVRAQELHTFEVTGQETVAQIKAHVASLGGHCPGKIKVVLLAGAPLEDEATLGQCGVEALTTPGSSRPHAWR

SEQ ID NO: 864829 - protein, 79 aa, Homo sapiens
TRRGRVGRPTRRELHTFEVTGQETVAQIKAHVASLGGHCPGKIKVVLLAGAPLEDEATLGQCGVEALTTPGSSRPHAWR

SEQ ID NO: 864830 - protein, 114 aa, Homo sapiens
MVGNTVGIWSKEEESKKKTPATKKNSLKNQAGRGGSVANMQLFVRAQELHTFEVTGQETVAQIKAHVASLGGHCPGKIKVVLLAGAPLEDEATLGQCGVEALTTPGSSRPHAWR

SEQ ID NO: 864831 - protein, 99 aa, Homo sapiens; identical to SEQ ID NO: 864808

SEQ ID NO: 864832 - protein, 91 aa, Homo sapiens
GLLLLLNSRPRRSVANMQLFVRAQELHTFEVTGQETVAQIKAHVASLGGHCPGKIKVVLLAGAPLEDEATLGQCGVEALTTPGSSRPHAWR

SEQ ID NO: 864833 - protein, 99 aa, Homo sapiens
GFSLFSSTFALSRVGWGTARSVANMQLFVRAQELHTFEVTGQETVAQIKAHVASLGGHCPGKIKVVLLAGAPLEDEATLGQCGVEALTTPGSSRPHAWR

SEQ ID NO: 864834 - protein, 99 aa, Homo sapiens; identical to SEQ ID NO: 864809

SEQ ID NO: 864835 - protein, 105 aa, Homo sapiens; identical to SEQ ID NO: 864810
  misc_feature (1)..(1): Xaa can be any naturally occurring amino acid
  misc_feature (7)..(7): Xaa can be any naturally occurring amino acid

SEQ ID NO: 864836 - protein, 116 aa, Homo sapiens; identical to SEQ ID NO: 864816

SEQ ID NO: 864837 - protein, 116 aa, Homo sapiens; identical to SEQ ID NO: 864816

SEQ ID NO: 864838 - protein, 116 aa, Homo sapiens; identical to SEQ ID NO: 864816

SEQ ID NO: 864839 - protein, 116 aa, Homo sapiens; identical to SEQ ID NO: 864816

SEQ ID NO: 864840 - protein, 92 aa, Homo sapiens
MITRSARPHTTRHCTRISSAPLTASYTHILRYSSTPLDGACVYLVPPSTQHTNNSYFQLPANRAPVSFHLSRTTTPTPHPLPDSEHRLTPRR

SEQ ID NO: 864841 - protein, 105 aa, Homo sapiens; identical to SEQ ID NO: 864810
  misc_feature (1)..(1): Xaa can be any naturally occurring amino acid
  misc_feature (7)..(7): Xaa can be any naturally occurring amino acid

SEQ ID NO: 864842 - protein, 86 aa, Homo sapiens
QWEAFTPTGWGQSLIFLMLRFLFNQVFTNDKMEECVKLTSLYLFAKNVRSLLHTYHYQQIFLHEFSMAYTKYVGETLQPVGWSGYR

SEQ ID NO: 864843 - protein, 908 aa, Homo sapiens
MENLQDAIGAVNSLHRYKIGSKKILVSLATGAASKSLSLLSAETMSVLQDAPACCLPLFKFTDIYEKKFGHKLNVSDLYKLTDTVAIREQGNGRLVCLLPSSQARQSPLGSSQSHDGSSTNCSPIIFEELEYHEPVCRQHCSNKDFSEHEFDPDSYKIPFVILSLKTFAPQVHSLLQTHEGTVPLLSFPDCYIAEFGDLEVVQENQGGVPLEHFITCVPGVNIATAQNGIKVVKWIHNKPPPPNTDPWLLRSKSPVGNPQLIQFSREVIDLLKSQPSCVIPISHFIPSYHHHFAKQCRVSDYGYSKLIELLEAVPHVLQILGMGSKRLLTLTHRAQVKRFTQDLLKLLKSQASKQVIVREFSQAYHWCFSKDWDVTEYGVCELIDIVSEIPDTTICLSQQDNEMVICIPKRERTQDEIERTKQFSKDVVDLLRHQPHFRMPFNKFIPSYHHHFGRQCKLAYYGFTKLLELFEAIPDTLQVLECGEEKILTLTEVERFKALAAQFVKLLRSQKDNCLMMTDLLTEYAKTFGYTFRLQDYDVSSISALTQKLCHVVKVADIESGRQIQLINRKSLRSLTAQLLVLLMSWEGTTHLSVEELKRHYESTHNTPLNPCEYGFMTLTELLKSLPYLVEVFTNDKMEECVKLTSLYLFAKNVRSLLHTYHYQQIFLHEFSMAYTKYVGETLQPKTYGHSSVEELLGAIPQVVVQFLQKNGKELSCENYLNLYAKAGRLSSLSLSPANHENQPSEGERILEVPESHTASELKLGADGSGPSHTEQELLRLTDDSPVDLLCAPVPSCLPSPQLRPDPVILQSADLIQFEERPQEPSEIMILNQEEKMEIPIPGKSKTLTSDSSSSCISAAVPVPPCPSSETSESLLSKDPVESPAKKQPKNRVKLAANFSLAPITKL

SEQ ID NO: 864844 - protein, 908 aa, Homo sapiens; identical to SEQ ID NO: 864843

SEQ ID NO: 864845 - protein, 302 aa, Homo sapiens
SVGGLHFPTGWGQSLIFLMLRFLFNQVFTNDKMEECVKLTSLYLFAKNVRSLLHTYHYQQIFLHEFSMAYTKYVGETLQPKTYGHSSVEELLGAIPQVVVQFLQKNGKELSCENYLNLYAKAGRLSSLSLSPANHENQPSEGERILEVPESHTASELKLGADGSGPSHTEQELLRLTDDSPVDLLCAPVPSCLPSPQLRPDPVILQSADLIQFEERPQEPSEIMILNQEEKMEIPIPGKSKTLTSDSSSSCISAAVPVPPCPSSETSESLLSKDPVESPAKKQPKNRVKLAANFSLAPITKL

SEQ ID NO: 864846 - protein, 851 aa, Homo sapiens
MENLQDAIGAVNSLHRYKIGSKKILVSLATGAASKSLSLLSAETMSVLQDAPACCLPLFKFTDIYEKKFGHKLNVSDLYKLTDTVAIREQGNGRLVCLLPSSQARQSPLGSSQSHDGSSTNCSPIIFEELEYHEPVCRQHCSNKDFSEHEFDPDSYKIPFVILSLKTFAPQVHSLLQTHEGTVPLLSFPDCYIAEFGDLEVVQENQGGVPLEHFITCVPGVNIATAQNGIKVVKWIHNKPPPPNTDPWLLRSKSPVGNPQLIQFSREVIDLLKSQPSCVIPISHFIPSYHHHFAKQCRVSDYGYSKLIELLEAVPHVLQILGMGSKRLLTLTHRAQVKRFTQDLLKLLKSQASKQVIVREFSQAYHWCFSKDWDVTEYGVCELIDIVSEIPDTTICLSQQDNEMVICIPKRERTQDEIERTKQFSKDVVDLLRHQPHFRMPFNKFIPSYHHHFGRQCKLAYYGFTKLLELFEAIPDTLQVLECGEEKILTLTEVERFKALAAQFVKLLRSQKDNCLMMTDLLTEYAKTFGYTFRLQDYDVSSISALTQKLCHVVKVADIESGRQIQLINRKSLRSLTAQLLVLLMSWEGTTHLSVEELKRHYESTHNTPLNPCEYGFMTLTELLKSLPYLVEVFTNDKMEECVKLTSLYLFAKNVRSLLHTYHYQQIFLHEFSMAYTKYVGETLQPKTYGHSSVEELLGAIPQVVVQFLQKNGKELSCENYLNLYAKAGRLSSLSLSPANHENQPSEGERILEVPESHTASELKLGADGSGPSHTEQELLRLTDDSPVDLLCAPVPSCLPSPQLRPDPVILQSADLIQFEERPQEPSGWVTPCCHGDFLRGLKQNHDEILI

SEQ ID NO: 864847 - protein, 322 aa, Homo sapiens
MPQCHTLLYVYNLPANKDGKSVSNRLRRLSDNCGGKVLSITGCSAILRFINQDSAERAQKRMENEDVFGNRIIVSFTPKNRELCETKSSNAIADKVKSPKKLKNPKLCLIKDASEQSSSAKATPGKGSQANSGSATKNTNVKSLQELCRMESKTGHRNSEHQQGHLRLVVPTHGNSSAAVSTPKNSGVAEPVYKTSQKKENLSARSVTSSPVEKKDKEETVFQVSYPSAFSKLVASRQVSPLLASQSWSSRASPLAFNIANSSSEADCPDPFANGADVQVSNIDYRLSRKELQQLLQEAFARHGKVTFSLLCLLCYTLWWSL

SEQ ID NO: 864848 - protein, 375 aa, Homo sapiens
MPQCHTLLYVYNLPANKDGKSVSNRLRRLSDNCGGKVLSITGCSAILRFINQDSAERAQKRMENEDVFGNRIIVSFTPKNRELCETKSSNAIADKVKSPKKLKNPKLCLIKDASEQSSSAKATPGKGSQANSGSATKNTNVKSLQELCRMESKTGHRNSEHQQGHLRLVVPTHGNSSAAVSTPKNSGVAEPVYKTSQKKENLSARSVTSSPVEKKDKEETVFQVSYPSAFSKLVASRQVSPLLASQSWSSSRSMSPNLLNRASPLAFNIANSSSEADCPDPFANGADVQVSNIDYRLSRKELQQLLQEAFARHGKVKSVELSPHTDYQLKAVVQMENLQDAIGAVNSLHRYKIGSKKILVSLATGAASKSLSLLR

SEQ ID NO: 864849 - protein, 305 aa, Homo sapiens
MPQCHTLLYVYNLPANKDGKSVSNRLRRLSDNCGGKVLSITGCSAILRFINQDSAERAQKRMENEDVFGNRIIVSFTPKNRELCETKSSNAIADKVKSPKKLKNPKLCLIKDASEQSSSAKATPGKGSQANSGSATKNTNVKSLQELCRMESKTGHRNSEHQQGHLRLVVPTHGNSSAAVSTPKNSGVAEPVYKTSQKKENLSARSVTSSPVEKKDKEETVFQVSYPSAFSKLVASRQVSPLLASQSWSSRASPLAFNIANSSSEADCPDPFANGADVQVSNIDYRLSRKELQQLLQEAFARHGK

SEQ ID NO: 864850 - protein, 1227 aa, Homo sapiens
MPQCHTLLYVYNLPANKDGKSVSNRLRRLSDNCGGKVLSITGCSAILRFINQDSAERAQKRMENEDVFGNRIIVSFTPKNRELCETKSSNAIADKVKSPKKLKNPKLCLIKDASEQSSSAKATPGKGSQANSGSATKNTNVKSLQELCRMESKTGHRNSEHQQGHLRLVVPTHGNSSAAVSTPKNSGVAEPVYKTSQKKENLSARSVTSSPVEKKDKEETVFQVSYPSAFSKLVASRQVSPLLASQSWSSRASPLAFNIANSSSEADCPDPFANGADVQVSNIDYRLSRKELQQLLQEAFARHGKVKSVELSPHTDYQLKAVVQMENLQDAIGAVNSLHRYKIGSKKILVSLATGAASKSLSLLSAETMSVLQDAPACCLPLFKFTDIYEKKFGHKLNVSDLYKLTDTVAIREQGNGRLVCLLPSSQARQSPLGSSQSHDGSSTNCSPIIFEELEYHEPVCRQHCSNKDFSEHEFDPDSYKIPFVILSLKTFAPQVHSLLQTHEGTVPLLSFPDCYIAEFGDLEVVQENQGGVPLEHFITCVPGVNIATAQNGIKVVKWIHNKPPPPNTDPWLLRSKSPVGNPQLIQFSREVIDLLKSQPSCVIPISHFIPSYHHHFAKQCRVSDYGYSKLIELLEAVPHVLQILGMGSKRLLTLTHRAQVKRFTQDLLKLLKSQASKQVIVREFSQAYHWCFSKDWDVTEYGVCELIDIVSEIPDTTICLSQQDNEMVICIPKRERTQDEIERTKQFSKDVVDLLRHQPHFRMPFNKFIPSYHHHFGRQCKLAYYGFTKLLELFEAIPDTLQVLECGEEKILTLTEVERFKALAAQFVKLLRSQKDNCLMMTDLLTEYAKTFGYTFRLQDYDVSSISALTQKLCHVVKVADIESGRQIQLINRKSLRSLTAQLLVLLMSWEGTTHLSVEELKRHYESTHNTPLNPCEYGFMTLTELLKSLPYLVEVFTNDKMEECVKLTSLYLFAKNVRSLLHTYHYQQIFLHEFSMAYTKYVGETLQPKTYGHSSVEELLGAIPQVVWIKGHGHKRIVVLKNDMKSRLSSLSLSPANHENQPSEGERILEVPESHTASELKLGADGSGPSHTEQELLRLTDDSPVDLLCAPVPSCLPSPQLRPDPVILQSADLIQFEERPQEPSEIMILNQEEKMEIPIPGKSKTLTSDSSSSCISAAVPVPPCPSSETSESLLSKDPVESPAKKQPKNRVKLAANFSLAPITKL

SEQ ID NO: 864851 - protein, 1102 aa, Homo sapiens
MPQCHTLLYVYNLPANKDGKSVSNRLRRLSDNCGGKVLSITGCSAILRFINQDSAERAQKRMENEDVFEKKDKEETVFQVSYPSAFSKLVASRQVSPLLASQSWSSRASPLAFNIANSSSEADCPDPFANGADVQVSNIDYRLSRKELQQLLQEAFARHGKVKSVELSPHTDYQLKAVVQMENLQDAIGAVNSLHRYKIGSKKILVSLATGAASKSLSLLRFGHKLNVSDLYKLTDTVAIREQGNGRLVCLLPSSQARQSPLGSSQSHDGSSTNCSPIIFEELEYHEPVCRQHCSNKDFSFPDCYIAEFGDLEVVQENQGGVPLEHFITCVPGVNIATAQNGIKVVKWIHNKPPPPNTDPWLLRSKSPVGNPQLIQFSREVIDLLKSQPSCVIPISHFIPSYHHHFAKQCRVSDYGYSKLIELLEAVPHVLQILGMGSKRLLTLTHRAQVKRFTQDLLKLLKSQASKQVIVREFSQAYHWCFSKDWDVTEYGVCELIDIVSEIPDTTICLSQQDNEMVICIPKRERTQDEIERTKQFSKDVVDLLRHQPHFRMPFNKFIPSYHHHFGRQCKLAYYGFTKLLELFEAIPDTLQVLECGEEKILTLTEVERFKALAAQFVKLLRSQKDNCLMMTDLLTEYAKTFGYTFRLQDYDVSSISALTQKLCHVVKVADIESGRQIQLINRKSLRSLTAQLLVLLMSWEGTTHLSVEELKRHYESTHNTPLNPCEYGFMTLTELLKSLPYLVETAAAFDLQIELKFAGGYSLLLEEILEYIPPPFLSPLPSFLPPPPFFFFVFFVIFIFFIFVFVQFVVFVFFIVVFVFFIVVFVFTNDKMEECVKLTSLYLFAKNVRSLLHTYHYQQIFLHEFSMAYTKYVGETLQPKTYGHSSVEELLGAIPQVVVQFLQKNGKELSCENYLNLYAKAGRLSSLSLSPANHENQPSEGERILEVPESHTASELKLGADGSGPSHTEQELLRLTDDSPVDLLCAPVPSCLPSPQLRPDPVILQSADLIQFEERPQEPSEIMILNQEEKMEIPIPGKSKTLTSDSSSSCISAAVPVPPCPSSETSESLLSKDPVESPAKKQPKNRVKLAANFSLAPITKL

SEQ ID NO: 864852 - protein, 1242 aa, Homo sapiens
MPQCHTLLYVYNLPANKDGKSVSNRLRRLSDNCGGKVLSITGCSAILRFINQDSAERAQKRMENEDVFGNRIIVSFTPKNRELCETKSSNAIADKVKSPKKLKNPKLCLIKDASEQSSSAKATPGKGSQANSGSATKNTNVKSLQELCRMESKTGHRNSEHQQGHLRLVVPTHGNSSAAVSTPKNSGVAEPVYKTSQKKENLSARSVTSSPVEKKDKEETVFQVSYPSAFSKLVASRQVSPLLASQSWSSSRSMSPNLLNRASPLAFNIANSSSEADCPDPFANGADVQVSNIDYRLSRKELQQLLQEAFARHGKVKSVELSPHTDYQLKAVVQMENLQDAIGAVNSLHRYKIGSKKILVSLATGAASKSLSLLSAETMSVLQDAPACCLPLFKFTDIYEKKFGHKLNVSDLYKLTDTVAIREQGNGRLVCLLPSSQARQSPLGSSQSHDGSSTNCSPIIFEELEYHEPVCRQHCSNKDFSEHEFDPDSYKIPFVILSLKTFAPQVHSLLQTHEGTVPLLSFPDCYIAEFGDLEVVQENQGGVPLEHFITCVPGVNIATAQNGIKVVKWIHNKPPPPNTDPWLLRSKSPVGNPQLIQFSREVIDLLKSQPSCVIPISHFIPSYHHHFAKQCRVSDYGYSKLIELLEAVPHVLQILGMGSKRLLTLTHRAQVKRFTQDLLKLLKSQASKQVIVREFSQAYHWCFSKDWDVTEYGVCELIDIVSEIPDTTICLSQQDNEMVICIPKRERTQDEIERTKQFSKDVVDLLRHQPHFRMPFNKFIPSYHHHFGRQCKLAYYGFTKLLELFEAIPDTLQVLECGEEKILTLTEVERFKALAAQFVKLLRSQKDNCLMMTDLLTEYAKTFGYTFRLQDYDVSSISALTQKLCHVVKVADIESGRQIQLINRKSLRSLTAQLLVLLMSWEGTTHLSVEELKRHYESTHNTPLNPCEYGFMTLTELLKSLPYLVEVFTNDKMEECVKLTSLYLFAKNVRSLLHTYHYQQIFLHEFSMAYTKYVGETLQPKTYGHSSVEELLGAIPQVVVQFLQKNGKELSCENYLNLYAKAGRLSSLSLSPANHENQPSEGERILEVPESHTASELKLGADGSGPSHTEQELLRLTDDSPVDLLCAPVPSCLPSPQLRPDPVILQSADLIQFEERPQEPSEIMILNQEEKMEIPIPGKSKTLTSDSSSSCISAAVPVPPCPSSETSESLLSKDPVESPAKKQPKNRVKLAANFSLAPITKL

SEQ ID NO: 864853 - protein, 999 aa, Homo sapiens
NVNMCVLSRSMSPNLLNRASPLAFNIANSSSEADCPDPFANGADVQVSNIDYRLSRKELQQLLQEAFARHGKVKSVELSPHTDYQLKAVVQMENLQDAIGAVNSLHRYKIGSKKILVSLATGAASKSLSLLSAETMSVLQDAPACCLPLFKFTDIYEKKFGHKLNVSDLYKLTDTVAIREQGNGRLVCLLPSSQARQSPLGSSQSHDGSSTNCSPIIFEELEYHEPVCRQHCSNKDFSEHEFDPDSYKIPFVILSLKTFAPQVHSLLQTHEGTVPLLSFPDCYIAEFGDLEVVQENQGGVPLEHFITCVPGVNIATAQNGIKVVKWIHNKPPPPNTDPWLLRSKSPVGNPQLIQFSREVIDLLKSQPSCVIPISHFIPSYHHHFAKQCRVSDYGYSKLIELLEAVPHVLQILGMGSKRLLTLTHRAQVKRFTQDLLKLLKSQASKQVIVREFSQAYHWCFSKDWDVTEYGVCELIDIVSEIPDTTICLSQQDNEMVICIPKRERTQDEIERTKQFSKDVVDLLRHQPHFRMPFNKFIPSYHHHFGRQCKLAYYGFTKLLELFEAIPDTLQVLECGEEKILTLTEVERFKALAAQFVKLLRSQKDNCLMMTDLLTEYAKTFGYTFRLQDYDVSSISALTQKLCHVVKVADIESGRQIQLINRKSLRSLTAQLLVLLMSWEGTTHLSVEELKRHYESTHNTPLNPCEYGFMTLTELLKSLPYLVEVFTNDKMEECVKLTSLYLFAKNVRSLLHTYHYQQIFLHEFSMAYTKYVGETLQPKTYGHSSVEELLGAIPQVVVQFLQKNGKELSCENYLNLYAKAGRLSSLSLSPANHENQPSEGERILEVPESHTASELKLGADGSGPSHTEQELLRLTDDSPVDLLCAPVPSCLPSPQLRPDPVILQSADLIQFEERPQEPSEIMILNQEEKMEIPIPGKSKTLTSDSSSSCISAAVPVPPCPSSETSESLLSKDPVESPAKKQPKNRVKLAANFSLAPITKL

SEQ ID NO: 864854 - protein, 908 aa, Homo sapiens; identical to SEQ ID NO: 864843

SEQ ID NO: 864855 - protein, 659 aa, Homo sapiens
MENLQDAIGAVNSLHRYKIGSKKILVSLATGAASKSLSLLSAETMSVLQDAPACCLPLFKFTDIYEKKFGHKLNVSDLYKLTDTVAIREQGNGRLVCLLPSSQARQSPLGSSQSHDGSSTNCSPIIFEELEYHEPVCRQHCSNKDFSEHEFDPDSYKIPFVILSLKTFAPQVHSLLQTHEGTVPLLSFPDCYIAEFGDLEVVQENQGGVPLEHFITCVPGVNIATAQNGIKVVKWIHNKPPPPNTDPWLLRSKSPVGNPQLIQFSREVIDLLKSQPSCVIPISHFIPSYHHHFAKQCRVSDYGYSKLIELLEAVPHVLQILGMGSKRLLTLTHRAQVKRFTQDLLKLLKSQASKQVIVREFSQAYHWCFSKDWDVTEYGVCELIDIVSEIPDTTICLSQQDNEMVICIPKRERTQDEIERTKQFSKDVVDLLRHQPHFRMPFNKFIPSYHHHFGRQCKLAYYGFTKLLELFEAIPDTLQVLECGEEKILTLTEVERFKALAAQFVKLLRSQKDNCLMMTDLLTEYAKTFGYTFRLQDYDVSSISALTQKLCHVVKVADIESGRQIQLINRKSLRSLTAQLLVLLMSWEGTTHLSVEELKRHYESTHNTPLNPCEYGFMTLTELLKSLPYLVEVFTNDKMEECVKLTSLYLFAKNVRSRS

SEQ ID NO: 864856 - protein, 436 aa, Homo sapiens
MPQCHTLLYVYNLPANKDGKSVSNRLRRLSDNCGGKVLSITGCSAILRFINQDSAERAQKRMENEDVFGNRIIVSFTPKNRELCETKSSNAIADKVKSPKKLKNPKLCLIKDASEQSSSAKATPGKGSQANSGSATKNTNVKSLQELCRMESKTGHRNSEHQQGHLRLVVPTHGNSSAAVSTPKNSGVAEPVYKTSQKKENLSARSVTSSPVEKKDKEETVFQVSYPSAFSKLVASRQVSPLLASQSWSSSRSMSPNLLNRASPLAFNIANSSSEADCPDPFANGADVQVSNIDYRLSRKELQQLLQEAFARHGKVKSVELSPHTDYQLKAVVQMENLQDAIGAVNSLHRYKIGSKKILVSLATGAASKSLSLLSAETMSVLQDAPACCLPLFKFTDIYEKKLAAVMCQIYINYRHVASDQKTWVFYRVRRKPGFQ

SEQ ID NO: 864857 - protein, 112 aa, Homo sapiens
EPVEGGGGGASAEDQDRLRTAQLAPPGLGRTRSGFSSCRPYGAVFSLSRGVRASHAGPGREKSKACRGCREKTKRGCISGNFRCSICARKEKEKGKNRKTNCYIRAPTRRWT

SEQ ID NO: 864858 - protein, 112 aa, Homo sapiens; identical to SEQ ID NO: 864857

SEQ ID NO: 864859 - protein, 71 aa, Homo sapiens
ARTGGRVRRVVGSCQSDLGRRLRVDLHFVTKSCRKAAVASFYLPLTLAAPDLHRAPAHAEGVTRGTFRGMW

SEQ ID NO: 864860 - protein, 129 aa, Homo sapiens
MRARSATWKYGLETHLANCRKRGSMIFTNSDGSSCRDAQLAPPGLGRTRSGFSSCRPYGAVFSLSRGVRASHAGPGREKSKACRGCREKTKRGCISGNFRCSICARKEKEKGKNRKTNCYIRAPTRRWT

SEQ ID NO: 864861 - protein, 112 aa, Homo sapiens; identical to SEQ ID NO: 864857

SEQ ID NO: 864862 - protein, 71 aa, Homo sapiens; identical to SEQ ID NO: 864859

SEQ ID NO: 864863 - protein, 91 aa, Homo sapiens
  misc_feature (23)..(23): Xaa can be any naturally occurring amino acid
TNCQHGTEIYIIHQEWKIYEPHXPSPKGSPEEEEKRAKLAEAAERRQKEAASRGILDVQSVQEKRKKKEKIEKQIATSGPPPEGGLRWTVS

SEQ ID NO: 864864 - protein, 105 aa, Homo sapiens
RSAERDDATEPVQACLHAVLSPMDAVDCTLVPVRSACCRTPDLQENISKSLQRLHERYDHITEAASRGILDVQSVQEKRKKKEKIEKQIATSGPPPEGGLRWTVS

SEQ ID NO: 864865 - protein, 129 aa, Homo sapiens; identical to SEQ ID NO: 864860

SEQ ID NO: 864866 - protein, 255 aa, Homo sapiens
MKLIILEHYSQASEWAAKYIRNRIIQFNPGPEKYFTLGLPTGLPRDHPESYHSFMWNNFFKHIDIHPENTHILDGNAVDLQAECDAFEEKIKAAGGIELFVGGIGPDGHIAFNEPGSSLVSRTRVKTLAMDTILANARFFDGELTKVPTMALTVGVGTVMDAREVMILITGAHKAFALYKAIEEGVNHMWTVSAFQQHPRTVFVCDEDATLELKVKTVKYFKGLMLVHNKLVDPLYSIKEKETEKSQSSKKPYSD

SEQ ID NO: 864867 - protein, 289 aa, Homo sapiens
MKLIILEHYSQASEWAAKYIRNRIIQFNPGPEKYFTLGLPTGSTPLGCYKKLIEYYKNGDLSFKYVKTFNMDEYVGLPRDHPESYHSFMWNNFFKHIDIHPENTHILDGNAVDLQAECDAFEEKIKAAGGIELFVGGIGPDGHIAFNEPGSSLVSRTRVKTLAMDTILANARFFDGELTKVPTMALTVGVGTVMDAREVMILITGAHKAFALYKAIEEGVNHMWTVSAFQQHPRTVFVCDEDATLELKVKTVKYFKGLMLVHNKLVDPLYSIKEKETEKSQSSKKPYSD

SEQ ID NO: 864868 - protein, 289 aa, Homo sapiens; identical to SEQ ID NO: 864867

SEQ ID NO: 864869 - protein, 328 aa, Homo sapiens
DPRGAGPPAQSLQPPREASVRKRLRENLGPLTEVLQVDKMKLIILEHYSQASEWAAKYIRNRIIQFNPGPEKYFTLGLPTGSTPLGCYKKLIEYYKNGDLSFKYVKTFNMDEYVGLPRDHPESYHSFMWNNFFKHIDIHPENTHILDGNAVDLQAECDAFEEKIKAAGGIELFVGGIGPDGHIAFNEPGSSLVSRTRVKTLAMDTILANARFFDGELTKVPTMALTVGVGTVMDAREVMILITGAHKAFALYKAIEEGVNHMWTVSAFQQHPRTVFVCDEDATLELKVKTVKYFKGLMLVHNKLVDPLYSIKEKETEKSQSSKKPYSD

SEQ ID NO: 864870 - protein, 255 aa, Homo sapiens
MKLIILEHYSQASEWAAKYIRNRIIQFNPGPEKYFTLGLPTGSTPLGCYKKLIEYYKNGDLSFKYVKTFNMDEYVGLPRDHPESYHSFMWNNFFKHIDIHPENTHILDGNAVDLQAECDAFEEKIKAAGGIELFVGGIGPDGHIAFNEPGSSLVSRTRVKTLAMDTILANARFFDGELTKAIEEGVNHMWTVSAFQQHPRTVFVCDEDATLELKVKTVKYFKGLMLVHNKLVDPLYSIKEKETEKSQSSKKPYSD

SEQ ID NO: 864871 - protein, 289 aa, Homo sapiens; identical to SEQ ID NO: 864867

SEQ ID NO: 864872 - protein, 281 aa, Homo sapiens
MKLIILEHYSQASEWAAKYIRNRIIQFNPGPEKYFTLGLPTGSTPLGCYKKLIEYYKNGDLSFKYVKTFNMDEYVGLPRDHPESYHSFMWNNFFKHIDIHPENTHILDGNAVDLQAECDAFEEKIKAAGIGPDGHIAFNEPGSSLVSRTRVKTLAMDTILANARFFDGELTKVPTMALTVGVGTVMDAREVMILITGAHKAFALYKAIEEGVNHMWTVSAFQQHPRTVFVCDEDATLELKVKTVKYFKGLMLVHNKLVDPLYSIKEKETEKSQSSKKPYSD

SEQ ID NO: 864873 - protein, 271 aa, Homo sapiens
MKLIILEHYSQASEWAAKYIRNRIIQFNPGPEKYFTLGLPTGSTPLGCYKKLIEYYKNGDLSFKYVKTFNMDEYVGLPRDHPESYHSFMWNNFFKHIDIHPENTHILDGNAVDLQAECDAFEEKIKAAGGIELFVGGIGPDGHIAFNEPGSSLVSRTRVKTLAMDTILANARFFDGELTKVMILITGAHKAFALYKAIEEGVNHMWTVSAFQQHPRTVFVCDEDATLELKVKTVKYFKGLMLVHNKLVDPLYSIKEKETEKSQSSKKPYSD

SEQ ID NO: 864874 - protein, 173 aa, Homo sapiens
MPMKGRFPIRRTLQYLSQGNVVFKDSVKVMTVNYNTHGELGEGARKFVFFNIPQIQYKNPWVQIMMFKNMTPSPFLRFYLDSGEQVLVDVETKSNKEIMEHIRKILGKNEETLREEEEEKKQLSHPANFGPRKYCLRECICEVEGQVPCPSLVPLPKEMRGKYKAALKADAQD

SEQ ID NO: 864875 - protein, 135 aa, Homo sapiens
MPMKGRFPIRRTLQYLSQGNVVFKDSVKVMTVNYNTHGELGEGARKFVFFNIPQIQYKNPWVQIMMFKNMTPSPFLRFYLGEWGPRHGPGAVPDMPGETASFLWERQDELQCALSWCVCDSWHLWLPHTEALSSH

SEQ ID NO: 864876 - protein, 145 aa, Homo sapiens
MPMKGRFPIRRTLQYLSQGNVVFKDSVKVMTVNYNTHGELGEGARKFVFFNIPQIQYKNPWVQIMMFKNMTPSPFLRFYLDSGEQVLVDVETKSNKEIMEHIRKILGKNEHYLAAPSKPVSSAVVPVTQEAEAGGSLEPRRLRLE

SEQ ID NO: 864877 - protein, 108 aa, Homo sapiens
MLSFKEYYLVGCLFLTGDRKMGITIYSVIRTVPHILLTEHSASLGNCYHLWESGLTDTDRSESLTVTPVSGLLNRAEVAGKADGSDPTAKFLPGRAMNRCMKRLKIPT

SEQ ID NO: 864878 - protein, 173 aa, Homo sapiens; identical to SEQ ID NO: 864874

SEQ ID NO: 864879 - protein, 173 aa, Homo sapiens; identical to SEQ ID NO: 864874

SEQ ID NO: 864880 - protein, 112 aa, Homo sapiens
MPMKGRFPIRRTLQYLSQGNVVFKDSVKVMTVNYNTHGELGEGARKFVFFNIPQIQYKNPWVQIMMFKNMTPSPFLRFYLGTTWQHHLNLYHLLWSQLLRRLRQEDHLSPGG

SEQ ID NO: 864881 - protein, 173 aa, Homo sapiens; identical to SEQ ID NO: 864874

SEQ ID NO: 864882 - protein, 173 aa, Homo sapiens; identical to SEQ ID NO: 864874

SEQ ID NO: 864883 - protein, 184 aa, Homo sapiens
SGLAETQGRSEAAAMLPSLQESMDGDEKELESSEEGGSAEERRLEPPSSSHYCLYSYRGSRLAQQRGDSEDGSPSGTNAETPSGDDFSLSLADTNLPSEVEPELRSFIAKRLSRGAVFEGLGNVASVELKIPGYRVGCYYCLFQNEKLLPETVTIDSERNPSEYVVCFLGGSEKGLELYPFFGF

SEQ ID NO: 864884 - protein, 80 aa, Homo sapiens
RPITVFYRQSKREEKRSRRNEAKNPSLSQPNGYHHVPQEADTKWPTASFPAPPPVKHCGRRRSQEGEGHMTQTSALSGWD

SEQ ID NO: 864885 - protein, 259 aa, Homo sapiens
SGLAETQGRSEAAAMLPSLQESMDGDEKELESSEEGGSAEERRLEPPSSSHYCLYSYRGSRLAQQRGDSEDGSPSGTNAETPSGDDFSLSLADTNLPSEVEPELRSFIAKRLSRGAVFEGLGNVASVELKIPGYRVGCYYCLFQNEKLLPETVTIDSERNPSEYVVCFLGGSEKGLELFRLELDKYIQGLKNNMNCEARGLESHIKSYLSSWFEDVVCPIQRVVLLFQEKLTFLLHAALSYTPVEVKESDEKTKRDINR

SEQ ID NO: 864886 - protein, 320 aa, Homo sapiens
SGLAETQGRSEAAAMLPSLQESMDGDEKELESSEEGGSAEERRLEPPSSSHYCLYSYRGSRLAQQRGDSEDGSPSGTNAETPSGDDFSLSLADTNLPSEVEPELRSFIAKRLSRGAVFEGLGNVASVELKIPGYRVGCYYCLFQNEKLLPETVTIDSERNPSEYVVCFLGGSEKGLELFRLELDKYIQGLKNNMNCEARGLESHIKSYLSSWFEDVVCPIQRVVLLFQEKLTFLLHAALSYTPVEVKESDEKTKRDINRFLSVASLQGLIHEGTMTSLCMAMTEEQHKSVVIDCSSSQPQFCNAEILDPPPLLFTLSHPS

SEQ ID NO: 864887 - protein, 217 aa, Homo sapiens
MNCEARGLESHIKSYLSSWFEDVVCPIQRVVLLFQEKLTFLLHAALSYTPVEVKESDEKTKRDINRFLSVASLQGLIHEGTMTSLCMAMTEEQHKSVVIDCSSSQPQFCNAGSNRFCEDWMQAFLNGAKGGNPFLFRQVLENFKLKAIQDTNNLKRFIRQAEMNHYALFKCYMFLKNCGSGDILLKIVKVEHEEMPEAKNVIAVLEEFMKEALDQSF

SEQ ID NO: 864888 - protein, 290 aa, Homo sapiens
MHFTFSFFSRIPGYRVGCYYCLFQNEKLLPETVTIDSERNPSEYVVCFLGGSEKGLELFRLELDKYIQGLKNNMNCEARGLESHIKSYLSSWFEDVVCPIQRVVLLFQEKLTFLLHAALSYTPVEVKESDEKTKRDINRFLSVASLQGLIHEGTMTSLCMAMTEEQHKSVVIDCSSSQPQFCNAGSNRFCEDWMQAFLNGAKGGNPFLFRQVLENFKLKAIQDTNNLKRFIRQAEMNHYALFKCYMFLKNCGSGDILLKIVKVEHEEMPEAKNVIAVLEEFMKEALDQSF

SEQ ID NO: 864889 - protein, 215 aa, Homo sapiens
SGLAETQGRSEAAAMLPSLQESMDGDEKELESSEEGGSAEERRLEPPSSSHYCLYSYRGSRLAQQRGDSEDGSPSGTNAETPSGDDFSLSLADTNLPSEVEPELRSFIAKRLSRGAVFEGLGNVASVELKIPGYRVGCYYCLFQNEKLLPETVTIDSERNPSEYVVCFLGGARPPPPAPPSPPAPANIRKENMGRQVEEYYYQPPKSFSTPRVFS

SEQ ID NO: 864890 - protein, 410 aa, Homo sapiens
SGLAETQGRSEAAAMLPSLQESMDGDEKELESSEEGGSAEERRLEPPSSSHYCLYSYRGSRLAQQRGDSEDGSPSGTNAETPSGDDFSLSLADTNLPSEVEPELRSFIAKRLSRGAVFEGLGNVASVELKIPGYRVGCYYCLFQNEKLLPETVTIDSERNPSEYVVCFLGGSEKGLELFRLELDKYIQGLKNNMNCEARGLESHIKSYLSSWFEDVVCPIQRVVLLFQEKLTFLLHAALSYTPVEVKESDEKTKRDINRFLSVASLQGLIHEGTMTSLCMAMTEEQHKSVVIDCSSSQPQFCNAGSNRFCEDWMQAFLNGAKGGNPFLFRQVLENFKLKAIQDTNNLKRFIRQAEMNHYALFKCYMFLKNCGSGDILLKIVKVEHEEMPEAKNVIAVLEEFMKEALDQSF

SEQ ID NO: 864891 - protein, 388 aa, Homo sapiens
MDGDEKELESSEEGGSAEERRLEPPSSSHYCLYSYRGSRLAQQRGDSEDGSPSGTNAETPSGDDFSLSLADTNLPSEVEPELRSFIAKRLSRGAVFEGLGNVASVELKIPGYRVGCYYCLFQNEKLLPETVTIDSERNPSEYVVCFLGGSEKGLELFRLELDKYIQGLKNNMNCEARGLESHIKSYLSSWFEDVVCPIQRVVLLFQEKLTFLLHAALSYTPVEVKESDEKTKRDINRFLSVASLQGLIHEGTMTSLCMAMTEEQHKSVVIDCSSSQPQFCNAGSNRFCEDWMQAFLNGAKGGNPFLFRQVLENFKLKAIQDTNNLKRFIRQAEMNHYALFKCYMFLKNCGSGDILLKIVKVEHEEMPEAKNVIAVLEEFMKEALDQSF

SEQ ID NO: 864892 - protein, 410 aa, Homo sapiens; identical to SEQ ID NO: 864890

SEQ ID NO: 864893 - protein, 363 aa, Homo sapiens
PAAPKSHLLLSQPRLAQQRGDSEDGSPSGTNAETPSGDDFSLSLADTNLPSEVEPELRSFIAKRLSRGAVFEGLGNVASVELKIPGYRVGCYYCLFQNEKLLPETVTIDSERNPSEYVVCFLGGSEKGLELFRLELDKYIQGLKNNMNCEARGLESHIKSYLSSWFEDVVCPIQRVVLLFQEKLTFLLHAALSYTPVEVKESDEKTKRDINRFLSVASLQGLIHEGTMTSLCMAMTEEQHKSVVIDCSSSQPQFCNAGSNRFCEDWMQAFLNGAKGGNPFLFRQVLENFKLKAIQDTNNLKRFIRQAEMNHYALFKCYMFLKNCGSGDILLKIVKVEHEEMPEAKNVIAVLEEFMKEALDQSF

SEQ ID NO: 864894 - protein, 309 aa, Homo sapiens
MVFPAKRFCLVPSMEGVRWAFSCGTWLPSRAEWLLAVRSIQPEEKERIGQFVFARDAKAAMAGRLMIRKLVAEKLNIPWNHIRLQRTAKGKPVLAKDSSNPYPNFNFNISHQGDYAVLAAEPELQVGIDIMKTSFPGRGSIPEFFHIMKRKFTNKEWETIRSFKDEWTQLDMFYRNWALKESFIKAIGVGLGFELQRLEFDLSPLNLDIGQVYKETRLFLDGEEEKEWAFEESKIDEHHFVAVALRKPDGSRHQDVPSQDDSKPTQRQFTILNFNDLMSSAVPMTPEDPSFWDCFCFTEEIPIRNGTKS

SEQ ID NO: 864895 - protein, 309 aa, Homo sapiens; identical to SEQ ID NO: 864894

SEQ ID NO: 864896 - protein, 146 aa, Homo sapiens
MVFPAKRFCLVPSMEGVRWAFSCGTWLPSRAEWLLAVRSIQPEEKERIGQFVFARDAKAAMAGRLMIRKLVAEKLNIPWNHIRLQRTAKGKPVLAKDSSNPYPNFNFNISHQGDYAVLAAEPELQVGIDIMKTSFPAWFNSRILSY

SEQ ID NO: 864897 - protein, 309 aa, Homo sapiens; identical to SEQ ID NO: 864894

SEQ ID NO: 864898 - protein, 309 aa, Homo sapiens; identical to SEQ ID NO: 864894

SEQ ID NO: 864899 - protein, 291 aa, Homo sapiens
MVFPAKRFCLVPSMEGVRWAFSCGTWLPSRAEWLLAVRSIQPEEKERIGQFVFARDAKAAMAGRLMIRKLVAEKLNIPWNHIRLQRTAKGISHQGDYAVLAAEPELQVGIDIMKTSFPGRGSIPEFFHIMKRKFTNKEWETIRSFKDEWTQLDMFYRNWALKESFIKAIGVGLGFELQRLEFDLSPLNLDIGQVYKETRLFLDGEEEKEWAFEESKIDEHHFVAVALRKPDGSRHQDVPSQDDSKPTQRQFTILNFNDLMSSAVPMTPEDPSFWDCFCFTEEIPIRNGTKS

SEQ ID NO: 864900 - protein, 138 aa, Homo sapiens
MVFPAKRFCLVPSMEGVRWAFSCGTWLPSRAEWLLAVRSIQPEEKERIGQFVFARDAKAAMAGRLMIRKLVAEKLNIPWNHIRLQRTAKGKPVLAKDSSNPYPNFNFNISHQGDYAVLAAEPELQVGIDIMKTSFPGT

SEQ ID NO: 864901 - protein, 122 aa, Homo sapiens
TAAVAQVFERGNMNSEPEEEDGGLEDEDGDDEVAEVAEKETQAASKYFHVQKVARQDPRVAPMSNLLPAPGLPPHGQQAKEDHTKDASKASSSVSTAGQLNWNLDEQLKQNGGLAWSDDADG

SEQ ID NO: 864902 - protein, 164 aa, Homo sapiens
MSSRGGKKKSTKTSRSAKAGVIFPVGRMLRYIKKGHPKYRIGVGAPVYMAAVLEYLTAEILELAGNAARDNKKGRVTPRHILLAVANDEELNQLLKGVTIASGGVLPNIHPELLAKKRGSKGKLEAIITPPPAKKAKSPSQKKPVSKKAGGKKGARKSEEEEAG

SEQ ID NO: 864903 - protein, 164 aa, Homo sapiens; identical to SEQ ID NO: 864902

SEQ ID NO: 864904 - protein, 164 aa, Homo sapiens; identical to SEQ ID NO: 864902

SEQ ID NO: 864905 - protein, 232 aa, Homo sapiens
  misc_feature (2)..(2): Xaa can be any naturally occurring amino acid
EXTKDLTARYEAVSAPGGGGERGPRGREAKRRAGQRGARREKARAARRAQAETPCSCRRRHRAAAATAMSSRGGKKKSTKTSRSAKAGVIFPVGRMLRYIKKGHPKYRIGVGAPVYMAAVLEYLTAEILELAGNAARDNKKGRVTPRHILLAVANDEELNQLLKGVTIASGGVLPNIHPELLAKKRGSKGKLEAIITPPPAKKAKSPSQKKPVSKKAGGKKGARKSEEEEAG

SEQ ID NO: 864906 - protein, 171 aa, Homo sapiens
  misc_feature (2)..(2): Xaa can be any naturally occurring amino acid
KXPRTLRLGTRLCRRRAEGESAGRAGGKRRGGRASEERGEKRRERPGGLRPRHLAAAAAATEPPPEILELAGNAARDNKKGRVTPRHILLAVANDEELNQLLKGVTIASGGVLPNIHPELLAKKRGSKGKLEAIITPPPAKKAKSPSQKKPVSKKAGGKKGARKSEEEEAG

SEQ ID NO: 864907 - protein, 164 aa, Homo sapiens; identical to SEQ ID NO: 864902

SEQ ID NO: 864908 - protein, 164 aa, Homo sapiens; identical to SEQ ID NO: 864902

SEQ ID NO: 864909 - protein, 164 aa, Homo sapiens; identical to SEQ ID NO: 864902

SEQ ID NO: 864910 - protein, 223 aa, Homo sapiens
HSGPFRLCKKKKQGEVSKAASADSTTEGTPADGFTVLSTKSLFLGQKLNLIHSEISNLAGFEVEAIINPTNADIDLKDDLGNTLEKKGGKEFVEAVLELRKKNGPLEVAGAAVSAGHGLPAKFVIHCNSPVWGADKCEELLEKTVKNCLALADDKKLKSIAFPSIGSGRNGFPKQTAAQLILKAISSYFVSTMSSSIKTVYFVLFDSESIGIYVQEMAKLDAN

SEQ ID NO: 864911 - protein, 210 aa, Homo sapiens
  misc_feature (11)..(11): Xaa can be any naturally occurring amino acid
RIYNFEKKLKXLSNGTVFDGFTVLSTKSLFLGQKLNLIHSEISNLAGFEVEAIINPTNADIDLKDDLGNTLEKKGGKEFVEAVLELRKKNGPLEVAGAAVSAGHGLPAKFVIHCNSPVWGADKCEELLEKTVKNCLALADDKKLKSIAFPSIGSGRNGFPKQTAAQLILKAISSYFVSTMSSSIKTVYFVLFDSESIGIYVQEMAKLDAN

SEQ ID NO: 864912 - protein, 200 aa, Homo sapiens
MSSRGGKKKSTKTSRSAKAGVIFPVGRMLRYIKKGHPKYRIGVGAPVYMAAVLEYLTGNTLEKKGGKEFVEAVLELRKKNGPLEVAGAAVSAGHGLPAKFVIHCNSPVWGADKCEELLEKTVKNCLALADDKKLKSIAFPSIGSGRNGFPKQTAAQLILKAISSYFVSTMSSSIKTVYFVLFDSESIGIYVQEMAKLDAN

SEQ ID NO: 864913 - protein, 168 aa, Homo sapiens
LHISFLEKVKDWKDLFTKEKLTSALRRHQILIPCGRVEMCGRRKKKRAPLESKLEAAVSAGHGLPAKFVIHCNSPVWGADKCEELLEKTVKNCLALADDKKLKSIAFPSIGSGRNGFPKQTAAQLILKAISSYFVSTMSSSIKTVYFVLFDSESIGIYVQEMAKLDAN

SEQ ID NO: 864914 - protein, 164 aa, Homo sapiens; identical to SEQ ID NO: 864902

SEQ ID NO: 864915 - protein, 164 aa, Homo sapiens; identical to SEQ ID NO: 864902

SEQ ID NO: 864916 - protein, 164 aa, Homo sapiens; identical to SEQ ID NO: 864902

SEQ ID NO: 864917 - protein, 161 aa, Homo sapiens
AGREDWFQFTRQRRRAEGESAGRAGGKRRGGRASEERGEKRRERPGGLRPRHLAAAAAATEPPLCSLIRLQGHRHVEPRWEEEVHQDVQVCQSRSHLSRGADAAVHQERPPQVQDWSGGTRVHGRRPGIPDSGDSGAGWQCSERQQEGTGHTPAHPAGCGQ

SEQ ID NO: 864918 - protein, 164 aa, Homo sapiens; identical to SEQ ID NO: 864902

SEQ ID NO: 864919 - protein, 164 aa, Homo sapiens; identical to SEQ ID NO: 864902

SEQ ID NO: 864920 - protein, 164 aa, Homo sapiens; identical to SEQ ID NO: 864902

SEQ ID NO: 864921 - protein, 161 aa, Homo sapiens
MSSRGGKKKSTKTSRSAKAGVIFPVGRMLRYIKKGHPKYRIGVGAPVYMAAVLEYLTAEILELAGNAARDNKKGRVTPRHILLAVANDEELNQLLKGVTIASGGVLPNIHPELLAKKRGSKGKLEAIITPPPAKKAKSPSQKKPVSKKAGGKKGARKSEGM

SEQ ID NO: 864922 - protein, 164 aa, Homo sapiens; identical to SEQ ID NO: 864902

SEQ ID NO: 864923 - protein, 164 aa, Homo sapiens; identical to SEQ ID NO: 864902

SEQ ID NO: 864924 - protein, 229 aa, Homo sapiens
MSSRGGKKKSTKTSRSAKAGVIFPVGRMLRYIKKGHPKYRIGVGAPVYMAAVLEYLTAEILELAGNAARDNKKGRVTPRHILLAVANDEELNQLLKGVTIASGGVLPNIHPELLAKKRGSKGKLEAIITPPPAKKAKSPSQKKPVSKAEQKGRNQRSEQRSRRRTGPARWNSARVRRRNRDSMKRATHAGNKNGSIVFLMLSAPQRLPSPFSTPKRKQQTRTNNTAPKN

SEQ ID NO: 864925 - protein, 164 aa, Homo sapiens; identical to SEQ ID NO: 864902

SEQ ID NO: 864926 - protein, 164 aa, Homo sapiens; identical to SEQ ID NO: 864902

SEQ ID NO: 864927 - protein, 164 aa, Homo sapiens; identical to SEQ ID NO: 864902

SEQ ID NO: 864928 - protein, 164 aa, Homo sapiens; identical to SEQ ID NO: 864902

SEQ ID NO: 864929 - protein, 164 aa, Homo sapiens; identical to SEQ ID NO: 864902

SEQ ID NO: 864930 - protein, 164 aa, Homo sapiens; identical to SEQ ID NO: 864902

SEQ ID NO: 864931 - protein, 164 aa, Homo sapiens; identical to SEQ ID NO: 864902

SEQ ID NO: 864932 - protein, 153 aa, Homo sapiens
HRALEGPGRYTVAGEWVCVWHLVLCSEPELTVSVSSPHHYAAVSAGHGLPAKFVIHCNSPVWGADKCEELLEKTVKNCLALADDKKLKSIAFPSIGSGRNGFPKQTAAQLILKAISSYFVSTMSSSIKTVYFVLFDSESIGIYVQEMAKLDAN

SEQ ID NO: 864933 - protein, 164 aa, Homo sapiens; identical to SEQ ID NO: 864902

SEQ ID NO: 864934 - protein, 164 aa, Homo sapiens; identical to SEQ ID NO: 864902

SEQ ID NO: 864935 - protein, 164 aa, Homo sapiens; identical to SEQ ID NO: 864902

SEQ ID NO: 864936 - protein, 120 aa, Homo sapiens
LLPSLKAHSTSFCRCQLSAQLSVPHPIFWALGFPTLAYKQTRGSTDTDPTQGKLQHRGRWPVRWGRSCSPRGIPVAECLSSLLQERFSKADSSSADSEGHLQLLRVYNVLFHQNGVLRAF

SEQ ID NO: 864937 - protein, 317 aa, Homo sapiens
MSHGPKQPGAAAAPAGGKAPGQHGGFVVTVKQERGEGPRAGEKGSHEEEPVKKRGWPKGKKRKKILPNGPKAPVTGYVRFLNERREQIRTRHPDLPFPEITKMLGAEWSKLQPTEKQRYLDEAEREKQQYMKELRAYQQSEAYKMCTEKIQEKKIKKEDSSSGLMNTLLNGHKGGDCDGFSTFDVPIFTEEFLDQNKAREAELRRLRKMNVAFEEQNAVLQRHTQSMSSARERLEQELALEERRTLALQQQLQAVRQALTASFASLPVPGTGETPTLGTLDFYMARLHGAIERDPAQHEKLIVRIKEILAQVASEHL

SEQ ID NO: 864938 - protein, 317 aa, Homo sapiens; identical to SEQ ID NO: 864937

SEQ ID NO: 864939 - protein, 317 aa, Homo sapiens; identical to SEQ ID NO: 864937

SEQ ID NO: 864940 - protein, 317 aa, Homo sapiens; identical to SEQ ID NO: 864937

SEQ ID NO: 864941 - protein, 317 aa, Homo sapiens; identical to SEQ ID NO: 864937

SEQ ID NO: 864942 - protein, 317 aa, Homo sapiens; identical to SEQ ID NO: 864937

SEQ ID NO: 864943 - protein, 317 aa, Homo sapiens; identical to SEQ ID NO: 864937

SEQ ID NO: 864944 - protein, 317 aa, Homo sapiens; identical to SEQ ID NO: 864937

SEQ ID NO: 864945 - protein, 317 aa, Homo sapiens; identical to SEQ ID NO: 864937

SEQ ID NO: 864946 - protein, 317 aa, Homo sapiens; identical to SEQ ID NO: 864937

SEQ ID NO: 864947 - protein, 317 aa, Homo sapiens; identical to SEQ ID NO: 864937

SEQ ID NO: 864948 - protein, 574 aa, Homo sapiens
RYLHGLARGEGLTQWDRSPRPSLACRGRGGAGRPTGAGCGRLVGASRSREVRESFFGGPARSGHVPRPQAARRGRRAGGRQGSGPAWGLRGDCQARARRGSTRGREGVPRGGGESPCAELGEAPGSRPSLEAPPQAGFELLVAPPTAHFPLEAETPPRASCHAPDRSSATLSPGPAHRTMPALPTLRSRPLPLLGGGTLPLVLWARSPAENHAHQAEATPTTEVNANPVLKPRPIVPQIPSPLARIPLTHRVPTADRALPPSFPGSSSQLGPAPITRPYALGPAHAPLSPAPVRQAPLPTTQPGSAPVKKRGWPKGKKRKKILPNGPKAPVTGYVRFLNERREQIRTRHPDLPFPEITKMLGAEWSKLQPTEKQRYLDEAEREKQQYMKELRAYQQSEAYKMCTEKIQEKKIKKEDSSSGLMNTLLNGHKGGDCDGFSTFDVPIFTEEFLDQNKAREAELRRLRKMNVAFEEQNAVLQRHTQSMSSARERLEQELALEERRTLALQQQLQAVRQALTASFASLPVPGTGETPTLGTLDFYMARLHGAIERDPAQHEKLIVRIKEILAQVASEHL

SEQ ID NO: 864949 - protein, 640 aa, Homo sapiens
RYLHGLARGEGLTQWDRSPRPSLACRGRGGAGRPTGAGCGRLVGASRSREVRESFFGGENSRGTPGPERGRGCRGPRAGPGSFLARGKPAQASRGGQSPNKGFLGRPPSRTSLPLDPAPPALRARHPGALHRGVPQFAVCHRAARALLTSARVRVPGRPARSGHVPRPQAARRGRRAGGRQGSGPAWGLRGDCQARARRGSTRGREGVPRGGAHFPLEAETPPRASCHAPDRSSATLSPGPAHRTMPALPTLRSRPLPLLGGGTLPLVLWARSPAENHAHQAEATPTTEVNANPVLKPRPIVPQIPSPLARIPLTHRVPTADRALPPSFPGSSSQLGPAPITRPYALGPAHAPLSPAPVRQAPLPTTQPGSAPVKKRGWPKGKKRKKILPNGPKAPVTGYVRFLNERREQIRTRHPDLPFPEITKMLGAEWSKLQPTEKQRYLDEAEREKQQYMKELRAYQQSEAYKMCTEKIQEKKIKKEDSSSGLMNTLLNGHKGGDCDGFSTFDVPIFTEEFLDQNKAREAELRRLRKMNVAFEEQNAVLQRHTQSMSSARERLEQELALEERRTLALQQQLQAVRQALTASFASLPVPGTGETPTLGTLDFYMARLHGAIERDPAQHEKLIVRIKEILAQVASEHL

SEQ ID NO: 864950 - protein, 317 aa, Homo sapiens; identical to SEQ ID NO: 864937

SEQ ID NO: 864951 - protein, 402 aa, Homo sapiens
MPGAGRGGAADGGRAAGGWLERRAVGRSGKVSLEVKTAAELRALRGGGGAGVPGPGRGLSWPGGNRPRPPGGGNRPTKDSWGARPRGLPCPWIRPPQRSGPGIPGLSIAGYPSSRSAIGQPGRYSPPPASVFQVPVKKRGWPKGKKRKKILPNGPKAPVTGYVRFLNERREQIRTRHPDLPFPEITKMLGAEWSKLQPTEKQRYLDEAEREKQQYMKELRAYQQSEAYKMCTEKIQEKKIKKEDSSSGLMNTLLNGHKGGDCDGFSTFDVPIFTEEFLDQNKAREAELRRLRKMNVAFEEQNAVLQRHTQSMSSARERLEQELALEERRTLALQQQLQAVRQALTASFASLPVPGTGETPTLGTLDFYMARLHGAIERDPAQHEKLIVRIKEILAQVASEHL

SEQ ID NO: 864952 - protein, 109 aa, Homo sapiens
MNVAFEEQNAVLQRHTQSMSSARERLEQELALEERRTLALQQQLQAVRQALTASFASLPVPGTGETPTLGTLDFYMARLHGAIERDPAQHEKLIVRIKEILAQVASEHL

SEQ ID NO: 864953 - protein, 171 aa, Homo sapiens
MQRRSCGRGPATPHPVDERLGVHPLGPGPILHLGGSSPPKIKFLQHPFSFQSPQPPEPGKSTRCAIHPEEPHSRGCPSSEDSHALHWLSGPPPGHRADETHPQHTAGPPKLLTTGGCAIGHTGSCLVGTYLGCPPHACTPDGWGPALPILLSSSRGTLVGVAPSHCWIRTF

SEQ ID NO: 864954 - protein, 341 aa, Homo sapiens
RYLHGLARGEGLTQWDRSPRPSLACRGRGGAGRPTGAGCGRLVGASRSREVRESFFGGENSRGTPGPERGRGCRGPRAGPGSFLARGKPAQASRGGQSPNKGFLGRPPSRTSLPLDPAPPALRARHPGALHRGVPQFAVCHRAARALLTSARVRVPGRPARSGHVPRPQAARRGRRAGGRQGSGPAWGLRGDCQARARRGSTRAGHSGLLHGPASRSHRARPRPAREAHRPHQGNPGPGRQRAPVRSGRAHDAEEKLWARPCHTPPRGREAGGPPFGAWSHPAPWGCAIGHTGSCLVGTYLGCPPHACTPDGWGPALPILLSSSRGTLVGVAPSHCWIRTF

SEQ ID NO: 864955 - protein, 317 aa, Homo sapiens; identical to SEQ ID NO: 864937

SEQ ID NO: 864956 - protein, 317 aa, Homo sapiens; identical to SEQ ID NO: 864937

SEQ ID NO: 864957 - protein, 330 aa, Homo sapiens
MSHGPKQPGAAAAPAGGKAPGQHGGFVVTVKQERGEGPRAGEKGSHEEEPVKKRGWPKGKKRKKILPNGPKAPVTGYVRFLNERREQIRTRHPDLPFPEITKMLGAEWSKLQPTEKQASPASSLLVLPPQRYLDEAEREKQQYMKELRAYQQSEAYKMCTEKIQEKKIKKEDSSSGLMNTLLNGHKGGDCDGFSTFDVPIFTEEFLDQNKAREAELRRLRKMNVAFEEQNAVLQRHTQSMSSARERLEQELALEERRTLALQQQLQAVRQALTASFASLPVPGTGETPTLGTLDFYMARLHGAIERDPAQHEKLIVRIKEILAQVASEHL

SEQ ID NO: 864958 - protein, 109 aa, Homo sapiens; identical to SEQ ID NO: 864952

SEQ ID NO: 864959 - protein, 360 aa, Homo sapiens
MSHGPKQPGAAAAPAGGKAPGQHGGFVVTVKQERGEGPRAGEKGSHEEEPVKKRGWPKGKKRKKILPNGPKAPVTGYVRFLNERREQIRTRHPDLPFPEITKMLGAEWSKLQPTEKQRYLDEAEREKQQYMKELRAYQQSEAYKMCTEKIQEKKIKKEDSSSGLMNTLLNGHKVSDLFLSKHLGEKGLEASRTLSQSQCSPRCVQAGAVPLHRGIAVDCTPTGVSQETLLGLGHTQRAWLPPTTSKLPPCPFVFRVGTAMASPPSMFPSSLKSSWTKTKVSGNCAPDANSVKLGGRGGRGPGGPQDCRRRIGRFPMSVQAHAVAPEADVEQEAEGAVRETWAGARPGQKPGGRGKGRRRL

SEQ ID NO: 864960 - protein, 225 aa, Homo sapiens
MSCESSMVLGYWDIRGLAHAIRLLLEFTDTSYEEKRYTCGEAPDYDRSQWLDVKFKLDLDFPNLPYLLDGKNKITQSNAILRYIARKHNMCGETEEEKIRVDIIENQVMDFRTQLIRLCYSSDHEKLKPQYLEELPGQLKQFSMFLGKFSWFAGEKLTFVDFLTYDILDQNRIFDPKCLDEFPNLKAFMCRFEALEKIAAYLQSDQFCKMPINNKMAQWGNKPVC

SEQ ID NO: 864961 - protein, 225 aa, Homo sapiens; identical to SEQ ID NO: 864960

SEQ ID NO: 864962 - protein, 225 aa, Homo sapiens; identical to SEQ ID NO: 864960

SEQ ID NO: 864963 - protein, 222 aa, Homo sapiens
MSGIKPLPLTVSLVLEGSEARHHVVRVVYGSRVLGYSWAPDYDRSQWLDVKFKLDLDFPNLPYLLDGKNKITQSNAILRYIARKHNMCGETEEEKIRVDIIENQVMDFRTQLIRLCYSSDHEKLKPQYLEELPGQLKQFSMFLGKFSWFAGEKLTFVDFLTYDILDQNRIFDPKCLDEFPNLKAFMCRFEALEKIAAYLQSDQFCKMPINNKMAQWGNKPVC

SEQ ID NO: 864964 - protein, 225 aa, Homo sapiens; identical to SEQ ID NO: 864960

SEQ ID NO: 864965 - protein, 132 aa, Homo sapiens
MSCESSMVLGYWDIRGLAHAIRLLLEFTDTSYEEKRYTCGEAPDYDRSQWLDVKFKLDLDFPNLPYLLDGKNKITQSNAILRYIARKHNMCGETEEEKIRVDIIENQVMDFRTQLIRLCYSSDHVSFLSTHL

SEQ ID NO: 864966 - protein, 225 aa, Homo sapiens; identical to SEQ ID NO: 864960

SEQ ID NO: 864967 - protein, 335 aa, Homo sapiens
MSCESSMVLGYWDIRGVSAVSTESRSVKETDAERAGLWVRDLQQEQLYAGAFSSCRATDVDPCPASGIAGPVGRGGGDHAGAGPRGRLTTAPAGRRDSAAPGRGTLAGGGWEWVGAAQSLNRCLPQLAHAIRLLLEFTDTSYEEKRYTCGEAPDYDRSQWLDVKFKLDLDFPNLPYLLDGKNKITQSNAILRYIARKHNMCGETEEEKIRVDIIENQVMDFRTQLIRLCYSSDHEKLKPQYLEELPGQLKQFSMFLGKFSWFAGEKLTFVDFLTYDILDQNRIFDPKCLDEFPNLKAFMCRFEALEKIAAYLQSDQFCKMPINNKMAQWGNKPVC

SEQ ID NO: 864968 - protein, 213 aa, Homo sapiens [sequence omitted]

SEQ ID NO: 864969 - protein, 222 aa, Homo sapiens; identical to SEQ ID NO: 864963

SEQ ID NO: 864970 - protein, 136 aa, Homo sapiens
LPVNAFPGEGRPPTSPGSTVSSRAGAQAVGPACALQRLLWGSDGMGVSTSSGGSTPFPFLHVCHQQRPSHVASLGVFVFFGVFLPRVLYHPCGRGFWVENEVFAGFLQCGACPGLGRCLHVALCAAVCPALPPPGW

SEQ ID NO: 864971 - protein, 348 aa, Homo sapiens
MTTALEPEDQKGLLIIKAEDHYWGQDSSSQKCSPHRRELYRQHFRKLCYQDAPGPREALTQLWELCRQWLRPECHTKEQILDLLVLEQFLSILPKDLQAWVRAHHPETGEEAVTVLEDLERELDEPGKQVPGNSERRDILMDKLAPLGRPYESLTVQLHPKKTQLEQEAGKPQRNGDKTRTKNEELFQKEDMPKDKEFLGEINDRLNKDTPQHPKSKDIIENEGRSEWQQRERRRYKCDECGKSFSHSSDLSKHRRTHTGEKPYKCDECGKAFIQRSHLIGHHRVHTGVKPYKCKECGKDFSGRTGLIQHQRIHTGEKPYECDECGRPFRVSSALIRHQRIHTANKLY

SEQ ID NO: 864972 - protein, 105 aa, Homo sapiens
MLPRQLPPQRPSHGFRGSRTLAFFFPPPFGELAVLGLSPKSREMLQASVRLPTRRVVPEAGPEPQASRDSFGRCWGLSGRGRSRFRSRGRESRGFTVLARMVSIS

SEQ ID NO: 864973 - protein, 126 aa, Homo sapiens
RQWTCSPGNGAADGARALPRLTPVADAPAALPPQRPSHGFRGSRTLAFFFPPRFGELAVLGLSPKSREMLQASVRLPTRRVVPEAGPEPQASRDSFGRCWGLSGRGRSRFRSRGRGAFPSLVCSGL

SEQ ID NO: 864974 - protein, 126 aa, Homo sapiens; identical to SEQ ID NO: 864973

SEQ ID NO: 864975 - protein, 102 aa, Homo sapiens
MLPRQLPPQRPSHGFRGSRTLAFFFPPPFGELAVLGLSPKSREMLQASVRLPTRRVVPEAGPEPQASRDSFGRCWGLSGRGRSRFRSRGRGASGLLCLLYGQ

SEQ ID NO: 864976 - protein, 126 aa, Homo sapiens; identical to SEQ ID NO: 864973

SEQ ID NO: 864977 - protein, 126 aa, Homo sapiens; identical to SEQ ID NO: 864973

SEQ ID NO: 864978 - protein, 126 aa, Homo sapiens; identical to SEQ ID NO: 864973

SEQ ID NO: 864979 - protein, 126 aa, Homo sapiens; identical to SEQ ID NO: 864973

SEQ ID NO: 864980 - protein, 126 aa, Homo sapiens; identical to SEQ ID NO: 864973

SEQ ID NO: 864981 - protein, 102 aa, Homo sapiens; identical to SEQ ID NO: 864975

SEQ ID NO: 864982 - protein, 105 aa, Homo sapiens; identical to SEQ ID NO: 864972

SEQ ID NO: 864983 - protein, 105 aa, Homo sapiens; identical to SEQ ID NO: 864972

SEQ ID NO: 864984 - protein, 126 aa, Homo sapiens; identical to SEQ ID NO: 864973

SEQ ID NO: 864985 - protein, 126 aa, Homo sapiens; identical to SEQ ID NO: 864973

SEQ ID NO: 864986 - protein, 126 aa, Homo sapiens; identical to SEQ ID NO: 864973

SEQ ID NO: 864987 - protein, 126 aa, Homo sapiens; identical to SEQ ID NO: 864973

SEQ ID NO: 864988 - protein, 126 aa, Homo sapiens; identical to SEQ ID NO: 864973

SEQ ID NO: 864989 - protein, 101 aa, Homo sapiens
MTSEFFAAQLRSQISDHTTHPISYYKPEFYTPDDGGTAHLSVVAEDGSAVSATSTINLYFGSKVCSPVSGILFNNEWTTSALPASPMSLGHPPHLPISSSQ

SEQ ID NO: 864990 - protein, 350 aa, Homo sapiens
MEGDRNVPPVPPASSTPYKPPYGKLLLPPGTDGGKEGPRVLNGNPQQEDGGLAGITEQQSGAFDRWEMIQAQELHNKLKIKQNLQQLNSDISAITTWLKKTEAELEMLKMAKPPSDIQEIELRVKRLQEILKAFDTYKALVVSVNVSSKEFLQTESPESTELQSRLRQLSLLWEAAQGAVDSWRGGLRQSLMQCQGSKTRPRSDVLFFEGDFHQLSQNLLLWLASAKNRRQKAHVTDPKADPRALLECRRELMQLEKELVERQPQVDMLQEISNSLLIKGHGEDCIEAEEKVHVIEKKLKQLREQVSQDLMALQGTQNPASPLPSFDEVDSGDQPPATSVPAPRAKSSEQ

SEQ ID NO: 864991 - protein, 113 aa, Homo sapiens [sequence omitted]

SEQ ID NO: 864992 - protein, 1095 aa, Homo sapiens
  misc_feature (2)..(2): Xaa can be any naturally occurring amino acid
  misc_feature (5)..(5): Xaa can be any naturally occurring amino acid
HXMPXLTLDHPTFLVLPGGQERFSLYQTRSLIHELKNKEIHFQRRRTTCALTLEAGEKLLLTTDLKTKESVGRRISQLQDSWKDMEPQLAEMIKQFQSTVETWDQCEKKIKELKSRLQVLKAQSEDPLPELHEDLHNEKELIKELEQSLASWTQNLKELQTMKADLTRHVLVEDVMVLKEQIEHLHRQWEDLCLRVAIRKQEIEDRLNTWVVFNEKNKELCAWLVQMENKVLQTADISIEEMIEKLQKDCMEEINLFSENKLQLKQMGDQLIKASNKSRAAEIDDKLNKINDRWQHLFDVIGSRVKKLKETFAFIQQLDKNMSNLRTWLARIESELSKPVVYDVCDDQEIQKRLAEQQDLQRDIEQHSAGVESVFNICDVLLHDSDACANETECDSIQQTTRSLDRRWRNICAMSMERRMKIEETWRLWQKFLDDYSRFEDWLKSAERTAACPNSSEVLYTSAKEELKRFEAFQRQIHERLTQLELINKQYRRLARENRTDTASRLKQMVHEGNQRWDNLQRRVTAVLRRLRHFTNQREEFEGTRESILVWLTEMDLQLTNVEHFSESDADDKMRQLNGFQQEITLNTNKIDQLIVFGEQLIQKSEPLDAVLIEDELEELHRYCQEVFGRVSRFHRRLTSCTPGLEDEKEASENETDMEDPREIQTDSWRKRGESEEPSSPQSLCHLVAPGHERSGCETPVSVDSIPLEWDHTGDVGGSSSHEEDEEGPYYSALSGKSISDGHSWHVPDSPSCPEHHYKQMEGDRNVPPVPPASSTPYKPPYGKLLLPPGTDGGKEGPRVLNGNPQQEDGGLAGITEQQSGAFDRWEMIQAQELHNKLKIKQNLQQLNSDISAITTWLKKTEAELEMLKMAKPPSDIQEIELRVKRLQEILKAFDTYKALVVSVNVSSKEFLQTESPESTELQSRLRQLSLLWEAAQGAVDSWRGGLRQSLMQCQDFHQLSQNLLLWLASAKNRRQKAHVTDPKADPRALLECRRELMQLEKELVERQPQVDMLQEISNSLLIKGHGEDCIEAEEKVHVIEKKLKQLREQVSQDLMALQGTQNPASPLPSFDEVDSGDQPPATSVPAPRAKSSEQ

SEQ ID NO: 864993 - protein, 1118 aa, Homo sapiens
  misc_feature (2)..(2): Xaa can be any naturally occurring amino acid
  misc_feature (5)..(5): Xaa can be any naturally occurring amino acid
HXMPXLTLDHPTFLVLPGGQERFSLYQTRSLIHELKNKEIHFQRRRTTCALTLEAGEKLLLTTDLKTKESVGRRISQLQDSWKDMEPQLAEMIKQFQSTVETWDQCEKKIKELKSRLQVLKAQSEDPLPELHEDLHNEKELIKELEQSLASWTQNLKELQTMKADLTRHVLVEDVMVLKEQIEHLHRQWEDLCLRVAIRKQEIEDRLNTWVVFNEKNKELCAWLVQMENKVLQTADISIEEMIEKLQKDCMEEINLFSENKLQLKQMGDQLIKASNKSRAAEIDDKLNKINDRWQHLFDVIGSRVKKLKETFAFIQQLDKNMSNLRTWLARIESELSKPVVYDVCDDQEIQKRLAEQQDLQRDIEQHSAGVESVFNICDVLLHDSDACANETECDSIQQTTRSLDRRWRNICAMSMERRMKIEETWRLWQKFLDDYSRFEDWLKSAERTAACPNSSEVLYTSAKEELKRFEAFQRQIHERLTQLELINKQYRRLARENRTDTASRLKQMVHEGNQRWDNLQRRVTAVLRRLRHFTNQREEFEGTRESILVWLTEMDLQLTNVEHFSESDADDKMRQLNGFQQEITLNTNKIDQLIVFGEQLIQKSEPLDAVLIEDELEELHRYCQEVFGRVSRFHRRLTSCTPGLEDEKEASENETDMEDPREIQTDSWRKRGESEEPSSPQSLCHLVAPGHERSGCETPVSVDSIPLEWDHTGDVGGSSSHEEDEEGPYYSALSDVEIPENPEAYLKMTTKTLKASSGKSISDGHSWHVPDSPSCPEHHYKQMEGDRNVPPVPPASSTPYKPPYGKLLLPPGTDGGKEGPRVLNGNPQQEDGGLAGITEQQSGAFDRWEMIQAQELHNKLKIKQNLQQLNSDISAITTWLKKTEAELEMLKMAKPPSDIQEIELRVKRLQEILKAFDTYKALVVSVNVSSKEFLQTESPESTELQSRLRQLSLLWEAAQGAVDSWRGGLRQSLMQCQDFHQLSQNLLLWLASAKNRRQKAHVTDPKADPRALLECRRELMQLEKELVERQPQVDMLQEISNSLLIKGHGEDCIEAEEKVHVIEKKLKQLREQVSQDLMALQGTQNPASPLPSFDEVDSGDQPPATSVPAPRAKSSEQ

SEQ ID NO: 864994 - protein, 1046 aa, Homo sapiens
GTAYHLCQLGLHVFPAVLKLTKQFQSTVETWDQCEKKIKELKSRLQVLKAQSEDPLPELHEDLHNEKELIKELEQSLASWTQNLKELQTMKADLTRHVLVEDVMVLKEQIEHLHRQWEDLCLRVAIRKQEIEDRLNTWVVFNEKNKELCAWLVQMENKVLQTADISIEEMIEKLQKDCMEEINLFSENKLQLKQMGDQLIKASNKSRAAEIDDKLNKINDRWQHLFDVIGSRVKKLKETFAFIQQLDKNMSNLRTWLARIESELSKPVVYDVCDDQEIQKRLAEQQDLQRDIEQHSAGVESVFNICDVLLHDSDACANETECDSIQQTTRSLDRRWRNICAMSMERRMKIEETWRLWQKFLDDYSRFEDWLKSAERTAACPNSSEVLYTSAKEELKRFEAFQRQIHERLTQLELINKQYRRLARENRTDTASRLKQMVHEGNQRWDNLQRRVTAVLRRLRHFTNQREEFEGTRESILVWLTEMDLQLTNVEHFSESDADDKMRQLNGFQQEITLNTNKIDQLIVFGEQLIQKSEPLDAVLIEDELEELHRYCQEVFGRVSRFHRRLTSCTPGLEDEKEASENETDMEDPREIQTDSWRKRGESEEPSSPQSLCHLVAPGHERSGCETPVSVDSIPLEWDHTGDVGGSSSHEEDEEGPYYSALSDVEIPENPEAYLKMTTKTLKASSGKSISDGHSWHVPDSPSCPEHHYKQMEGDRNVPPVPPASSTPYKPPYGKLLLPPGTDGGKEGPRVLNGNPQQEDGGLAGITEQQSGAFDRWEMIQAQELHNKLKIKQNLQQLNSDISAITTWLKKTEAELEMLKMAKPPSDIQEIELRVKRLQEILKAFDTYKALVVSVNVSSKEFLQTESPESTELQSRLRQLSLLWEAAQGAVDSWRGGLRQSLMQCQDFHQLSQNLLLWLASAKNRRQKAHVTDPKADPRALLECRRELMQLEKELVERQPQVDMLQEISNSLLIKGHGEDCIEAEEKVHVIEKKLKQLREQVSQDLMALQGTQNPASPLPSFDEVDSGDQPPATSVPAPRAKSSEQ

SEQ ID NO: 864995 - protein, 679 aa, Homo sapiens
MNPWQQVAWDVEGKEGVWHSACFGSDPSHVMQAFQRQIHERLTQLELINKQYRRLARENRTDTASRLKQMVHEGNQRWDNLQRRVTAVLRRLRHFTNQREEFEGTRESILVWLTEMDLQLTNVEHFSESDADDKMRQLNGFQQEITLNTNKIDQLIVFGEQLIQKSEPLDAVLIEDELEELHRYCQEVFGRVSRFHRRLTSCTPGLEDEKEASENETDMEDPREIQTDSWRKRGESEEPSSPQSLCHLVAPGHERSGCETPVSVDSIPLEWDHTGDVGGSSSHEEDEEGPYYSALSDVEIPENPEAYLKMTTKTLKASSGKSISDGHSWHVPDSPSCPEHHYKQMEGDRNVPPVPPASSTPYKPPYGKLLLPPGTDGGKEGPRVLNGNPQQEDGGLAGITEQQSGAFDRWEMIQAQELHNKLKIKQNLQQLNSDISAITTWLKKTEAELEMLKMAKPPSDIQEIELRVKRLQEILKAFDTYKALVVSVNVSSKEFLQTESPESTELQSRLRQLSLLWEAAQGAVDSWRGGLRQSLMQCQDFHQLSQNLLLWLASAKNRRQKAHVTDPKADPRALLECRRELMQLEKELVERQPQVDMLQEISNSLLIKGHGEDCIEAEEKVHVIEKKLKQLREQVSQDLMALQGTQNPASPLPSFDEVDSGDQPPATSVPAPRAKSSEQ

SEQ ID NO: 864996 - protein, 1118 aa, Homo sapiens; identical to SEQ ID NO: 864993
  misc_feature (2)..(2): Xaa can be any naturally occurring amino acid
  misc_feature (5)..(5): Xaa can be any naturally occurring amino acid

SEQ ID NO: 864997 - protein, 1118 aa, Homo sapiens; identical to SEQ ID NO: 864993
  misc_feature (2)..(2): Xaa can be any naturally occurring amino acid
  misc_feature (5)..(5): Xaa can be any naturally occurring amino acid

SEQ ID NO: 864998 - protein, 1128 aa, Homo sapiens
  misc_feature (2)..(2): Xaa can be any naturally occurring amino acid
  misc_feature (5)..(5): Xaa can be any naturally occurring amino acid
HXMPXLTLDHPTFLVLPGGQERFSLYQTRSLIHELKNKEIHFQRRRTTCALTLEAGEKLLLTTDLKTKESVGRRISQLQDSWKDMEPQLAEMIKQFQSTVETWDQCEKKIKELKSRLQVLKAQSEDPLPELHEDLHNEKELIKELEQSLASWTQNLKELQTMKADLTRHVLVEDVMVLKEQIEHLHRQWEDLCLRVAIRKQEIEDRLNTWVVFNEKNKELCAWLVQMENKVLQTADISIEEMIEKLQKDCMEEINLFSENKLQLKQMGDQLIKASNKSRAAEIDDKLNKINDRWQHLFDVIGSRVKKLKETFAFIQQLDKNMSNLRTWLARIESELSKPVVYDVCDDQEIQKRLAEQQDLQRDIEQHSAGVESVFNICDVLLHDSDACANETECDSIQQTTRSLDRRWRNICAMSMERRMKIEETWRLWQKFLDDYSRFEDWLKSAERTAACPNSSEVLYTSAKEELKRFEAFQRQIHERLTQLELINKQYRRLARENRTDTASRLKQMVHEGNQRWDNLQRRVTAVLRRLRHFTNQREEFEGTRESILVWLTEMDLQLTNVEHFSESDADDKMRQLNGFQQEITLNTNKIDQLIVFGEQLIQKSEPLDAVLIEDELEELHRYCQEVFGRVSRFHRRLTSCTPGLEDEKEASENETDMEDPREIQTDSWRKRGESEEPSSPQSLCHLVAPGHERSGCETPVSVDSIPLEWDHTGDVGGSSSHEEDEEGPYYSALSDVEIPENPEAYLKMTTKTLKASSGKSISDGHSWHVPDSPSCPEHHYKQMEGDRNVPPVPPASSTPYKPPYGKLLLPPGTDGGKEGPRVLNGNPQQEDGGLAGITEQQSGAFDRWEMIQAQELHNKLKIKQNLQQLNSDISAITTWLKKTEAELEMLKMAKPPSDIQEIELRVKRLQEILKAFDTYKALVVSVNVSSKEFLQTESPESTELQSRLRQLSLLWEAAQGAVDSWRGGLRQSLMQCQDFHQLSQNLLLWLASAKNRRQKAHVTDPKADPRALLECRRELMQLEKELVERQPQVDMLQEISNSLLIKGHGEDCIEAEEKVHVIEKKLKQLREQVSQDLMALQGTQNPASPLPSFDEVDSGDQPPATSVPAPRAKFRAVRTVLYVSAGL

SEQ ID NO: 864999 - protein, 877 aa, Homo sapiens
  misc_feature (2)..(2): Xaa can be any naturally occurring amino acid
  misc_feature (5)..(5): Xaa can be any naturally occurring amino acid
HXMPXLTLDHPTFLVLPGGQERFSLYQTRSLIHELKNKEIHFQRRRTTCALTLEAGEKLLLTTDLKTKESVGRRISQLQDSWKDMEPQLAEMIKQFQSTVETWDQCEKKIKELKSRLQVLKAQSEDPLPELHEDLHNEKELIKELEQSLASWTQNLKELQTMKADLTRHVLVEDVMVLKEQIEHLHRQWEDLCLRVAIRKQEIEDRLNTWVVFNEKNKELCAWLVQMENKVLQTADISIEEMIEKLQKDCMEEINLFSENKLQLKQMGDQLIKASNKSRAAEIDDKLNKINDRWQHLFDVIGSRVKKLKETFAFIQQLDKNMSNLRTWLARIESELSKPVVYDVCDDQEIQKRLAEQQDLQRDIEQHSAGVESVFNICDVLLHDSDACANETECDSIQQTTRSLDRRWRNICAMSMERRMKIEETWRLWQKFLDDYSRFEDWLKSAERTAACPNSSEVLYTSAKEELKRFEAFQRQIHERLTQLELINKQYRRLARENRTDTASRLKQMVHEGNQRWDNLQRRVTAVLRRLRHFTNQREEFEGTRESILVWLTEMDLQLTNVEHFSESDADDKMRQLNGFQQEITLNTNKIDQLIVFGEQLIQKSEPLDAVLIEDELEELHRYCQEVFGRVSRFHRRLTSCTPGLEDEKEASENETDMEDPREIQTDSWRKRGESEEPSSPQSLCHLVAPGHERSGCETPVSVDSIPLEWDHTGDVGGSSSHEEDEEGPYYSALSDVEIPENPEAYLKMTTKTLKASSGKSISDGHSWHVPDSPSCPEHHYKQMEGDRNVPPVPPANLDHRFAGGVVRRGWFGLLPLFRNIQAEISFSQVVIKCAKYKPPLPRGTIYIWYSPLLRDRDLYILHVLTHACTRSQAHTI

SEQ ID NO: 865000 - protein, 209 aa, Homo sapiens
  misc_feature (2)..(2): Xaa can be any naturally occurring amino acid
  misc_feature (5)..(5): Xaa can be any naturally occurring amino acid
HXMPXLTLDHPTFLVLPGGQERFSLYQTRSLIHELKNKEIHFQRRRTTCALTLEAGEKLLLTTDLKTKESVGRRISQLQDSWKDMEPQLAEMIKQFQSTVETWDQCEKKIKELKSRLQVLKAQSEDPLPELHEDLHNEKELIKELEQSLASWTQNLKELQTMKADLTRHVLVEDVMVLKEQIEHLHRQWEDLCLRVSQLTAGHGCLGVD

SEQ ID NO: 865001 - protein, 127 aa, Homo sapiens
RVYLCLLWTPCALVLVSWCIYTAVLTHNCVLLTKPHPSQSRLDANPLSSLQACAEGIFHGACFDDFFLHLTEVLWHGPSFLHGGLVWNCFLALLGSPGGKGWGVGAVKGADDLPQEGKNLPFLDLQL

SEQ ID NO: 865002 - protein, 795 aa, Homo sapiens
MQSFCNFSIISSILMSAVCRTLFTICTSQAHNSLFFSLNTTHVLSLSSISCLRMATLKQRSSDACANETECDSIQQTTRSLDRRWRNICAMSMERRMKIEETWRLWQKFLDDYSRFEDWLKSAERTAACPNSSEVLYTSAKEELKRFEAFQRQIHERLTQLELINKQYRRLARENRTDTASRLKQMVHEGNQRWDNLQRRVTAVLRRLRHFTNQREEFEGTRESILVWLTEMDLQLTNVEHFSESDADDKMRQLNGFQQEITLNTNKIDQLIVFGEQLIQKSEPLDAVLIEDELEELHRYCQEVFGRVSRFHRRLTSCTPGLEDEKEASENETDMEDPREIQTDSWRKRGESEEPSSPQSLCHLVAPGHERSGCETPVSVDSIPLEWDHTGDVGGSSSHEEDEEGPYYSALSDVEIPENPEAYLKMTTKTLKASSGKSISDGHSWHVPDSPSCPEHHYKQMEGDRNVPPVPPASSTPYKPPYGKLLLPPGTDGGKEGPRVLNGNPQQEDGGLAGITEQQSGAFDRWEMIQAQELHNKLKIKQNLQQLNSDISAITTWLKKTEAELEMLKMAKPPSDIQEIELRVKRLQEILKAFDTYKALVVSVNVSSKEFLQTESPESTELQSRLRQLSLLWEAAQGAVDSWRGGLRQSLMQCQDFHQLSQNLLLWLASAKNRRQKAHVTDPKADPRALLECRRELMQLEKELVERQPQVDMLQEISNSLLIKGHGEDCIEAEEKVHVIEKKLKQLREQVSQDLMALQGTQNPASPLPSFDEVDSGDQPPATSVPAPRAKSSEQ

SEQ ID NO: 865003 - protein, 461 aa, Homo sapiens
MEDPREIQTDSWRKRGESEEPSSPQSLCHLVAPGHERSGCETPVSVDSIPLEWDHTGDVGGSSSHEEDEEGPYYSALSDVEIPENPEAYLKMTTKTLKASSGKSISDGHSWHVPDSPSCPEHHYKQMEGDRNVPPVPPASSTPYKPPYGKLLLPPGTDGGKEGPRVLNGNPQQEDGGLAGITEQQSGAFDRWEMIQAQELHNKLKIKQNLQQLNSDISAITTWLKKTEAELEMLKMAKPPSDIQEIELRVKRLQEILKAFDTYKALVVSVNVSSKEFLQTESPESTELQSRLRQLSLLWEAAQGAVDSWRGGLRQSLMQCQDFHQLSQNLLLWLASAKNRRQKAHVTDPKADPRALLECRRELMQLEKELVERQPQVDMLQEISNSLLIKGHGEDCIEAEEKVHVIEKKLKQLREQVSQDLMALQGTQNPASPLPSFDEVDSGDQPPATSVPAPRAKSSEQ

SEQ ID NO: 865004 - protein, 582 aa, Homo sapiens
  misc_feature (2)..(2): Xaa can be any naturally occurring amino acid
  misc_feature (5)..(5): Xaa can be any naturally occurring amino acid
HXMPXLTLDHPTFLVLPGGQERFSLYQTRSLIHELKNKEIHFQRRRTTCALTLEAGEKLLLTTDLKTKESVGRRISQLQDSWKDMEPQLAEMIKQFQSTVETWDQCEKKIKELKSRLQVLKAQSEDPLPELHEDLHNEKELIKELEQSLASWTQNLKELQTMKADLTRHVLVEDVMVLKEQIEHLHRQWEDLCLRVAIRKQEIEDRLNTWVVFNEKNKELCAWLVQMENKVLQTADISIEEMIEKLQKDCMEEINLFSENKLQLKQMGDQLIKASNKSRAAEIDDKLNKINDRWQHLFDVIGSRVKKLKETFAFIQQLDKNMSNLRTWLARIESELSKPVVYDVCDDQEIQKRLAEQQDLQRDIEQHSAGVESVFNICDVLLHDSDACANETECDSIQQTTRSLDRRWRNICAMSMERRMKIEETWRLWQKFLDDYSRFEDWLKSAERTAACPNSSEVLYTSAKEELKRFEAFQRQIHERLTQLELINKQYRRLARENRTDTASRLKQMVHEGNQRWDNLQRRVTAVLRRLRHFTNQREEFEGTRESILVWLTEMDYSCTQANNFARSFYPMLRYTNGPPPT

SEQ ID NO: 865005 - protein, 1118 aa, Homo sapiens; identical to SEQ ID NO: 864993
  misc_feature (2)..(2): Xaa can be any naturally occurring amino acid
  misc_feature (5)..(5): Xaa can be any naturally occurring amino acid

SEQ ID NO: 865006 - protein, 1118 aa, Homo sapiens; identical to SEQ ID NO: 864993
  misc_feature (2)..(2): Xaa can be any naturally occurring amino acid
  misc_feature (5)..(5): Xaa can be any naturally occurring amino acid

SEQ ID NO: 865007 - protein, 1135 aa, Homo sapiens
  misc_feature (2)..(2): Xaa can be any naturally occurring amino acid
  misc_feature (5)..(5): Xaa can be any naturally occurring amino acid
HXMPXLTLDHPTFLVLPGGQERFSLYQTRSLIHELKNKEIHFQRRRTTCALTLEAGEKLLLTTDLKTKESVGRRISQLQDSWKDMEPQLAEMIKQFQSTVETWDQCEKKIKELKSRLQVLKAQSEDPLPELHEDLHNEKELIKELEQSLASWTQNLKELQTMKADLTRHVLVEDVMVLKEQIEHLHRQWEDLCLRVAIRKQEIEDRLNTWVVFNEKNKELCAWLVQMENKVLQTADISIEEMIEKLQKDCMEEINLFSENKLQLKQMGDQLIKASNKSRAAEIDDKLNKINDRWQHLFDVIGSRVKKLKETFAFIQQLDKNMSNLRTWLARIESELSKPVVYDVCDDQEIQKRLAEQQDLQRDIEQHSAGVESVFNICDVLLHDSDACANETECDSIQQTTRSLDRRWRNICAMSMERRMKIEETWRLWQKFLDDYSRFEDWLKSAERTAACPNSSEVLYTSAKEELKRFEAFQRQIHERLTQLELINKQYRRLARENRTDTASRLKQMVHEGNQRWDNLQRRVTAVLRRLRHFTNQREEFEGTRESILVWLTEMDLQLTNVEHFSESDADDKMRQLNGFQQEITLNTNKIDQLIVFGEQLIQKSEPLDAVLIEDELEELHRYCQEVFGRVSRFHRRLTSCTPGLEDEKEASENETDMEDPREIQTDSWRKRGESEEPSSPQSLCHLVAPGHERSGCETPVSVDSIPLEWDHTGDVGGSSSHEEDEEGPYYSALSDVEIPENPEAYLKMTTKTLKASSGKSISDGHSWHVPDSPSCPEHHYKQMEGDRNVPPVPPASSTPYKPPYGKLLLPPGTDGGKEGPRVLNGNPQQEDGGLAGITEQQSGAFDRWEMIQAQELHNKLKIKQNLQQLNSDISAITTWLKKTEAELEMLKMAKPPSDIQEIELRVKRLQEILKAFDTYKALVVSVNVSSKEFLQTESPESTELQSRLRQLSLLWEAAQGAVDSWRGGLRQSLMQCQDFHQLSQNLLLWLASAKNRRQKAHVTDPKADPRALLECRRELMQLEKELVERQPQVDMLQEISNSLLIKGHGEDCIEEFRAVRTTEGEEETESRVPGSTRPQRSFLSRVVRAALPLQLLLLLLLLLACLLPSSEEDYSCTQANNFARSFYPMLRPPS

SEQ ID NO: 865008 - protein, 831 aa, Homo sapiens
  misc_feature (2)..(2): Xaa can be any naturally occurring amino acid
  misc_feature (5)..(5): Xaa can be any naturally occurring amino acid
HXMPXLTLDHPTFLVLPGGQERFSLYQTRSLIHELKNKEIHFQRRRTTCALTLEAGEKLLLTTDLKTKESVGRRISQLQDSWKDMEPQLAEMIKQFQSTVETWDQCEKKIKELKSRLQVLKAQSEDPLPELHEDLHNEKELIKELEQSLASWTQNLKELQTMKADLTRHVLVEDVMVLKEQIEHLHRQWEDLCLRVAIRKQEIEDRLNTWVVFNEKNKELCAWLVQMENKVLQTADISIEEMIEKLQKDCMEEINLFSENKLQLKQMGDQLIKASNKSRAAEIDDKLNKINDRWQHLFDVIGSRVKKLKETFAFIQQLDKNMSNLRTWLARIESELSKPVVYDVCDDQEIQKRLAEQQDLQRDIEQHSAGVESVFNICDVLLHDSDACANETECDSIQQTTRSLDRRWRNICAMSMERRMKIEETWRLWQKFLDDYSRFEDWLKSAERTAACPNSSEVLYTSAKEELKRFEAFQRQIHERLTQLELINKQYRRLARENRTDTASRLKQMVHEGNQRWDNLQRRVTAVLRRLRHFTNQREEFEGTRESILVWLTEMDLQLTNVEHFSESDADDKMRQLNGFQQEITLNTNKIDQLIVFGEQLIQKSEPLDAVLIEDELEELHRYCQEVFGRVSRFHRRLTSCTPGLEDEKEASENETDMEDPREIQTDSWRKRGESEEPSSPQSLCHLVAPGHERSGCETPVSVDSIPLEWDHTGDVGGSSSHEEDEEGPYYSALSDVEIPENPEAYLKMTTKTLKASSGKSISDGHSWHVPDSPSCPEHHYKQMEGDRNVPPVPPASSTPYKPPYVSLNFTGSTAYVCESYLHLQEREILV

SEQ ID NO: 865009 - protein, 210 aa, Homo sapiens
MSTKVPIYLKRGSRKGKKEKLRDLLSSDMISPPLGDFRHTIHIGSGGGSDMFGDISFLQGKFHLLPGTMVEGPEEDGTFDLPFQFTRTATVCGRELPDGPSPLLKNAISLPVIGGPQALTLPTAQAPPKPPRLHLETPQPSPQEGGSVDIWRIPETGSPNSGLTPESGAEEPFLSNASSLLSLHVDLGPSILDDVLQIMDQDLDSMQIPT

SEQ ID NO: 865010 - protein, 115 aa, Homo sapiens
EFGLGFSQLRGGPPRGPSLWRPAPARALALPLTSLSSFRGLLGLHGASHPHLGSRSLARARHGPWGRNASRPRIPRSALHFVSGPPPPSRDPGVPRRPASPPGLGAVFLADSELF

SEQ ID NO: 865011 - protein, 210 aa, Homo sapiens; identical to SEQ ID NO: 865009

SEQ ID NO: 865012 - protein, 810 aa, Homo sapiens
MKLLKPTWVNHNGKPIFSVDIHPDGTKFATGGQGQDSGKVVIWNMSPVLQEDDEKDENIPKMLCQMDNHLACVNCVRWSNSGMYLASGGDDKLIMVWKRATYIGPSTVFGSSGKLANVEQWRCVSILRNHSGDVMDVAWSPHDAWLASCSVDNTVVIWNAVKFPEILATLRGHSGLVKGLTWDPVGKYIASQADDRSLKVWRTLDWQLETSITKPFDECGGTTHVLRLSWSPDGHYLVSAHAMNNSGPTAQIIEREGWKTNMDFVGHRKAVTVVKFNPKIFKKKQKNGSSAKPSCPYCCCAVGSKDRSLSVWLTCLKRPLVVIHELFDKSIMDISWTLNGLGILVCSMDGSVAFLDFSQDELGDPLSEEEKSRIHQSTYGKSLAIMTEAQLSTAVIENPEMLKYQRRQQQQQLDQKSAATREMGSATSVAGVVNGESLEDIRKNLLKKQVETRTADGRRRITPLCIAQLDTGDFSTAFFNSIPLSGSLAGTMLSSHSSPQLLPLDSSTPNSFGASKPCTEPVVAASARPAGDSVNKDSMNATSTPAALSPSVLTTPSKIEPMKAFDSRFTERSKATPGAPALTSMTPTAVERDVHRQVVVVKEESLHSILAGSDMTVSQILLTQHGIPVMNLSDGKAYCFNPSLSTWNLVSDKQDSLAQCADFRSSLPSQDAMLCSGPLAIIQGRTSNSGRQAARLFSVPHVVQQETTLAYLENQVAAALTLQSSHEYRHWLLVYARYLVNEGFEYRLREICKDLLGPVHYSTGSQWESTVVGLRKRELLKELLPVIGQNLRFQRLFTECQEQLDILRDK

SEQ ID NO: 865013 - protein, 526 aa, Homo sapiens
MLSSHSSPQLLPLDSSTPNSFGASKPCTEPVVAASARPAGDSVNKDSMNATSTPAALSPSVLTTPSKIEPMKAFDSRFTERSKATPGAPALTSMTPTAVERLKEQNLVKELRPRDLLESSSDSDEKVPLAKASSLSKRKLELEVETVEKKKKGRPRKDSRLMPVSLSVQSPAALTAEKEAMCLSAPALALKLPIPSPQRAFTLQVSSDPSMYIEVENEVTVVGGVKLSRLKCNREGKEWETVLTSRILTAAGSCDVVCVACEKRMLSVFSTCGRRLLSPILLPSPISTLHCTGSYVMALTAAATLSVWDVHRQVVVVKEESLHSILAGSDMTVSQILLTQHGIPVMNLSDGKAYCFNPSLSTWNLVSDKQDSLAQCADFRSSLPSQDAMLCSGPLAIIQGRTSNSGRQAARLFSVPHVVQQETTLAYLENQVAAALTLQSSHEYRHWLLVYARYLVNEGFEYRLREICKDLLGPVHYSTGSQWESTVVGLRKRELLKELLPVIGQNLRFQRLFTECQEQLDILRDK

SEQ ID NO: 865014 - protein, 236 aa, Homo sapiens
MSSNHGARALTVQHISVWDVHRQVVVVKEESLHSILAGSDMTVSQILLTQHGIPVMNLSDGKAYCFNPSLSTWNLVSDKQDSLAQCADFRSSLPSQDAMLCSGPLAIIQGRTSNSGRQAARLFSVPHVVQQETTLAYLENQVAAALTLQSSHEYRHWLLVYARYLVNEGFEYRLREICKDLLGPVHYSTGSQWESTVVGLRKRELLKELLPVIGQNLRFQRLFTECQEQLDILRDK

SEQ ID NO: 865015 - protein, 576 aa, Homo sapiens
MKLLKPTWVNHNGKPIFSVDIHPDGTKFATGGQGQDSGKVVIWNMSPVLQEDDEKDENIPKMLCQMDNHLACVNCVRWSNSGMYLASGGDDKLIMVWKRATYIGPSTVFGSSGKLANVEQWRCVSILRNHSGDVMDVAWSPHDAWLASCSVDNTVVIWNAVKFPEILATLRGHSGLVKGLTWDPVGKYIASQADDRSLKVWRTLDWQLETSITKPFDECGGTTHVLRLSWSPDGHYLVSAHAMNNSGPTAQIIEREGWKTNMDFVGHRKAVTVVKFNPKIFKKKQKNGSSAKPSCPYCCCAVGSKDRSLSVWLTCLKRPLVVIHELFDKSIMDISWTLNGLGILVCSMDGSVAFLDFSQDELGDPLSEEEKSRIHQSTYGKSLAIMTEAQLSTAVIENPEMLKYQRRQQQQQLDQKSAATREMGSATSVAGVVNGESLEDIRKNLLKKQVETRTADGRRRITPLCIAQLDTGDFSTAFFNSIPLSGSLAGTMLSSHSSPQLLPLDSSTPNSFGASKPCTEPVVAASARPAGDSVNKDRLVGAKACSCPWGKFRFAHSFEDREFYSVCTLWPLQSKK

SEQ ID NO: 865016 - protein, 1017 aa, Homo sapiens
MKLLKPTWVNHNGKPIFSVDIHPDGTKFATGGQGQDSGKVVIWNMSPVLQEDDEKDENIPKMLCQMDNHLACVNCVRWSNSGMYLASGGDDKLIMVWKRATYIGPSTVFGSSGKLANVEQWRCVSILRNHSGDVMDVAWSPHDAWLASCSVDNTVVIWNAVKFPEILATLRGHSGLVKGLTWDPVGKYIASQADDRSLKVWRTLDWQLETSITKPFDECGGTTHVLRLSWSPDGHYLVSAHAMNNSGPTAQIIEREGWKTNMDFVGHRKAVTVVKFNPKIFKKKQKNGSSAKPSCPYCCCAVGSKDRSLSVWLTCLKRPLVVIHELFDKSIMDISWTLNGLGILVCSMDGSVAFLDFSQDELGDPLSEEEKSRIHQSTYGKSLAIMTEAQLSTAVIENPEMLKYQRRQQQQQLDQKSAATREMGSATSVAGVVNGESLEDIRKNLLKKQVETRTADGRRRITPLCIAQLDTGDFSTAFFNSIPLSGSLAGTMLSSHSSPQLLPLDSSTPNSFGASKPCTEPVVAASARPAGDSVNKDSMNATSTPAALSPSVLTTPSKIEPMKAFDSRFTERSKATPGAPALTSMTPTAVERLKEQNLVKELRPRDLLESSSDSDEKVPLAKASSLSKRKLELEVETVEKKKKGRPRKDSRLMPVSLSVQSPAALTAEKEAMCLSAPALALKLPIPSPQRAFTLQVSSDPSMYIEVENEVTVVGGVKLSRLKCNREGKEWETVLTSRILTAAGSCDVVCVACEKRMLSVFSTCGRRLLSPILLPSPISTLHCTGSYVMALTAAATLSVWDVHRQVVVVKEESLHSILAGSDMTVSQILLTQHGIPVMNLSDGKAYCFNPSLSTWNLVSDKQDSLAQCADFRSSLPSQDAMLCSGPLAIIQGRTSNSGRQAARLFSVPHVVQQETTLAYLENQVAAALTLQSSHEYRHWLLVYARYLVNEGFEYRLREICKDLLGPVHYSTGSQWESTVVGLRKRELLKELLPVIGQNLRFQRLFTECQEQLDILRDK

SEQ ID NO: 865017 - protein, 1017 aa, Homo sapiens; identical to SEQ ID NO: 865016

SEQ ID NO: 865018 - protein, 883 aa, Homo sapiens [sequence omitted]

SEQ ID NO: 865019 - protein, 1040 aa, Homo sapiens
MKLLKPTWVNHNGKPIFSVDIHPDGTKFATGGQGQDSGKVVIWNMSPVLQEDDEKDENIPKMLCQMDNHLACVNCVRWSNSGMYLASGGDDKLIMVWKRATYIGPSTVFGSSGKLANVEQWRCVSILRNHSGELPTLLLFVLLNRISTFISGSQVHVMDVAWSPHDAWLASCSVDNTVVIWNAVKFPEILATLRGHSGLVKGLTWDPVGKYIASQADDRSLKVWRTLDWQLETSITKPFDECGGTTHVLRLSWSPDGHYLVSAHAMNNSGPTAQIIEREGWKTNMDFVGHRKAVTVVKFNPKIFKKKQKNGSSAKPSCPYCCCAVGSKDRSLSVWLTCLKRPLVVIHELFDKSIMDISWTLNGLGILVCSMDGSVAFLDFSQDELGDPLSEEEKSRIHQSTYGKSLAIMTEAQLSTAVIENPEMLKYQRRQQQQQLDQKSAATREMGSATSVAGVVNGESLEDIRKNLLKKQVETRTADGRRRITPLCIAQLDTGDFSTAFFNSIPLSGSLAGTMLSSHSSPQLLPLDSSTPNSFGASKPCTEPVVAASARPAGDSVNKDSMNATSTPAALSPSVLTTPSKIEPMKAFDSRFTERSKATPGAPALTSMTPTAVERLKEQNLVKELRPRDLLESSSDSDEKVPLAKASSLSKRKLELEVETVEKKKKGRPRKDSRLMPVSLSVQSPAALTAEKEAMCLSAPALALKLPIPSPQRAFTLQVSSDPSMYIEVENEVTVVGGVKLSRLKCNREGKEWETVLTSRILTAAGSCDVVCVACEKRMLSVFSTCGRRLLSPILLPSPISTLHCTGSYVMALTAAATLSVWDVHRQVVVVKEESLHSILAGSDMTVSQILLTQHGIPVMNLSDGKAYCFNPSLSTWNLVSDKQDSLAQCADFRSSLPSQDAMLCSGPLAIIQGRTSNSGRQAARLFSVPHVVQQETTLAYLENQVAAALTLQSSHEYRHWLLVYARYLVNEGFEYRLREICKDLLGPVHYSTGSQWESTVVGLRKRELLKELLPVIGQNLRFQRLFTECQEQLDILRDK

SEQ ID NO: 865020 - protein, 805 aa, Homo sapiens
CRCFFQCGGTTHVLRLSWSPDGHYLVSAHAMNNSGPTAQIIEREGWKTNMDFVGHRKAVTVVKFNPKIFKKKQKNGSSAKPSCPYCCCAVGSKDRSLSVWLTCLKRPLVVIHELFDKSIMDISWTLNGLGILVCSMDGSVAFLDFSQDELGDPLSEEEKSRIHQSTYGKSLAIMTEAQLSTAVIENPEMLKYQRRQQQQQLDQKSAATREMGSATSVAGVVNGESLEDIRKNLLKKQVETRTADGRRRITPLCIAQLDTGDFSTAFFNSIPLSGSLAGTMLSSHSSPQLLPLDSSTPNSFGASKPCTEPVVAASARPAGDSVNKDSMNATSTPAALSPSVLTTPSKIEPMKAFDSRFTERSKATPGAPALTSMTPTAVERLKEQNLVKELRPRDLLESSSDSDEKVPLAKASSLSKRKLELEVETVEKKKKGRPRKDSRLMPVSLSVQSPAALTAEKEAMCLSAPALALKLPIPSPQRAFTLQVSSDPSMYIEVENEVTVVGGVKLSRLKCNREGKEWETVLTSRILTAAGSCDVVCVACEKRMLSVFSTCGRRLLSPILLPSPISTLHCTGSYVMALTAAATLSVWDVHRQVVVVKEESLHSILAGSDMTVSQILLTQHGIPVMNLSDGKAYCFNPSLSTWNLVSDKQDSLAQCADFRSSLPSQDAMLCSGPLAIIQGRTSNSGRQAARLFSVPHVVQQETTLAYLENQVAAALTLQSSHEYRHWLLVYARYLVNEGFEYRLREICKDLLGPVHYSTGSQWESTVVGLRKRELLKELLPVIGQNLRFQRLFTECQEQLDILRDK

SEQ ID NO: 865021 - protein, 733 aa, Homo sapiens
MKLLKPTWVNHNGKPIFSVDIHPDGTKFATGGQGQDSGKVVIWNMSPVLQEDDEKDENIPKMLCQMDNHLACVNCVRWSNSGMYLASGGDDKLIMVWKRATYIGPSTVFGSSGKLANVEQWRCVSILRNHSGDVMDVAWSPHDAWLASCSVDNTVVIWNAVKFPEILATLRGHSGLVKGLTWDPVGKYIASQADDRSLKVWRTLDWQLETSITKPFDECGGTTHVLRLSWSPDGHYLVSAHAMNNSGPTAQIIEREGWKTNMDFVGHRKAVTVVKFNPKIFKKKQKNGSSAKPSCPYCCCAVGSKDRSLSVWLTCLKRPLVVIHELFDKSIMDISWTLNGLGILVCSMDGSVAFLDFSQDELGDPLSEEEKSRIHQSTYGKSLAIMTEAQLSTAVIENPEMLKYQRRQQQQQLDQKSAATREMGSATSVAGVVNGESLEDIRKNLLKKQVETRTADGRRRITPLCIAQLDTGDFSTAFFNSIPLSGSLAGTMLSSHSSPQLLPLDSSTPNSFGASKPCTEPVVAASARPAGDSVNKDSMNATSTPAALSPSVLTTPSKIEPMKAFDSRFTERSKATPGAPALTSMTPTAVERLKEQNLVKELRPRDLLESSSDSDEKVPLAKASSLSKRKLELEVETVEKKKKGRPRKDSRLMPVSLSVQSPAALTAEKEAMCLSAPALALKLPIPSPQRAFTLQGLRKRELLKELLPVIGQNLRFQRLFTECQEQLDILRDK

SEQ ID NO: 865022 - protein, 699 aa, Homo sapiens
MKLLKPTWVNHNGKPIFSVDIHPDGTKFATGGQGQDSGKVVIWNMSPVLQEDDEKDENIPKMLCQMDNHLACVNCVRWSNSGMYLASGGDDKLIMVWKRATYIGPSTVFGSSGKLANVEQWRCVSILRNHSGDVMDVAWSPHDAWLASCSVDNTVVIWNAVKFPEILATLRGHSGLVKGLTWDPVGKYIASQADDRSLKVWRTLDWQLETSITKPFDECGGTTHVLRLSWSPDGHYLVSAHAMNNSGPTAQIIEREGWKTNMDFVGHRKAVTVVKFNPKIFKKKQKNGSSAKPSCPYCCCAVGSKDRSLSVWLTCLKRPLVVIHELFDKSIMDISWTLNGLGILVCSMDGSVAFLDFSQDELGDPLSEEEKSRIHQSTYGKSLAIMTEAQLSTAVIENPEMLKYQRRQQQQQLDQKSAATREMGSATSVAGVVNGESLEDIRKNLLKKQVETRTADGRRRITPLCIAQLDTGDFSTAFFNSIPLSGSLAGTMLSSHSSPQLLPLDSSTPNSFGASKPCTEPVVAASARPAGDSVNKDSMNATSTPAALSPSVLTTPSKIEPMKAFDSRFTERSKATPGAPALTSMTPTAVERLKEQNLVKELRPRDLLESSSDSDEKVPLAKASSLSKRKLELEVETVEKKKKGRPRKDSRLMPVSLSVQSPAALTAEKEAMCPSREPERRDALFSIAVTQLLPLDSVQ

SEQ ID NO: 865023 - protein, 548 aa, Homo sapiens
MKLLKPTWVNHNGKPIFSVDIHPDGTKFATGGQGQDSGKVVIWNMSPVLQEDDEKDENIPKMLCQMDNHLACVNCVRWSNSGMYLASGGDDKLIMVWKRATYIGPSTVFGSSGKLANVEQWRCVSILRNHSGDVMDVAWSPHDAWLASCSVDNTVVIWNAVKFPEILATLRGHSGLVKGLTWDPVGKYIASQADDRSLKVWRTLDWQLETSITKPFDECGGTTHVLRLSWSPDGHYLVSAHAMNNSGPTAQIIEREGWKTNMDFVGHRKAVTVVKFNPKIFKKKQKNGSSAKPSCPYCCCAVGSKDRSLSVWLTCLKRPLVVIHELFDKSIMDISWTLNGLGILVCSMDGSVAFLDFSQDELGDPLSEEEKSRIHQSTYGKSLAIMTEAQLSTAVIENPEMLKYQRRQQQQQLDQKSAATREMGSATSVAGVVNGESLEDIRKNLLKKQVETRTADGRRRITPLCIAQLDTGDFSTAFFNSIPLSGSLAGTMLSSHSSPQLLPLDSSTPNSFGASKPCTEPVVAASARPAGDSVNKDSMNASVEVGLP

SEQ ID NO: 865024 - protein, 509 aa, Homo sapiens
MKLLKPTWVNHNGKPIFSVDIHPDGTKFATGGQGQDSGKVVIWNMSPVLQEDDEKDENIPKMLCQMDNHLACVNCVRWSNSGMYLASGGDDKLIMVWKRATYIGPSTVFGSSGKLANVEQWRCVSILRNHSGDVMDVAWSPHDAWLASCSVDNTVVIWNAVKFPEILATLRGHSGLVKGLTWDPVGKYIASQADDRSLKVWRTLDWQLETSITKPFDECGGTTHVLRLSWSPDGHYLVSAHAMNNSGPTAQIIEREGWKTNMDFVGHRKAVTVVKFNPKIFKKKQKNGSSAKPSCPYCCCAVGSKDRSLSVWLTCLKRPLVVIHELFDKSIMDISWTLNGLGILVCSMDGSVAFLDFSQDELGDPLSEEEKSRIHQSTYGKSLAIMTEAQLSTAVIENPEMLKYQRRQQQQQLDQKSAATREMGSATSVAGVVNGESLEDIRKNLLKKQVETRTADGRRRITPLCIAQLDTGYWFIPLSWSYLARSSCLLSAVNTFTVRIFTGPSQPDW

SEQ ID NO: 865025 - protein, 1328 aa, Homo sapiens
TGGGGAESHRGARAGLVAASVGERGPRRCSAVGLPSPGPPPWSLARALAAAGPGSARPEKAAGPGHGGLGQRGRSSTMRRGGWRKRAENDGWETWGGYMAAKVQKLEEQFRSDAAMQKDGTSSTIFSGVAIYVNGYTDPSAEELRKLMMLHGGQYHVYYSRSKTTHIIATNLPNAKIKELKGEKVIRPEWIVESIKAGRLLSYIPYQLYTKQSSVQKGLSFNPVCRPEDPLPGPSNIAKQLNNRVNHIVKKIETENEVKVNGMNSWNEEDENNDFSFVDLEQTSPGRKQNGIPHPRGSTAIFNGHTPSSNGALKTQDCLVPMVNSVASRLSPAFSQEEDKAEKSSTDFRDCTLQQLQQSTRNTDALRNPHRTNSFSLSPLHSNTKINGAHHSTVQGPSSTKSTSSVSTFSKAAPSVPSKPSDCNFISNFYSHSRLHHISMWKCELTEFVNTLQRQSNGIFPGREKLKKMKTGRSALVVTDTGDMSVLNSPRHQSCIMHVDMDCFFVSVGIRNRPDLKGKPVAVTSNRGTGRAPLRPGANPQLEWQYYQNKILKGKAADIPDSSLWENPDSAQANGIDSVLSRAEIASCSYEARQLGIKNGMFFGHAKQLCPNLQAVPYDFHAYKEVAQTLYETLASYTHNIEAVSCDEALVDITEILAETKLTPDEFANAVRMEIKDQTKCAASVGIGSNILLARMATRKAKPDGQYHLKPEEVDDFIRGQLVTNLPGVGHSMESKLASLGIKTCGDLQYMTMAKLQKEFGPKTGQMLYRFCRGLDDRPVRTEKERKSVSAEINYGIRFTQPKEAEAFLLSLSEEIQRRLEATGMKGKRLTLKIMVRKPGAPVETAKFGGHGICDNIARTVTLDQATDNAKIIGKAMLNMFHTMKLNISDMRGVGIHVNQLVPTNLNPSTCPSRPSVQSSHFPSGSYSVRDVFQVQKAKKSTEEEHKEVFRAAVDLEISSASRTCTFLPPFPAHLPTSPDTNKAESSGKWNGLHTPVSVQSRLNLSIEVPSPSQLDQSVLEALPPDLREQVEQVCAVQQAESHGDKKKEPVNGCNTGILPQPVGTVLLQIPEPQESNSDAGINLIALPAFSQVDPEVFAALPAELQRELKAAYDQRQRQGENSTHQQSASASVPKNPLLHLKAAVKEKKRNKKKKTIGSPKRIQSPLNNKLLNSPAKTLPGACGSPQKLIDGFLKHEGPPAEKPLEELSASTSGVPGLSSLQSDPAGCVRPPAPNLAGAVEFNDVKTLLREWITTISDPMEEDILQVVKYCTDLIEEKDLEKLDLVIKYMKRLMQQSVESVWNMAFDFILDNVQVVLQQTYGSTLKVT

SEQ ID NO: 865026 - protein, 392 aa, Homo sapiens
MAAKVQKLEEQFRSDAAMQKDGTSSTIFSGVAIYVNGYTDPSAEELRKLMMLHGGQYHVYYSRSKTTHIIATNLPNAKIKELKGEKVIRPEWIVESIKAGRLLSYIPYQLYTKQSSVQKGLSFNPVCRPEDPLPGPSNIAKQLNNRVNHIVKKIETENEVKVNGMNSWNEEDENNDFSFVDLEQTSPGRKQNGIPHPRGSTAIFNGHTPSSNGALKTQDCLVPMVNSVASRLSPAFSQEEDKAEKSSTDFRDCTLQQLQQSTRNTDALRNPHRTNSFSLSPLHSNTKINGAHHSTVQGPSSTKSTSSVSTFSKAAPSVPSKPSDCNFISNFYSHSRLHHISMWKCELTEFVNTLQRQSNGIFPGREKLKKMKTGRSALVVTDTGRYLLKLSS

SEQ ID NO: 865027 - protein, 1165 aa, Homo sapiens
MAAKVQKLEEQFRSDAAMQKDGTSSTIFSGVAIYVNGYTDPSAEELRKLMMLHGGQYHVYYSRSKTTHIIATNLPNAKIKELKGEKVIRPEWIVESIKAGRLLSYIPYQLYTKQSSVQKGLSFNPVCRPEDPLPGPSNIAKQLNNRVNHIVKKIETENEVKVNGMNSWNEEDENNDFSFVDLEQTSPGRKQNGIPHPRGSTAIFNGHTPSSNGALKTQDCLVPMVNSVASRLSPAFSQEEDKAEKSSTDFRDCTLQQLQQSTRNTDALRNPHRTNSFSLSPLHSNTKINGAHHSTVQGPSSTKSTSSVSTFSKAAPSVPSKPSDCNFISNFYSHSRLHHISMWKCELTEFVNTLQRQSNGIFPGREKLKKMKTGRSALVVTDTGDMSVLNSPRHQSCIMHVDMDCFFVSVGIRNRPDLKGKPVAVTSNRGTGRAPLRPGANPQLEWQYYQNKILKGKAADIPDSSLWENPDSAQANGIDSVLSRAEIASCSYEARQLGIKNGMFFGHAKQLCPNLQAVPYDFHAYKEVAQTLYETLASYTHNIEAVSCDEALVDITEILAETKLTPDEFANAVRMEIKDQTKCAASVGIGSNILLARMATRKAKPDGQYHLKPEEVDDFIRGQLVTNLPGVGHSMESKLASLGIKTCGDLQYMTMAKLQKEFGPKTGQMLYRFCRGLDDRPVRTEKERKSVSAEINYGIRFTQPKEAEAFLLSLSEEIQRRLEATGMKGKRLTLKIMVRKPGAPVETAKFGGHGICDNIARTVTLDQATDNAKIIGKAMLNMFHTMKLNISDMRGVGIHVNQLVPTNLNPSTCPSRPSVQSSHFPSGSYSVRDVFQVQKAKKSTEEEHKEVFRAAVDLEISSASRTCTFLPPFPAHLPTSPDTNKAESSGKWNGLHTPVSVQSRLNLSIEVPSPSQLDQSVLEALPPDLREQVEQVCAVQQAESHGDKKKEPVNGCNTGILPQPVGTVLLQIPEPQESNSDAGINLIALPAFSQVDPEVFAALPAELQRELKAAYDQRQRQGENSTHQQSASASVPKNPLLHLKAAVKEKKRNKKKKTIGSPKRIQSPLNNKLLNSPAKTLPGACGSPQKLIDGFLKHEGPPAEKPLEELSASTSGVPGLSSLQSDPAGCVRPPAPNLAGAVEFNDVKTLLREWITTISGWLGLC

SEQ ID NO: 865028 - protein, 1110 aa, Homo sapiens
MAAKVQKLEEQFRSDAAMQKDGTSSTIFSGVAIYVNGYTDPSAEELRKLMMLHGGQYHVYYSRSKTTHIIATNLPNAKIKELKGEKVIRPEWIVESIKAGRLLSYIPYQLYTKQSSVQKGLSFNPVCRPEDPLPGPSNIAKQLNNRVNHIVKKIETENEVKVNGMNSWNEEDENNDFSFVDLEQTSPGRKQNGIPHPRGSTAIFNGHTPSSNGALKTQDCLVPMVNSVASRLSPAFSQEEDKAEKSSTDFRDCTLQQLQQSTRNTDALRNPHRTNSFSLSPLHSNTKINGAHHSTVQGPSSTKSTSSVSTFSKAAPSVPSKPSDCNFISNFYSHSRLHHISMWKCELTEFVNTLQRQSNGIFPGREKLKKMKTGRSALVVTDTGDMSVLNSPRHQSCIMHVDMDCFFVSVGIRNRPDLKGKPVAVTSNRGTGRAPLRPGANPQLEWQYYQNKILKGKAADIPDSSLWENPDSAQANGIDSVLSRAEIASCSYEARQLGIKNGMFFGHAKQLCPNLQAVPYDFHAYKEVAQTLYETLASYTHNIEAVSCDEALVDITEILAETKLTPDEFANAVRMEIKDQTKCAASVGIGSNILLARMATRKAKPDGQYHLKPEEVDDFIRGQLVTNLPGVGHSMESKLASLGIKTCGDLQYMTMAKLQKEFGPKTGQMLYRFCRGLDDRPVRTEKERKSVSAEINYGIRFTQPKEAEAFLLSLSEEIQRRLEATGMKGKRLTLKIMVRKPGAPVETAKFGGHGICDNIARTVTLDQATDNAKIIGKAMLNMFHTMKLNISDMRGVGIHVNQLVPTNLNPSTCPSRPSVQSSHFPSGSYSVRDVFQVQKAKKSTEEEHKEVFRAAVDLEISSASRTCTFLPPFPAHLPTSPDTNKAESSGKWNGLHTPVSVQSRLNLSIEVPSPSQLDQSVLEALPPDLREQVEQVCAVQQAESHGDKKKEPVNGCNTGILPQPVGTVLLQIPEPQESNSDAGINLIALPAFSQVDPEVFAALPAELQRELKAAYDQRQRQGENSTHQQSASASVPKNPLLHLKAAVKEKKRNKKKKTIGSPKRIQSPLNNKLLNSPAKTLPGACGSPQKLIDGFLKHEGPPAEKPLVIP

SEQ ID NO: 865029 - protein, 1140 aa, Homo sapiens
MAAKVQKLEEQFRSDAAMQKDGTSSTIFSGVAIYVNGYTDPSAEELRKLMMLHGGQYHVYYSRSKTTHIIATNLPNAKIKELKGEKVIRPEWIVESIKAGRLLSYIPYQLYTKQSSVQKGLSFNPVCRPEDPLPGPSNIAKQLNNRVNHIVKKIETENEVKVNGMNSWNEEDENNDFSFVDLEQTSPGRKQNGIPHPRGSTAIFNGHTPSSNGALKTQDCLVPMVNSVASRLSPAFSQEEDKAEKSSTDFRDCTLQQLQQSTRNTDALRNPHRTNSFSLSPLHSNTKINGAHHSTVQGPSSTKSTSSVSTFSKAAPSVPSKPSDCNFISNFYSHSRLHHISMWKCELTEFVNTLQRQSNGIFPGREKLKKMKTGRSALVVTDTGDMSVLNSPRHQSCIMHVDMDCFFVSVGIRNRPDLKGKPVAVTSNRGTGRAPLRPGANPQLEWQYYQNKILKGKAADIPDSSLWENPDSAQANGIDSVLSRAEIASCSYEARQLGIKNGMFFGHAKQLCPNLQAVPYDFHAYKEVAQTLYETLASYTHNIEAVSCDEALVDITEILAETKLTPDEFANAVRMEIKDQTKCAASVGIGSNILLARMATRKAKPDGQYHLKPEEVDDFIRGQLVTNLPGVGHSMESKLASLGIKTCGDLQYMTMAKLQKEFGPKTGQMLYRFCRGLDDRPVRTEKERKSVSAEINYGIRFTQPKEAEAFLLSLSEEIQRRLEATGMKGKRLTLKIMVRKPGAPVETAKFGGHGICDNIARTVTLDQATDNAKIIGKAMLNMFHTMKLNISDMRGVGIHVNQLVPTNLNPSTCPSRPSVQSSHFPSGSYSVRDVFQVQKAKKSTEEEHKEVFRAAVDLEISSASRTCTFLPPFPAHLPTSPDTNKAESSGKWNGLHTPVSVQSRLNLSIEVPSPSQLDQSVLEALPPDLREQVEQVCAVQQAESHGDKKKEPVNGCNTGILPQPVGTVLLQIPEPQESNSDAGINLIALPAFSQVDPEVFAALPAELQRELKAAYDQRQRQGENSTHQQSASASVPKNPLLHLKAAVKEKKRNKKKKTIGSPKRIQSPLNNKLLNSPAKTLPGACGSPQKLIDGFLKHEGPPAEKPLEELSASTSGVPGLSSLQSDPAGCVRPPSCEILY

SEQ ID NO: 865030 - protein, 752 aa, Homo sapiens
GRSHIRMLTASCSYEARQLGIKNGMFFGHAKQLCPNLQAVPYDFHAYKEVAQTLYETLASYTHNIEAVSCDEALVDITEILAETKLTPDEFANAVRMEIKDQTKCAASVGIGSNILLARMATRKAKPDGQYHLKPEEVDDFIRGQLVTNLPGVGHSMESKLASLGIKTCGDLQYMTMAKLQKEFGPKTGQMLYRFCRGLDDRPVRTEKERKSVSAEINYGIRFTQPKEAEAFLLSLSEEIQRRLEATGMKGKRLTLKIMVRKPGAPVETAKFGGHGICDNIARTVTLDQATDNAKIIGKAMLNMFHTMKLNISDMRGVGIHVNQLVPTNLNPSTCPSRPSVQSSHFPSGSYSVRDVFQVQKAKKSTEEEHKEVFRAAVDLEISSASRTCTFLPPFPAHLPTSPDTNKAESSGKWNGLHTPVSVQSRLNLSIEVPSPSQLDQSVLEALPPDLREQVEQVCAVQQAESHGDKKKEPVNGCNTGILPQPVGTVLLQIPEPQESNSDAGINLIALPAFSQVDPEVFAALPAELQRELKAAYDQRQRQGENSTHQQSASASVPKNPLLHLKAAVKEKKRNKKKKTIGSPKRIQSPLNNKLLNSPAKTLPGACGSPQKLIDGFLKHEGPPAEKPLEELSASTSGVPGLSSLQSDPAGCVRPPAPNLAGAVEFNDVKTLLREWITTISDPMEEDILQVVKYCTDLIEEKDLEKLDLVIKYMKRLMQQSVESVWNMAFDFILDNVQVVLQQTYGSTLKVT

SEQ ID NO: 865031 - protein, 930 aa, Homo sapiens
MAAKVQKLEEQFRSDAAMQKDGTSSTIFSGVAIYVNGYTDPSAEELRKLMMLHGGQYHVYYSRSKTTHIIATNLPNAKIKELKGEKVIRPEWIVESIKAGRLLSYIPYQLYTKQSSVQKGLSFNPVCRPEDPLPGPSNIAKQLNNRVNHIVKKIETENEVKVNGMNSWNEEDENNDFSFVDLEQTSPGRKQNGIPHPRGSTAIFNGHTPSSNGALKTQDCLVPMVNSVASRLSPAFSQEEDKAEKSSTDFRDCTLQQLQQSTRNTDALRNPHRTNSFSLSPLHSNTKINGAHHSTVQGPSSTKSTSSVSTFSKAAPSVPSKPSDCNFISNFYSHSRLHHISMWKCELTEFVNTLQRQSNGIFPGREKLKKMKTGRSALVVTDTGDMSVLNSPRHQSCIMHVDMDCFFVSVGIRNRPDLKGKPVAVTSNRGTGRAPLRPGANPQLEWQYYQNKILKGKAADIPDSSLWENPDSAQANGIDSVLSRAEIASCSYEARQLGIKNGMFFGHAKQLCPNLQAVPYDFHAYKEVAQTLYETLASYTHNIEAVSCDEALVDITEILAETKLTPDEFANAVRMEIKDQTKCAASVGIGSNILLARMATRKAKPDGQYHLKPEEVDDFIRGQLVTNLPGVGHSMESKLASLGIKTCGDLQYMTMAKLQKEFGPKTGQMLYRFCRGLDDRPVRTEKERKSVSAEINYGIRFTQPKEAEAFLLSLSEEIQRRLEATGMKGKRLTLKIMVRKPGAPVETAKFGGHGICDNIARTVTLDQATDNAKIIGKAMLNMFHTMKLNISDMRGVGIHVNQLVPTNLNPSTCPSRPSVQSSHFPSGSYSVRDVFQVQKAKKSTEEEHKEVFRAAVDLEISSASRTCTFLPPFPAHLPTSPDTNKAESSGKWNGLHTPVSVQSRLNLSIEVPSPSQVHFCSPKYKYILYS

SEQ ID NO: 865032 - protein, 120 aa, Homo sapiens
VLCINGGYFVLINLLLVAYSAYLTIFPFLGVGHSMESKLASLGIKTCGDLQYMTMAKLQKEFGPKTGQMLYRFCRGLDDRPVRTEKERKSVSAEINYGIRFTQVLIIEQILPSVALYIFT

SEQ ID NO: 865033 - protein, 1328 aa, Homo sapiens; identical to SEQ ID NO: 865025

SEQ ID NO: 865034 - protein, 1230 aa, Homo sapiens
MAAKVQKLEEQFRSDAAMQKDGTSSTIFSGVAIYVNGYTDPSAEELRKLMMLHGGQYHVYYSRSKTTHIIATNLPNAKIKELKGEKVIRPEWIVESIKAGRLLSYIPYQLYTKQSSVQKGLSFNPVCRPEDPLPGPSNIAKQLNNRVNHIVKKIETENEVKVNGMNSWNEEDENNDFSFVDLEQTSPGRKQNGIPHPRGSTAIFNGHTPSSNGALKTQDCLVPMVNSVASRLSPAFSQEEDKAEKSSTDFRDCTLQQLQQSTRNTDALRNPHRTNSFSLSPLHSNTKINGAHHSTVQGPSSTKSTSSVSTFSKAAPSVPSKPSDCNFISNFYSHSRLHHISMWKCELTEFVNTLQRQSNGIFPGREKLKKMKTGRSALVVTDTGDMSVLNSPRHQSCIMHVDMDCFFVSVGIRNRPDLKGKPVAVTSNRGTGRAPLRPGANPQLEWQYYQNKILKGKAADIPDSSLWENPDSAQANGIDSVLSRAEIASCSYEARQLGIKNGMFFGHAKQLCPNLQAVPYDFHAYKEVAQTLYETLASYTHNIEAVSCDEALVDITEILAETKLTPDEFANAVRMEIKDQTKCAASVGIGSNILLARMATRKAKPDGQYHLKPEEVDDFIRGQLVTNLPGVGHSMESKLASLGIKTCGDLQYMTMAKLQKEFGPKTGQMLYRFCRGLDDRPVRTEKERKSVSAEINYGIRFTQPKEAEAFLLSLSEEIQRRLEATGMKGKRLTLKIMVRKPGAPVETAKFGGHGICDNIARTVTLDQATDNAKIIGKAMLNMFHTMKLNISDMRGVGIHVNQLVPTNLNPSTCPSRPSVQSSHFPSGSYSVRDVFQVQKAKKSTEEEHKEVFRAAVDLEISSASRTCTFLPPFPAHLPTSPDTNKAESSGKWNGLHTPVSVQSRLNLSIEVPSPSQLDQSVLEALPPDLREQVEQVCAVQQAESHGDKKKEPVNGCNTGILPQPVGTVLLQIPEPQESNSDAGINLIALPAFSQVDPEVFAALPAELQRELKAAYDQRQRQGENSTHQQSASASVPKNPLLHLKAAVKEKKRNKKKKTIGSPKRIQSPLNNKLLNSPAKTLPGACGSPQKLIDGFLKHEGPPAEKPLEELSASTSGVPGLSSLQSDPAGCVRPPAPNLAGAVEFNDVKTLLREWITTISDPMEEDILQVVKYCTDLIEEKDLEKLDLVIKYMKRLMQQSVESVWNMAFDFILDNVQVVLQQTYGSTLKVT

SEQ ID NO: 865035 - protein, 1380 aa, Homo sapiens
TGGGGAESHRGARAGLVAASVGERGPRRCSAVGLPSPGPPPWSLARALAAAGPGSARPEKAAGPGHGGLGQRGRSSTMRRGGWRKRAENDGWETWGGYMAAKVQKLEEQFRSDAAMQKDGTSSTIFSGVAIYVNGYTDGFHASLHTEEYVRAFRSELQRALLTSSSRRAMYFPVPNFWSELVFKEQLVDDPSAEELRKLMMLHGGQYHVYYSRSKTTHIIATNLPNAKIKELKGEKVIRPEWIVESIKAGRLLSYIPYQLYTKQSSVQKGLSFNPVCRPEDPLPGPSNIAKQLNNRVNHIVKKIETENEVKVNGMNSWNEEDENNDFSFVDLEQTSPGRKQNGIPHPRGSTAIFNGHTPSSNGALKTQDCLVPMVNSVASRLSPAFSQEEDKAEKSSTDFRDCTLQQLQQSTRNTDALRNPHRTNSFSLSPLHSNTKINGAHHSTVQGPSSTKSTSSVSTFSKAAPSVPSKPSDCNFISNFYSHSRLHHISMWKCELTEFVNTLQRQSNGIFPGREKLKKMKTGRSALVVTDTGDMSVLNSPRHQSCIMHVDMDCFFVSVGIRNRPDLKGKPVAVTSNRGTGRAPLRPGANPQLEWQYYQNKILKGKAADIPDSSLWENPDSAQANGIDSVLSRAEIASCSYEARQLGIKNGMFFGHAKQLCPNLQAVPYDFHAYKEVAQTLYETLASYTHNIEAVSCDEALVDITEILAETKLTPDEFANAVRMEIKDQTKCAASVGIGSNILLARMATRKAKPDGQYHLKPEEVDDFIRGQLVTNLPGVGHSMESKLASLGIKTCGDLQYMTMAKLQKEFGPKTGQMLYRFCRGLDDRPVRTEKERKSVSAEINYGIRFTQPKEAEAFLLSLSEEIQRRLEATGMKGKRLTLKIMVRKPGAPVETAKFGGHGICDNIARTVTLDQATDNAKIIGKAMLNMFHTMKLNISDMRGVGIHVNQLVPTNLNPSTCPSRPSVQSSHFPSGSYSVRDVFQVQKAKKSTEEEHKEVFRAAVDLEISSASRTCTFLPPFPAHLPTSPDTNKAESSGKWNGLHTPVSVQSRLNLSIEVPSPSQLDQSVLEALPPDLREQVEQVCAVQQAESHGDKKKEPVNGCNTGILPQPVGTVLLQIPEPQESNSDAGINLIALPAFSQVDPEVFAALPAELQRELKAAYDQRQRQGENSTHQQSASASVPKNPLLHLKAAVKEKKRNKKKKTIGSPKRIQSPLNNKLLNSPAKTLPGACGSPQKLIDGFLKHEGPPAEKPLEELSASTSGVPGLSSLQSDPAGCVRPPAPNLAGAVEFNDVKTLLREWITTISDPMEEDILQVVKYCTDLIEEKDLEKLDLVIKYMKRLMQQSVESVWNMAFDFILDNVQVVLQQTYGSTLKVT

SEQ ID NO: 865036 - protein, 805 aa, Homo sapiens
MAAKVQKLEEQFRSDAAMQKDGTSSTIFSGVAIYVNGYTDPSAEELRKLMMLHGGQYHVYYSRSKTTHIIATNLPNAKIKELKGEKVIRPEWIVESIKAGRLLSYIPYQLYTKQSSVQKGLSFNPVCRPEDPLPGPSNIAKQLNNRVNHIVKKIETENEVKVNGMNSWNEEDENNDFSFVDLEQTSPGRKQNGIPHPRGSTAIFNGHTPSSNGALKTQDCLVPMVNSVASRLSPAFSQEEDKAEKSSTDFRDCTLQQLQQSTRNTDALRNPHRTNSFSLSPLHSNTKINGAHHSTVQGPSSTKSTSSVSTFSKAAPSVPSKPSDCNFISNFYSHSRLHHISMWKCELTEFVNTLQRQSNGIFPGREKLKKMKTGRSALVVTDTGDMSVLNSPRHQSCIMHVDMDCFFVSVGIRNRPDLKGKPVAVTSNRGTGRAPLRPGANPQLEWQYYQNKILKGKAADIPDSSLWENPDSAQANGIDSVLSRAEIASCSYEARQLGIKNGMFFGHAKQLCPNLQAVPYDFHAYKEVAQTLYETLASYTHNIEAVSCDEALVDITEILAETKLTPDEFANAVRMEIKDQTKCAASVGIGSNILLARMATRKAKPDGQYHLKPEEVDDFIRGQLVTNLPGVGHSMESKLASLGIKTCGDLQYMTMAKLQKEFGPKTGQMLYRFCRGLDDRPVRTEKERKSVSAEINYGIRFTQPKEAEAFLLSLSEEIQRRLEATGMKGKRLTLKIMVRKPGAPVETAKFGGHGICDNIARTVTLDQATDNAKIIGKAMLNMFHTMKLNISDMRGSPISSVKPLS

SEQ ID NO: 865037 - protein, 761 aa, Homo sapiens
MAAKVQKLEEQFRSDAAMQKDGTSSTIFSGVAIYVNGYTDPSAEELRKLMMLHGGQYHVYYSRSKTTHIIATNLPNAKIKELKGEKVIRPEWIVESIKAGRLLSYIPYQLYTKQSSVQKGLSFNPVCRPEDPLPGPSNIAKQLNNRVNHIVKKIETENEVKVNGMNSWNEEDENNDFSFVDLEQTSPGRKQNGIPHPRGSTAIFNGHTPSSNGALKTQDCLVPMVNSVASRLSPAFSQEEDKAEKSSTDFRDCTLQQLQQSTRNTDALRNPHRTNSFSLSPLHSNTKINGAHHSTVQGPSSTKSTSSVSTFSKAAPSVPSKPSDCNFISNFYSHSRLHHISMWKCELTEFVNTLQRQSNGIFPGREKLKKMKTGRSALVVTDTGDMSVLNSPRHQSCIMHVDMDCFFVSVGIRNRPDLKGKPVAVTSNRGTGRAPLRPGANPQLEWQYYQNKILKGKAADIPDSSLWENPDSAQANGIDSVLSRAEIASCSYEARQLGIKNGMFFGHAKQLCPNLQAVPYDFHAYKEVAQTLYETLASYTHNIEAVSCDEALVDITEILAETKLTPDEFANAVRMEIKDQTKCAASVGIGSNILLARMATRKAKPDGQYHLKPEEVDDFIRGQLVTNLPGVGHSMESKLASLGIKTCGDLQYMTMAKLQKEFGPKTGQMLYRFCRGLDDRPVRTEKERKSVSAEINYGIRFTQPKEAEAFLLSLSEEIQRRLEATGMKGKRLTLKIMVRKPGAPVETAKFGGHGICDNIAR

SEQ ID NO: 865038 - protein, 142 aa, Homo sapiens
AGCRAAGAWFGLARPAAPNTGRAAAAALPGWPSPCWSREREGAGPRGQGSAPPWLPWRLEARDAGAMAGTRGLMLLGPGPVAGPRDVGTCRGRQMEIQKHKDNKKLPQGIIIVFRLQTHTTPQIYTQLKGKLRKFFKEPYSE

SEQ ID NO: 865039 - protein, 145 aa, Homo sapiens
LAGAAQGHGRSGGPLSSGETQRPTITWPRRAGLCADPRPCLHLPQACGAREAWPHGPGRRAAGVKGAPRPNSAPLASRLPPCGRAASAASAPPARPAFVRRLGPAPPPDPGNTNRRRLTRPRSLSQTSPSSSSPSPQLLLSGGSG

SEQ ID NO: 865040 - protein, 142 aa, Homo sapiens; identical to SEQ ID NO: 865038

SEQ ID NO: 865041 - protein, 142 aa, Homo sapiens; identical to SEQ ID NO: 865038

SEQ ID NO: 865042 - protein, 142 aa, Homo sapiens; identical to SEQ ID NO: 865038

SEQ ID NO: 865043 - protein, 116 aa, Homo sapiens
LAGAAQGHGRSGGPLSSGETQRPTITWPRRAGLCADPRPCLHLPQACGAREAWPHGPGRRAAGVKGAPRPNSAPLASRLPPCGRAASAASAPPARPAFVRRLGPAPPPDPDGDSET

SEQ ID NO: 865044 - protein, 306 aa, Homo sapiens
MAAAAAAAAAAGAAGGRGSGPGRRRHLVPGAGGEAGEGAPGGAGDYGNGLESEELEPEELLLEPEPEPEPEEEPPRPRAPPGAPGPGPGSGAPGSQEEEEEPGLVEGDPGDGAIEDPELEAIKARVREMEEEAEKLKELQNEVEKQMNMSPPPGNAGPVIMSIEEKMEADARSIYVGNVDYGATAEELEAHFHGCGSVNRVTILCDKFSGHPKGFAYIEFSDKESVRTSLALDESLFRGRQIKVIPKRTNRPGISTTDRGFPRARYRARTTNYNSSRSRFYSGFNSRPRGRVYRGRARATSWYSPY

SEQ ID NO: 865045 - protein, 306 aa, Homo sapiens; identical to SEQ ID NO: 865044

SEQ ID NO: 865046 - protein, 306 aa, Homo sapiens; identical to SEQ ID NO: 865044

SEQ ID NO: 865047 - protein, 306 aa, Homo sapiens; identical to SEQ ID NO: 865044

SEQ ID NO: 865048 - protein, 306 aa, Homo sapiens; identical to SEQ ID NO: 865044

SEQ ID NO: 865049 - protein, 178 aa, Homo sapiens
MEEEAEKLKELQNEVEKQMNMSPPPGNAGPVIMSIEEKMEADARSIYVGNVDYGATAEELEAHFHGCGSVNRVTILCDKFSGHPKGFAYIEFSDKESVRTSLALDESLFRGRQIKVIPKRTNRPGISTTDRGFPRARYRARTTNYNSSRSRFYSGFNSRPRGRVYRGRARATSWYSPY

SEQ ID NO: 865050 - protein, 297 aa, Homo sapiens
MAAAAAAAAAAGAAGGRGSGPGRRRHLVPGAGGEAGEGAPGGAGDYGNGLESEELEPEELLLEPEPEPEPEEEPPRPRAPPGAPGPGPGSGAPGSQEEEEEPGLVEGDPGDGAIEDPELEAIKARVREMEEEAEKLKELQNEVEKQMNMSPPPGNAGPVIMSIEEKMEADARSIYVGNVDYGATAEELEAHFHGCGSVNRVTILCDKFSGHPKGFAYIEFSDKESVRTSLALDESLFRGRQIKVIPKRTNRPGISTTDRGFPRARYRARTTNYNSSRSRFYSGFNSRPRGRVYSRSG

SEQ ID NO: 865051 - protein, 178 aa, Homo sapiens; identical to SEQ ID NO: 865049

SEQ ID NO: 865052 - protein, 297 aa, Homo sapiens; identical to SEQ ID NO: 865050

SEQ ID NO: 865053 - protein, 297 aa, Homo sapiens; identical to SEQ ID NO: 865050

SEQ ID NO: 865054 - protein, 169 aa, Homo sapiens
MEEEAEKLKELQNEVEKQMNMSPPPGNAGPVIMSIEEKMEADARSIYVGNVDYGATAEELEAHFHGCGSVNRVTILCDKFSGHPKGFAYIEFSDKESVRTSLALDESLFRGRQIKVIPKRTNRPGISTTDRGFPRARYRARTTNYNSSRSRFYSGFNSRPRGRVYSRSG

SEQ ID NO: 865055 - protein, 366 aa, Homo sapiens
MAAAAAAAAAAGAAGGRGSGPGRRRHLVPGAGGEAGEGAPGGAGDYGNGLESEELEPEELLLEPEPEPEPEEEPPRPRAPPGAPGPGPGSGAPGSQEEEEEPGLVEGDPGDGAIEDPELEAIKARVREMEEEAEKLKELQNEVEKQMNMSPPPGNAGPVIMSIEEKMEADARSIYVGNVDYGATAEELEAHFHGCGSVNRVTILCDKFSGHPKGFAYIEFSDKESVRTSLALDESLFRGRQIKDPKTNQQTRHQHNSELEAHFHGCGSVNRVTILCDKFSGHPKGFAYIEFSDKESVRTSLALDESLFRGRQVIPKRTNRPGISTTDRGFPRARYRARTTNYNSSRSRFYSGFNSRPRGRVYSRSG

SEQ ID NO: 865056 - protein, 137 aa, Homo sapiens
MSIEEKMEADARSIYVGNVDYGATAEELEAHFHGCGSVNRVTILCDKFSGHPKGFAYIEFSDKESVRTSLALDESLFRGRQIKVIPKRTNRPGISTTDRGFPRARYRARTTNYNSSRSRFYSGFNSRPRGRVYSRSG

SEQ ID NO: 865057 - protein, 137 aa, Homo sapiens; identical to SEQ ID NO: 865056

SEQ ID NO: 865058 - protein, 208 aa, Homo sapiens [sequence omitted]

SEQ ID NO: 865059 - protein, 306 aa, Homo sapiens; identical to SEQ ID NO: 865044

SEQ ID NO: 865060 - protein, 306 aa, Homo sapiens; identical to SEQ ID NO: 865044

SEQ ID NO: 865061 - protein, 272 aa, Homo sapiens
HFIYSFSSNISIIKSLESEELEPEELLLEPEPEPEPEEEPPRPRAPPGAPGPGPGSGAPGSQEEEEEPGLVEGDPGDGAIEDPELEAIKARVREMEEEAEKLKELQNEVEKQMNMSPPPGNAGPVIMSIEEKMEADARSIYVGNVDYGATAEELEAHFHGCGSVNRVTILCDKFSGHPKGFAYIEFSDKESVRTSLALDESLFRGRQIKVIPKRTNRPGISTTDRGFPRARYRARTTNYNSSRSRFYSGFNSRPRGRVYRGRARATSWYSPY

SEQ ID NO: 865062 - protein, 306 aa, Homo sapiens; identical to SEQ ID NO: 865044

SEQ ID NO: 865063 - protein, 306 aa, Homo sapiens; identical to SEQ ID NO: 865044

SEQ ID NO: 865064 - protein, 306 aa, Homo sapiens; identical to SEQ ID NO: 865044

SEQ ID NO: 865065 - protein, 178 aa, Homo sapiens; identical to SEQ ID NO: 865049

SEQ ID NO: 865066 - protein, 182 aa, Homo sapiens
MSVKLEEEAEKLKELQNEVEKQMNMSPPPGNAGPVIMSIEEKMEADARSIYVGNVDYGATAEELEAHFHGCGSVNRVTILCDKFSGHPKGFAYIEFSDKESVRTSLALDESLFRGRQIKVIPKRTNRPGISTTDRGFPRARYRARTTNYNSSRSRFYSGFNSRPRGRVYRGRARATSWYSPY

SEQ ID NO: 865067 - protein, 137 aa, Homo sapiens; identical to SEQ ID NO: 865056

SEQ ID NO: 865068 - protein, 143 aa, Homo sapiens
SSRSKDPLPKRRCEADARSIYVGNVDYGATAEELEAHFHGCGSVNRVTILCDKFSGHPKGFAYIEFSDKESVRTSLALDESLFRGRQIKVIPKRTNRPGISTTDRGFPRARYRARTTNYNSSRSRFYSGFNSRPRGRVYSRSG

SEQ ID NO: 865069 - protein, 107 aa, Homo sapiens
MVYRSIRSVPPTASPVQFSGHPKGFAYIEFSDKESVRTSLALDESLFRGRQIKVIPKRTNRPGISTTDRGFPRARYRARTTNYNSSRSRFYSGFNSRPRGRVYSRSG

SEQ ID NO: 865070 - protein, 297 aa, Homo sapiens; identical to SEQ ID NO: 865050

SEQ ID NO: 865071 - protein, 273 aa, Homo sapiens
MAAAAAAAAAAGAAGGRGSGPGRRRHLVPGAGGEAGEGAPGGAGDYGNGLESEELEPEELLLEPEPEPEPEEEPPRPRAPPGAPGPGPGSGAPGSQEEEEEPGLVEGDPGDGAIEDPELEAIKARVREMEEEAEKLKELQNEVEKQMNMSPPPGNAGPVIMSIEEKMEADARSIYVGNVDYGATAEELEAHFHGCGSVNRVTILCDKFSGHPKGFAYIEFSDKESVRTSLALDESLFRGRQIKVIPKRTNRPGISRAGLERHHGIPLTKKSVY

SEQ ID NO: 865072 - protein, 262 aa, Homo sapiens
MAAAAAAAAAAGAAGGRGSGPGRRRHLVPGAGGEAGEGAPGGAGDYGNGLESEELEPEELLLEPEPEPEPEEEPPRPRAPPGAPGPGPGSGAPGSQEEEEEPGLVEGDPGDGAIEDPELEAIKARVREMEEEAEKLKELQNEVEKQMNMSPPPGNAGPVIMSIEEKMEADARSIYVGNVDYGATAEELEAHFHGCGSVNRVTILCDKFSGHPKGFAYIEFSDKESVRTSLALDESLFRGRQIKDPKTNQQTRHQPPSSPQWT

SEQ ID NO: 865073 - protein, 210 aa, Homo sapiens
MSCPNYCSGNSNSGSLRTSRHIPLTSIDLCPTSVSCGDVLYLPTSSQDHTWVTDNCQETCGEPTSCQPVHCETGNLETSCGSSTAYYVPRPCQGSSFLPASFFSSSCLPVSCRPQRYVSSGCRPLRPLLNSYQPIGDCVPNAYRPQFCLSKSCQPQNLLTSGCQPSSCLAYRPQSLHVVSSSLRPLGPLFSGCQPLTHVFSTCRPSCSGL

SEQ ID NO: 865074 - protein, 67 aa, Homo sapiens
LCATLHGGAKEKAWEGKSEPSLVEGPLLRQWGDRLLHATGLTSYYWHRNHHLRYRRRQKWKQRKMEK

SEQ ID NO: 865075 - protein, 77 aa, Homo sapiens
FVMRLFFPLVIYNLILKIVIWSLPVHSKEELPCFSPPLISDSDVLCFQHCLFPGVSTGALRVCRSIGQMVSGAIVTK

SEQ ID NO: 865076 - protein, 595 aa, Homo sapiens
MALTDGGWCLPKRFGAAGADASDSRAFPAREPSTPPSPISSSSSSCSRGGERGPGGASNCGTPQLDTEAAAGPPARSLLLSSYASHPFGAPHGPSAPGVAGPGGNLSSWEDLLLFTDLDQAATASKLLWSSRGAKLSPFAPEQPEEMYQTLAALSSQGPAAYDGAPGGFVHSAAAAAAAAAAASSPVYVPTTRVGSMLPGLPYHLQGSGSGPANHAGGAGAHPGWPQASADSPPYGSGGGAAGGGAAGPGGAGSAAAHVSARFPYSPSPPMANGAAREPGGYAAAGSGGAGGVSGGGSSLAAMGGREPQYSSLSAARPLNGTYHHHHHHHHHHPSPYSPYVGAPLTPAWPAGPFETPVLHSLQSRAGAPLPVPRGPSADLLEDLSESRECVNCGSIQTPLWRRDGTGHYLCNACGLYSKMNGLSRPLIKPQKRVPSSRRLGLSCANCHTTTTTLWRRNAEGEPVCNACGLYMKLHGVPRPLAMKKEGIQTRKRKPKNINKSKTCSGNSNNSIPMTPTSTSSNSDDCSKNTSPTTQPTASGAGAPVMTGAGESTNPENSELKYSGQDGLYIGVSLASPAEVTSSVRPDSWCALALA

SEQ ID NO: 865077 - protein, 165 aa, Homo sapiens
VQKYWTNGQWSNSDEITLLLALRPRRKAQPGRARAGKPGTGAGGRGPRGDAGRDGSGAPTPALTHRCRRRPAGGPVREPRVRELRLHPDAAVAAGRHRPLPVQRLRALQQDERPQPAPHQAAEARGECDPPCPWLAAGPGLSWPGRPRPGSACLGRPPPRGQVRP

SEQ ID NO: 865078 - protein, 595 aa, Homo sapiens; identical to SEQ ID NO: 865076

SEQ ID NO: 865079 - protein, 595 aa, Homo sapiens; identical to SEQ ID NO: 865076

SEQ ID NO: 865080 - protein, 116 aa, Homo sapiens
RPLNGTYHHHHHHHHHHPSPYSPYVGAPLTPAWPAGPFETPVLHSLQSRAGAPLPVPRGPSAGKGRASGSGCGSKALGRTGDVEQLLHSGPVFRTFSSGCAEVGLVPGRICRPVAG

SEQ ID NO: 865081 - protein, 144 aa, Homo sapiens
VQKYWTNGQWSNSDEITLLLALRPRRKAQPGRARAGKPGTGAGGRGPRGDAGRDGSGAPTPALTHRCRRRPAGGPVREPRVRELRLHPDAAVAAGRHRPLPVQRLRALQQDERPQPAPHQAAEARGECDPPCPWLAAGPGLSWP

SEQ ID NO: 865082 - protein, 297 aa, Homo sapiens
MMDSEAHEKRPPILTSSKQDISPHITNVGEMKHYLCGCCAAFNNVAITFPIQKVLFRQQLYGIKTRDAILQLRRDGFRNLYRGILPPLMQKTTTLALMFGLYEDLSCLLHKHVSAPEFATSGVAAVLAGTTEAIFTPLERVQTLLQDHKHHDKFTNTYQAFKALKCHGIGEYYRGLVPILFRNGLSNVLFFGLRGPIKEHLPTATTHSAHLVNDFICGGLLGAMLGFLFFPINVVKTRIQSQIGGEFQSFPKVFQKIWLERDRKLINLFRGAHLNYHRSLISWGIINATYEFLLKVI

SEQ ID NO: 865083 - protein, 79 aa, Homo sapiens
RCAGVALYLPRRGGLRPGEVGWRHLAGRGPREGRRGGAVSPSRDPNSAQRVALRPNLGVGHSLRLRGPRLASRPAGRRR

SEQ ID NO: 865084 - protein, 79 aa, Homo sapiens; identical to SEQ ID NO: 865083

SEQ ID NO: 865085 - protein, 79 aa, Homo sapiens; identical to SEQ ID NO: 865083

SEQ ID NO: 865086 - protein, 79 aa, Homo sapiens; identical to SEQ ID NO: 865083

SEQ ID NO: 865087 - protein, 155 aa, Homo sapiens; identical to SEQ ID NO: 790206

SEQ ID NO: 865088 - protein, 201 aa, Homo sapiens
GLAAVARAPRQARGGQAWEGAGPRGLRRSPPCQRRGRSRRKGAAAATAASARSQGRAAAMSYCRQEGKDRIIFVTKEDHETPSSAELVADDPNDPYEEHGLILPNGNINWNCPCLGGMASGPCGEQFKSAFSCFHYSTEEIKGSDCVDQFRAMQECMQKYPDLYPQEDEDEEEEREKKPAEQAEETAPIEATATKEEEGSS

SEQ ID NO: 865089 - protein, 140 aa, Homo sapiens
GLAAVARAPRQARGGQAWEGAGPRGLRRSPPCQRRGRSRRKGAAAATAASARSQGRAAAMSYCRQEGKDRIIFVTKEDHETPSSAELVADDPNDPYEEHGLILPNGNINWNCPCLGGMASGPCGEQFKSAFSCLPFIIPF

SEQ ID NO: 865090 - protein, 201 aa, Homo sapiens; identical to SEQ ID NO: 865088

SEQ ID NO: 865091 - protein, 373 aa, Homo sapiens
MGSQVSVESGALHVVIVGGGFGGIAAASQLQALNVPFMLVDMKDSFHHNVAALRASVETGFAKKTFISYSVTFKDNFRQGLVVGIDLKNQMVLLQGGEALPFSHLILATGSTGPFPGKFNEVSSQQAAIQAYEDMVRQVQRSRFIVVVGGGSAGVEMAAEIKTEYPEKEVTLIHSQVALADKELLPSVRQEVKEILLRKGVQLLLSERVSNLEELPLNEYREYIKVQTDKGTEVATNLVILCTGIKINSSAYRKAFESRLASSGALRVNEHLQVEGHSNVYAIGDCADVRTPKMAYLAGLHANIAVANIVNSVKQRPLQAYKPGALTFLLSMGRNDGVGQISGFYVGRLMVRLTKSRDLFVSTSWKTMRQSPP

SEQ ID NO: 865092 - protein, 373 aa, Homo sapiens; identical to SEQ ID NO: 865091

SEQ ID NO: 865093 - protein, 243 aa, Homo sapiens
CFTCPLLQVQRSRFIVVVGGGSAGVEMAAEIKTEYPEKEVTLIHSQVALADKELLPSVRQEVKEILLRKGVQLLLSERVSNLEELPLNEYREYIKVQTDKGTEVATNLVILCTGIKINSSAYRKAFESRLASSGALRVNEHLQVEGHSNVYAIGDCADVRTPKMAYLAGLHANIAVANIVNSVKQRPLQAYKPGALTFLLSMGRNDGVGQISGFYVGRLMVRLTKSRDLFVSTSWKTMRQSPP

SEQ ID NO: 865094 - protein, 206 aa, Homo sapiens
MEVTLIHSQVALADKELLPSVRQEVKEILLRKGVQLLLSERVSNLEELPLNEYREYIKVQTDKGTEVATNLVILCTGIKINSSAYRKAFESRLASSGALRVNEHLQVEGHSNVYAIGDCADVRTPKMAYLAGLHANIAVANIVNSVKQRPLQAYKPGALTFLLSMGRNDGVGQISGFYVGRLMVRLTKSRDLFVSTSWKTMRQSPP

SEQ ID NO: 865095 - protein, 355 aa, Homo sapiens
MGSQVSVESGALHVVIVGGGFGGIAAASQLQALNVPFMLVDMKDSFHHNVAALRASVETGFAKKTFISYSVTFKDNFRQGLVVGIDLKNQMVLLQGGEALPFSHLILATGSTGPFPGKFNEVSSQQAAIQAYEDMVRQVQRSRFIVVVGGGSAGVEMAAEIADKELLPSVRQEVKEILLRKGVQLLLSERVSNLEELPLNEYREYIKVQTDKGTEVATNLVILCTGIKINSSAYRKAFESRLASSGALRVNEHLQVEGHSNVYAIGDCADVRTPKMAYLAGLHANIAVANIVNSVKQRPLQAYKPGALTFLLSMGRNDGVGQISGFYVGRLMVRLTKSRDLFVSTSWKTMRQSPP

SEQ ID NO: 865096 - protein, 353 aa, Homo sapiens
MGSQVSVESGALHVVIVGGGFGGIAAASQLQALNVPFMLVDMKDSFHHNVAALRASVETGFAKKTFISYSVTFKDNFRQGLVVGIDLKNQMVLLQGGEALPFSHLILATGSTGPFPGKFNEVSSQQAAIQAYEDMVRQVQRSRFIVVVGGGSAGVEMAAEIKTEYPEKEVTLIHSQVALADKELLPSVRQEVKEILLRKGVQLLLSERVSNLEELPLNEYREYIKVQTDKGTEVATNLVILCTGIKINSSAYRKAFESRLASSGALRVNEHLQVEGHSNVYAIGDCADVRTPKMAYLAGLHANIAVANIVNSVKQRPLQAYKPGKRGPMCFAVLIEFGVKHGEAFLGYPIPGH

SEQ ID NO: 865097 - protein, 333 aa, Homo sapiens
MGSQVSVESGALHVVIVGGGFGGIAAASQLQALNVPFMLVDMKDSFHHNVAALRASVETGFAKKTFISYSVTFKDNFRQGLVVGIDLKNQMVLLQGGEVQRSRFIVVVGGGSAGVEMAAEIKTEYPEKEVTLIHSQVALADKELLPSVRQEVKEILLRKGVQLLLSERVSNLEELPLNEYREYIKVQTDKGTEVATNLVILCTGIKINSSAYRKAFESRLASSGALRVNEHLQVEGHSNVYAIGDCADVRTPKMAYLAGLHANIAVANIVNSVKQRPLQAYKPGALTFLLSMGRNDGVGQISGFYVGRLMVRLTKSRDLFVSTSWKTMRQSPP

SEQ ID NO: 865098 - protein, 176 aa, Homo sapiens
MGSQVSVESGALHVVIVGGGFGGIAAASQLQALNVPFMLVDMKDSFHHNVAALRASVETGFAKKTFISYSVTFKDNFRQGLVVGIDLKNQMVLLQGGEALPFSHLILATGSTGPFPGKFNEVSSQQAAIQAYEDMVRQVQRSRFIVVVGGGSAGVEMAAEIKTEYPEKEVLNKYPP

SEQ ID NO: 865099 - protein, 1762 aa, Homo sapiens
MNSFLSFPISLCSARKAVDEEEEAVEERRNMRTIWVTGRKGLTEREAAALIVEEARMILQQDLVEMGVQWNPCALLHSSTCSLTHSESEVKEHTFISQTKSSYKKLTSKNKSNTIFSDSYIKHSPNIVQDLNKSREHTSSFNCNFQNGNQEHQTCSIFRARKRASLDINKEKPGASQNEGKTSDKKVVQTFSQKTKKAPLNFNSEKMSRSFRSWKRRKHLKRSRDSSPLKDSGACRIHLQGQTLSNPSLCEDPFTLDEKKTEFRNSGPFAKNVSLSGKEKDNKTSFPLQIKQNCSWNITLTNDNFVEHIVTGSQSKNVTCQATSVVSEKGRGVAVEAEKINEVLIQNGSKNQNVYMKHHDIHPINQYLRKQSHEQTSTITKQKNIIERQMPCEAVSSYINRDSNVTINCERIKLNTEENKPSHFQALGDDISRTVIPSEVLPSAGAFSKSEGQHENFLNISRLQEKTGTYTTNKTKNNHVSDLGLVLCDFEDSFYLDTQSEKIIQQMATENAKLGAKDTNLAAGIMQKSLVQQNSMNSFQKECHIPFPAEQHPLGATKIDHLDLKTVGTMKQSSDSHGVDILTPESPIFHSPILLEENGLFLKKNEVSVTDSQLNSFLQGYQTQETVKPVILLIPQKRTPTGVEGECLPVPETSLNMSDSLLFDSFSDDYLVKEQLPDMQMKEPLPSEVTSNHFSDSLCLQEDLIKKSNVNENQDTHQQLTCSNDESIIFSEMDSVQMVEALDNVDIFPVQEKNHTVVSPRALELSDPVLDEHHQGDQDGGDQDERAEKSKLTGTRQNHSFIWSGASFDLSPGLQRILDKVSSPLENEKLKSMTINFSSLNRKNTELNEEQEVISNLETKQVQGISFSSNNEVKSKIEMLENNANHDETSSLLPRKESNIVDDNGLIPPTPIPTSASKLTFPGILETPVNPWKTNNVLQPGESYLFGSPSDIKNHDLSPGSRNGFKDNSPISDTSFSLQLSQDGLQLTPASSSSESLSIIDVASDQNLFQTFIKEWRCKKRFSISLACEKIRSLTSSKTATIGSRFKQASSPQEIPIRDDGFPIKGCDDTLVVGLAVCWGGRDAYYFSLQKEQKHSEISASLVPPSLDPSLTLKDRMWYLQSCLRKESDKECSVVIYDFIQSYKILLLSCGISLEQSYEDPKVACWLLDPDSQEPTLHSIVTSFLPHELPLLEGMETSQGIQSLGLNAGSEHSGRYRASVESILIFNSMNQLNSLLQKENLQDVFRKVEMPSQYCLALLELNGIGFSTAECESQKHIMQAKLDAIETQAYQLAGHSFSFTSSDDIAEVLFLELKLPPNREMKNQGSKKTLGSTRRGIDNGRKLRLGRQFSTSKDVLNKLKALHPLPGLILEWRRITNAITKVVFPLQREKCLNPFLGMERIYPVSQSHTATGRITFTEPNIQNVPRDFEIKMPTLVGESPPSQAVGKGLLPMGRGKYKKGFSVNPRCQAQMEERAVDRGMPFSISMRHAFVPFPGGSILAADYSQLELRILAHLSHDRRLIQVLNTGADVFRSIAAEWKMIEPESVGDDLRQQAKQICYGIIYGMGAKSLGEQMGIKENDAACYIDSFKSRYTGINQFMTETVKNCKRDGFVQTILGRRRYLPGIKDNNPYRKAHAERQAINTIVQGSAADIVKIATVNIQKQLETFHSTFKSHGHREGMLQSDRTGLSRKRKLQGMFCPIRGGFFILQLHDELLYEVAEEDVVQVAQIVKNEMESAVKLSVKLKVKVKIGASWGELKDFDV

SEQ ID NO: 865100 - protein, 213 aa, Homo sapiens [sequence omitted]

SEQ ID NO: 865101 - protein, 2724 aa, Homo sapiens
MNGHRFTFRTRSLLPLQKGQHRCITKLLAHNDPWGIFRAPSSRRSYSVSGVCQPAIPNSSLHIPHNACWLKWKLCSEIALPYHHILGERRKLCSIRNFEDWREDVRSCCQARVLPRGRTLGLWLALIGREEFAMNLLRRSGKRRRSESGSDSFSGSGGDSSASPQFLSGSVLSPPPGLGRCLKAAAAGECKPTVPDYEIDKLLLANWGLPKAVLEKYHSFGVKKMFEWQAECLLLGQVLEGKNLVYSAPTSAGKTLVAELLILKRVLEMRKKALFILPFVSVAKEKKYYLQSLFQEVGIKVDGYMGSTSPSRHFSSLDIAVCTIERANGLINRLIEENKMDLLGMVVVDELHMLGDSHRGYLLELLLTKICYITRKSASCQADLASSLSNAVQIVGMSATLPNLELVASWLNAELYHTDFRPVPLLESVKVGNSIYDSSMKLVREFEPMLQVKGDEDHVVSLCYETICDNHSVLLFCPSKKWCEKLADIIAREFYNLHHQAEGEGLVKPSECPPVILEQKELLEVMDQLRRLPSGLDSVLQKTVPWGVAFHHAGLTFEERDIIEGAFRQGLIRVLAATSTLSSGVNLPARRVIIRTPIFGGRPLDILTYKQMVGRAGRKGVDTVGSILICKNSEKSKGIALLQGSLKPVRSCLQRREGEEVTGSMIRAILEIIVGGVASTSQDMHTYAACTFLAASMKEGKQGIQRNQESVQLGVIEACVMWLLENEFIQSTEASDGTEGKVYHPTHLGSATLSSSLSPADTLDIFADLQRAMKGFVLENDLHILYLVTPMFEDWTTIDWYRFFCLWEKLPTSMKRVAELVGVEEGFLARCVKGKVVARTERQHRQMAIHKRFFTSLVLLDLISEVPLREINQKYGCNRGQIQSLQQSAAVYAGMITVFSNRLGWHNMELLLSQFQKRLTFGIQRELCDLVRVSLLNAQRARVLYASGFHTVADLARANIVEVEVILKNAVPFKSARKAVDEEEEAVEERRNMRTIWVTGRKGLTEREAAALIVEEARMILQQDLVEMGVQWNPCALLHSSTCSLTHSESEVKEHTFISQTKSSYKKLTSKNKSNTIFSDSYIKHSPNIVQDLNKSREHTSSFNCNFQNGNQEHQTCSIFRARKRASLDINKEKPGASQNEGKTSDKKVVQTFSQKTKKAPLNFNSEKMSRSFRSWKRRKHLKRSRDSSPLKDSGACRIHLQGQTLSNPSLCEDPFTLDEKKTEFRNSGPFAKNVSLSGKEKDNKTSFPLQIKQNCSWNITLTNDNFVEHIVTGSQSKNVTCQATSVVSEKGRGVAVEAEKINEVLIQNGSKNQNVYMKHHDIHPINQYLRKQSHEQTSTITKQKNIIERQMPCEAVSSYINRDSNVTINCERIKLNTEENKPSHFQALGDDISRTVIPSEVLPSAGAFSKSEGQHENFLNISRLQEKTGTYTTNKTKNNHVSDLGLVLCDFEDSFYLDTQSEKIIQQMATENAKLGAKDTNLAAGIMQKSLVQQNSMNSFQKECHIPFPAEQHPLGATKIDHLDLKTVGTMKQSSDSHGVDILTPESPIFHSPILLEENGLFLKKNEVSVTDSQLNSFLQGYQTQETVKPVILLIPQKRTPTGVEGECLPVPETSLNMSDSLLFDSFSDDYLVKEQLPDMQMKEPLPSEVTSNHFSDSLCLQEDLIKKSNVNENQDTHQQLTCSNDESIIFSEMDSVQMVEALDNVDIFPVQEKNHTVVSPRALELSDPVLDEHHQGDQDGGDQDERAEKSKLTGTRQNHSFIWSGASFDLSPGLQRILDKVSSPLENEKLKSMTINFSSLNRKNTELNEEQEVISNLETKQVQGISFSSNNEVKSKIEMLENNANHDETSSLLPRKESNIVDDNGLIPPTPIPTSASKLTFPGILETPVNPWKTNNVLQPGESYLFGSPSDIKNHDLSPGSRNGFKDNSPISDTSFSLQLSQDGLQLTPASSSSESLSIIDVASDQNLFQTFIKEWRCKKRFSISLACEKIRSLTSSKTATIGSRFKQASSPQEIPIRDDGFPIKGCDDTLVVGLAVCWGGRDAYYFSLQKEQKHSEISASLVPPSLDPSLTLKDRMWYLQSCLRKESDKECSVVIYDFIQSYKILLLSCGISLEQSYEDPKVACWLLDPDSQEPTLHSIVTSFLPHELPLLEGMETSQGIQSLGLNAGSEHSGRYRASVESILIFNSMNQLNSLLQKENLQDVFRKVEMPSQYCLALLELNGIGFSTAECESQKHIMQAKLDAIETQAYQLAGHSFSFTSSDDIAEVLFLELKLPPNREMKNQGSKKTLGSTRRGIDNGRKLRLGRQFSTSKDVLNKLKALHPLPGLILEWRRITNAITKVVFPLQREKCLNPFLGMERIYPVSQSHTATGRITFTEPNIQNVPRDFEIKMPTLVGESPPSQAVGKGLLPMGRGKYKKGFSVNPRCQAQMEERAVDRGMPFSISMRHAFVPFPGGSILAADYSQLELRILAHLSHDRRLIQVLNTGADVFRSIAAEWKMIEPESVGDDLRQQAKQICYGIIYGMGAKSLGEQMGIKENDAACYIDSFKSRYTGINQFMTETVKNCKRDGFVQTILGRRRYLPGIKDNNPYRKAHAERQAINTIVQGSAADIVKIATVNIQKQLETFHSTFKSHGHREGMLQSDRTGLSRKRKLQGMFCPIRGGFFILQLHDELLYEVAEEDVVQVAQIVKNEMESAVKLSVKLKVKVKIGASWGELKDFDV

SEQ ID NO: 865102 - protein, 213 aa, Homo sapiens [sequence omitted]

SEQ ID NO: 865103 - protein, 2561 aa, Homo sapiens
MNGHRFTFRTRSLLPLQKGQHRCITKLLAHNDPWGIFRAPSSRRSYSVSGVCQPAIPNSSLHIPHNACWLKWKLCSEIALPYHHILGERRKLCSIRNFEDWREDVRSCCQARVLPRGRTLGLWLALIGREEFAMNLLRRSGKRRRSESGSDSFSGSGGDSSASPQFLSGSVLSPPPGLGRCLKAAAAGECKPTVPDYEIDKLLLANWGLPKAVLEKYHSFGVKKMFEWQAECLLLGQVLEGKNLVYSAPTSAGKTLVAELLILKRVLEMRKKALFILPFVSVAKEKKYYLQSLFQEVGIKVDGYMGSTSPSRHFSSLDIAVCTIERANGLINRLIEENKMDLLGMVVVDELHMLGDSHRGYLLELLLTKICYITRKSASCQADLASSLSNAVQIVGMSATLPNLELVASWLNAELYHTDFRPVPLLESVKVGNSIYDSSMKLVREFEPMLQVKGDEDHVVSLCYETICDNHSVLLFCPSKKWCEKLADIIAREFYNLHHQAEGEGLVKPSECPPVILEQKELLEVMDQLRRLPSGLDSVLQKTVPWGVAFHHAGLTFEERDIIEGAFRQGLIRVLAATSTLSSGVNLPARRVIIRTPIFGGRPLDILTYKQMVGRAGRKGVDTVGSILICKNSEKSKGIALLQGSLKPVRSCLQRREGEEVTGSMIRAILEIIVGGVASTSQDMHTYAACTFLAASMKEGKQGIQRNQESVQLGVIEACVMWLLENEFIQSTEASDGTEGKVYHPTHLGSATLSSSLSPADTLDIFADLQRAMKGFVLENDLHILYLVTPMFEDWTTIDWYRFFCLWEKLPTSMKRVAELVGVEEGFLARCVKGKVVARTERQHRQMAIHKRFFTSLVLLDLISEVPLREINQKYGCNRGQIQSLQQSAAVYAGMITVFSNRLGWHNMELLLSQFQKRLTFGIQRELCDLVRVSLLNAQRARVLYASGFHTVADLARANIVEVEVILKNAVPFKSARKAVDEEEEAVEERRNMRTIWVTGRKGLTEREAAALIVEEARMILQQDLVEMGVQWNPCALLHSSTCSLTHSESEVKEHTFISQTKSSYKKLTSKNKSNTIFSDSYIKHSPNIVQDLNKSREHTSSFNCNFQNGNQEHQTCSIFRARKRASLDINKEKPGASQNEGKTSDKKVVQTFSQKTKKAPLNFNSEKMSRSFRSWKRRKHLKRSRDSSPLKDSGACRIHLQGQTLSNPSLCEDPFTLDEKKTEFRNSGPFAKNVSLSGKEKDNKTSFPLQIKQNCSWNITLTNDNFVEHIVTGSQSKNVTCQATSVVSEKGRGVAVEAEKINEVLIQNGSKNQNVYMKHHDIHPINQYLRKQSHEQTSTITKQKNIIERQMPCEAVSSYINRDSNVTINCERIKLNTEENKPSHFQALGDDISRTVIPSEVLPSAGAFSKSEGQHENFLNISRLQEKTGTYTTNKTKNNHVSDLGLVLCDFEDSFYLDTQSEKIIQQMATENAKLGAKDTNLAAGIMQKSLVQQNSMNSFQKECHIPFPAEQHPLGATKIDHLDLKTVGTMKQSSDSHGVDILTPESPIFHSPILLEENGLFLKKNEVSVTDSQLNSFLQGYQTQETVKPVILLIPQKRTPTGVEGECLPVPETSLNMSDSLLFDSFSDDYLVKEQLPDMQMKEPLPSEVTSNHFSDSLCLQEDLIKKSNVNENQDTHQQLTCSNDESIIFSEMDSVQMVEALDNVDIFPVQEKNHTVVSPRALELSDPVLDEHHQGDQDGGDQDERAEKSKLTGTRQNHSFIWSGASFDLSPGLQRILDKVSSPLENEKLKSMTINFSSLNRKNTELNEEQEVISNLETKQVQGISFSSNNEVKSKIEMLENNANHDETSSLLPRKESNIVDDNGLIPPTPIPTSASKLTFPGILETPVNPWKTNNVLQPGESYLFGSPSDIKNHDLSPGSRNGFKDNSPISDTSFSLQLSQDGLQLTPASSSSESLSIIDVASDQNLFQTFIKEWRCKKRFSISLACEKIRSLTSSKTATIGSRFKQASSPQEIPIRDDGFPIKGCDDTLVVGLAVCWGGRDAYYFSLQKEQKHSEISASLVPPSLDPSLTLKDRMWYLQSCLRKESDKECSVVIYDFIQSYKILLLSCGISLEQSYEDPKVACWLLDPDSQEPTLHSIVTSFLPHELPLLEGMETSQGIQSLGLNAGSEHSGRYRASVESILIFNSMNQLNSLLQKENLQDVFRKVEMPSQYCLALLELNGIGFSTAECESQKHIMQAKLDAIETQAYQLAGHSFSFTSSDDIAEVLFLELKLPPNREMKNQGSKKTLGSTRRGIDNGRKLRLGRQFSTSKDVLNKLKALHPLPGLILEWRRITNAITKVVFPLQREKCLNPFLGMERIYPVSQSHTATGRITFTEPNIQNVPRDFEIKMPTLVGESPPSQAVGKGLLPMGRGKYKKGFSVNPRCQAQMEERAVDRGMPFSISMRHAFVPFPGGSILAADYSQLELRILAHLSHDRRLIQVLNTGADVFRSIAAEWKMIEPESVGDDLRQQAKQICYGIIYGMGAKSLGEQMGIKENDAACYIDSFKSRYTGNLSSR

SEQ ID NO: 865104 - protein, 132 aa, Homo sapiens
MLLRMSEHRNEALGNYLEMRLKSSFLRGLGSWKSNPLRLGGWTILLTLTMGQGEPGGPQGDPWVPHELLLPSLCDSSHASSWGSGSITCAWRGGDSSSHPLVSGHILSNSPVAAVMCSSMGTHLSPFKGTLL

SEQ ID NO: 865105 - protein, 132 aa, Homo sapiens; identical to SEQ ID NO: 865104

SEQ ID NO: 865106 - protein, 132 aa, Homo sapiens; identical to SEQ ID NO: 865104

SEQ ID NO: 865107 - protein, 132 aa, Homo sapiens; identical to SEQ ID NO: 865104

SEQ ID NO: 865108 - protein, 455 aa, Homo sapiens
HRQPKQSLPFQAPAWARETPQGYLRWCGLPIYVDRPKKGAPSAELARKVILGGAGHARVSPRGFLPRRLLSGARAPPAGGPRESLAGEPGAWFPRQPPSRPPRRPPWGRGSPARGRGRRAIGLCAEPRGGTSAGRQTRPSAEAGLEEKMAAKQPPPLMKKHSQTDLVSRLKTRKILGVGGEDDDGEVHRSKISQVLGNEIKFTIREPLGLRVWQFVSAVLFSGIAIMALAFPDQLYDAVFDGAQVTSKTPIRLYGGALLKVETESDRGEVTCLRSQLVSGEAKIGTQAIQLGRTKDGVSETSPASALLLAFSLIQTWLQPLGWDWPPYLPFNASASLLPEGAFQKAHVTTALSCWNPTSTGDQAASYRPQDLQDSPSPPLVIPALTFLSPPSKESPPEITSHGPGLRSAGLPDKCNQRRHVSWEEPPTTSKPRKPSVFMFLLDPHNRPAKPAQQR

SEQ ID NO: 865109 - protein, 114 aa, Homo sapiens
TTTKFAAASTSAVLFSGIAIMALAFPDQLYDAVFDGAQVTSKTPIRLYGGALLSISLIMWNALYTAEKVIIRWTLLTEACYFGVQFLVVTATLAETGLMSLGILLTRSSRRGRE

SEQ ID NO: 865110 - protein, 189 aa, Homo sapiens
MAAKQPPPLMKKHSQTDLVSRLKTRKILGVGGEDDDGEVHRSKISQVLGNEIKFTIREPLGLRVWQFVSAVLFSGIAIMALAFPDQLYDAVFDGAQVTSKTPIRLYGGALLSISLIMWNALYTAEKVIIRWTLLTEACYFGVQFLVVTATLAETGLMSLGILLLLVSRLLFVVISIYYYYQVGRRPKKA

SEQ ID NO: 865111 - protein, 189 aa, Homo sapiens; identical to SEQ ID NO: 865110

SEQ ID NO: 865112 - protein, 189 aa, Homo sapiens; identical to SEQ ID NO: 865110

SEQ ID NO: 865113 - protein, 189 aa, Homo sapiens; identical to SEQ ID NO: 865110

SEQ ID NO: 865114 - protein, 189 aa, Homo sapiens; identical to SEQ ID NO: 865110

SEQ ID NO: 865115 - protein, 189 aa, Homo sapiens; identical to SEQ ID NO: 865110

SEQ ID NO: 865116 - protein, 189 aa, Homo sapiens; identical to SEQ ID NO: 865110

SEQ ID NO: 865117 - protein, 189 aa, Homo sapiens; identical to SEQ ID NO: 865110

SEQ ID NO: 865118 - protein, 189 aa, Homo sapiens; identical to SEQ ID NO: 865110

SEQ ID NO: 865119 - protein, 126 aa, Homo sapiens
MAAKQPPPLMKKHSQTDLVSRLKTRKILGVGGEDDDGEVHRSKYTQWVGACSRHHLQGALISVCTASGRCGTEMEEAQAQPLGIHSLEERQINSVSAKPLAPPLFYPQSHFCLNHFCFLSNLRCTR

SEQ ID NO: 865120 - protein, 189 aa, Homo sapiens; identical to SEQ ID NO: 865110

SEQ ID NO: 865121 - protein, 337 aa, Homo sapiens
HRQPKQSLPFQAPAWARETPQGYLRWCGLPIYVDRPKKGAPSAELARKVILGGAGHARVSPRGFLPRRLLSGARAPPAGGPRESLAGEPGAWFPRQPPSRPPRRPPWGRGSPARGRGRRAIGLCAEPRGGTSAGRQTRPSAEAGLEEKMAAKQPPPLMKKHSQTDLVSRLKTRKILGVGGEDDDGEVHRSKISQVLGNEIKFTIREPLGLRVWQFVSAVLFSGIAIMALAFPDQLYDAVFDGAQVTSKTPIRLYGGALLSISLIMWNALYTAEKVIIRWTLLTEACYFGVQFLVVTATLAETGLMSLGILLLLVSRLLFVVISIYYYYQVGRRPKKA

SEQ ID NO: 865122 - protein, 189 aa, Homo sapiens; identical to SEQ ID NO: 865110

SEQ ID NO: 865123 - protein, 189 aa, Homo sapiens; identical to SEQ ID NO: 865110

SEQ ID NO: 865124 - protein, 189 aa, Homo sapiens; identical to SEQ ID NO: 865110

SEQ ID NO: 865125 - protein, 121 aa, Homo sapiens
MHTPEVASPSPGDRCREKSSPRPQTRFPSWHRVGDGWRVSIGTARSGCCQVGPCQGSSPLSTLCLAVPAPRYSNMACTQQSGGTTMVTADAPRLCLVNVAEQNGRLDPEEGPLSWHLSLAT

SEQ ID NO: 865126 - protein, 189 aa, Homo sapiens; identical to SEQ ID NO: 865110

SEQ ID NO: 865127 - protein, 189 aa, Homo sapiens; identical to SEQ ID NO: 865110

SEQ ID NO: 865128 - protein, 189 aa, Homo sapiens; identical to SEQ ID NO: 865110

SEQ ID NO: 865129 - protein, 189 aa, Homo sapiens; identical to SEQ ID NO: 865110

SEQ ID NO: 865130 - protein, 189 aa, Homo sapiens; identical to SEQ ID NO: 865110

SEQ ID NO: 865131 - protein, 189 aa, Homo sapiens; identical to SEQ ID NO: 865110

SEQ ID NO: 865132 - protein, 189 aa, Homo sapiens; identical to SEQ ID NO: 865110

SEQ ID NO: 865133 - protein, 154 aa, Homo sapiens
MAAKQPPPLMKKHSQTDLVSRLKTRKILGVGGEDDDGEVHRSKISQVLGNEIKFTIREPLGLRVWQFVSAVLFSGIAIMALAFPDQLYDAVFDGAQVTSKTPIRLYGGALLNAAPTPRPLMKLSAGDVLPSCGHWWNTPSGLELAVATICKERS

SEQ ID NO: 865134 - protein, 516 aa, Homo sapiens
RSVRVAWIPRSGPAMSLVLLSLAALCRSAVPREPTVQCGSETGPSPEWMLQHDLIPGDLRDLRVEPVTTSVATGDYSILMNVSWVLRADASIRLLKATKICVTGKSNFQSYSCVRCNYTEAFQTQTRPSGGKWTFSYIGFPVELNTVYFIGAHNIPNANMNEDGPSMSVNFTSPGCLDHIMKYKKKCVKAGSLWDPNITACKKNEETVEVNFTTTPLGNRYMALIQHSTIIGFSQVFEPHQKKQTRASVVIPVTGDSEGATVQLTPYFPTCGSDCIRHKGTVVLCPQTGVPFPLDNNKSKPGGWLPLLLLSLLVATWVLVAGIYLMWRHERIKKTSFSTTTLLPPIKVLVVYPSEICFHHTICYFTEFLQNHCRSEVILEKWQKKKIAEMGPVQWLATQKKAADKVVFLLSNDVNSVCDGTCGKSEGSPSENSQDLFPLAFNLFCSDLRSQIHLHKYVVVYFREIDTKDDYNALSVCPKYHLMKDATAFCAELLHVKQQVSAGKRSQACHDGCCSL

SEQ ID NO: 865135 - protein, 516 aa, Homo sapiens; identical to SEQ ID NO: 865134

SEQ ID NO: 865136 - protein, 516 aa, Homo sapiens; identical to SEQ ID NO: 865134

SEQ ID NO: 865137 - protein, 302 aa, Homo sapiens
RSVRVAWIPRSGPAMSLVLLSLAALCRSAVPREPTVQCGSETGPSPEWMLQHDLIPGDLRDLRVEPVTTSVATGDYSILMNVSWVLRADASIRLLKATKICVTGKSNFQSYSCVRCNYTEAFQTQTRPSGGKWTFSYIGFPVELNTVYFIGAHNIPNANMNEDGPSMSVNFTSPGCLDHIMKYKKKCVKAGSLWDPNITACKKNEETVEVNFTTTPLGNRYMALIQHSTIIGFSQVFEPHQKKQTRASVVIPVTGDSEGATVQVKFSELLWGGKGHRRLFHHSLLLRMSSLLSNALLPADTS

SEQ ID NO: 865138 - protein, 302 aa, Homo sapiens; identical to SEQ ID NO: 865137

SEQ ID NO: 865139 - protein, 279 aa, Homo sapiens
MPHQKKQTRASVVIPVTGDSEGATVQLTPYFPTCGSDCIRHKGTVVLCPQTGVPFPLDNNKSKPGGWLPLLLLSLLVATWVLVAGIYLMWRHERIKKTSFSTTTLLPPIKVLVVYPSEICFHHTICYFTEFLQNHCRSEVILEKWQKKKIAEMGPVQWLATQKKAADKVVFLLSNDVNSVCDGTCGKSEGSPSENSQDLFPLAFNLFCSDLRSQIHLHKYVVVYFREIDTKDDYNALSVCPKYHLMKDATAFCAELLHVKQQVSAGKRSQACHDGCCSL

SEQ ID NO: 865140 - protein, 209 aa, Homo sapiens [sequence omitted]

SEQ ID NO: 865141 - protein, 330 aa, Homo sapiens
RSVRVAWIPRSGPAMSLVLLSLAALCRSAVPREPTVQCGSETGPSPEWMLQHDLIPGDLRDLRVEPVTTSVATGDYSILMNVSWVLRADASIRLLKATKICVTGKSNFQSYSCVRCNYTEAFQTQTRPSGGKWTFSYIGFPVELNTVYFIGAHNIPNANMNEDGPSMSVNFTSPGCLDHIMKYKKKCVKAGSLWDPNITACKKNEETVEVNFTTTPLGNRYMALIQHSTIIGFSQVFEPHQKKQTRASVVIPVTGDSEGATVQLTPYFPTCGSDCIRHKGTVVLCPQTGVPFPLDNNKSKPGGWLPLLLLSLLVATWVLVAGIYLMWRHG

SEQ ID NO: 865142 - protein, 302 aa, Homo sapiens; identical to SEQ ID NO: 865137

SEQ ID NO: 865143 - protein, 357 aa, Homo sapiens [sequence omitted]

SEQ ID NO: 865144 - protein, 500 aa, Homo sapiens
RSVRVAWIPRSGPAMSLVLLSLAALCRSAVPREPTVQCGSETGPSPEWMLQHDLIPGDLRDLRVEPVTTSVATGDYSILMNVSWVLRADASIRLLKATKICVTGKSNFQSYSCVRCNYTEAFQTQTRPSGGKWTFSYIGFPVELNTVYFIGAHNIPNANMNEDGPSMSVNFTSPGSLWDPNITACKKNEETVEVNFTTTPLGNRYMALIQHSTIIGFSQVFEPHQKKQTRASVVIPVTGDSEGATVQLTPYFPTCGSDCIRHKGTVVLCPQTGVPFPLDNNKSKPGGWLPLLLLSLLVATWVLVAGIYLMWRHERIKKTSFSTTTLLPPIKVLVVYPSEICFHHTICYFTEFLQNHCRSEVILEKWQKKKIAEMGPVQWLATQKKAADKVVFLLSNDVNSVCDGTCGKSEGSPSENSQDLFPLAFNLFCSDLRSQIHLHKYVVVYFREIDTKDDYNALSVCPKYHLMKDATAFCAELLHVKQQVSAGKRSQACHDGCCSL

SEQ ID NO: 865145 - protein, 368 aa, Homo sapiens
RSVRVAWIPRSGPAMSLVLLSLAALCRSAVPREPTVQCGSETGPSPEWMLQHDLIPGDLRDLRVEPVTTSVATGDYSILMNVSWVLRADASIRLLKATKICVTGKSNFQSYSCVRCNYTEAFQTQTRPSGGKWTFSYIGFPVELNTVYFIGAHNIPNANMNEDGPSMSVNFTSPGCLDHIMKYKKKCVKAGSLWDPNITACKKNEETVEVNFTTTPLGNRYMALIQHSTIIGFSQVFEPHQKKQTRASVVIPVTGDSEGATVQLTPYFPTCGSDCIRHKGTVVLCPQTGVPFPLDNNKSKPGGWLPLLLLSLLVATWVLVAGIYLMWRHVLWFTHLKYVSITQFVTSLNFFKTIAEVRSSLKSGRKRK

SEQ ID NO: 865146 - protein, 682 aa, Homo sapiens
GTKVSERRRQNPGRGQGEGLWGRDLSPAPTRSLESRRPDTQRPDQELTGSWGHGPRSTLVRAKAMAPPPPPLAASTPLLHGEFGSYPARGPRFALTLTSQALHIQRLRPKPEARPRGGLVPLAEVSGCCTLRSRSPSDSAAYFCIYTYPRGRRGARRRATRTFRADGAATYEENRAEAQRWATALTCLLRGLPLPGDGEITPDLLPRPPRLLLLVNPFGGRGLAWQWCKNHVLPMISEAGLSFNLIQTERQNHARELVQGLSLSEWDGIVTVSGDGLLHEVLNGLLDRPDWEEAVKMPVGILPCGSGNALAGAVNQHGGFEPALGLDLLLNCSLLLCRGGGHPLDLLSVTLASGSRCFSFLSVAWGFVSDVDIQSERFRALGSARFTLGTVLGLATLHTYRGRLSYLPATVEPASPTPAHSLPRAKSELTLTPDPAPPMAHSPLHRSVSDLPLPLPQPALASPGSPEPLPILSLNGGGPELAGDWGGAGDAPLSPDPLLSSPPGSPKAALHSPVSEGAPVIPPSSGLPLPTPDARVGASTCGPPDHLLPPLGTPLPPDWVTLEGDFVLMLAISPSHLGADLVAAPHARFDDGLVHLCWVRSGISRAALLRLFLAMERGSHFSLGCPQLGYAAARAFRLEPLTPRGVLTVDGEQVEYGPLQAQMHPGIGTLLTGPPGCPGREP

SEQ ID NO: 865147 - protein, 654 aa, Homo sapiens
MNGHLEAEEQQDQRPDQELTGSWGHGPRSTLVRAKAMAPPPPPLAASTPLLHGEFGSYPARGPRFALTLTSQALHIQRLRPKPEARPRGGLVPLAEVSGCCTLRSRSPSDSAAYFCIYTYPRGRRGARRRATRTFRADGAATYEENRAEAQRWATALTCLLRGLPLPGDGEITPDLLPRPPRLLLLVNPFGGRGLAWQWCKNHVLPMISEAGLSFNLIQTERQNHARELVQGLSLSEWDGIVTVSGDGLLHEVLNGLLDRPDWEEAVKMPVGILPCGSGNALAGAVNQHGGFEPALGLDLLLNCSLLLCRGGGHPLDLLSVTLASGSRCFSFLSVAWGFVSDVDIQSERFRALGSARFTLGTVLGLATLHTYRGRLSYLPATVEPASPTPAHSLPRAKSELTLTPDPAPPMAHSPLHRSVSDLPLPLPQPALASPGSPEPLPILSLNGGGPELAGDWGGAGDAPLSPDPLLSSPPGSPKAALHSPVSEGAPVIPPSSGLPLPTPDARVGASTCGPPDHLLPPLGTPLPPDWVTLEGDFVLMLAISPSHLGADLVAAPHARFDDGLVHLCWVRSGISRAALLRLFLAMERGSHFSLGCPQLGYAAARAFRLEPLTPRGVLTVDGEQVEYGPLQAQMHPGIGTLLTGPPGCPGREP

SEQ ID NO: 865148 - protein, 654 aa, Homo sapiens; identical to SEQ ID NO: 865147

SEQ ID NO: 865149 - protein, 654 aa, Homo sapiens; identical to SEQ ID NO: 865147

SEQ ID NO: 865150 - protein, 685 aa, Homo sapiens
MNGHLEAEEQQDQRPDQELTGSWGHGPRSTLVRAKAMAPPPPPLAASTPLLHGEFGSYPARGPRFALTLTSQALHIQRLRPKPEARPRGGLVPLAEVSGCCTLRSRSPSDSAAYFCIYTYPRGRRGARRRATRTFRADGAATYEENRAEAQRWATALTCLLRGLPLPGDGEITPDLLPRPPRLLLLVNPFGGRGLAWQWCKNHVLPMISEAGLSFNLIQTERQNHARELVQGLSLSEWDGIVTVSGDGLLHEVLNGLLDRPDWEEAVKMPVGILPCGSGNALAGAVNQHGGFEPALGLDLLLNCSLLLCRGGGHPLDLLSVTLASGSRCFSFLSVAWGFVSDVDIQSERFRALGSARFTLGTVLGLATLHTYRGRLSYLPATVEPASPTPAHSLPRAKSELTLTPDPAPPMAHSPLHRSVSDLPLPLPQPALASPGSPEPLPILSLNGGGPELAGDWGGAGDAPLSPDPLLSSPPGSPKAALHSPVSEGAPVIPPSSGLPLPTPDARVGASTCGPPDHLLPPLGTPLPPDWVTLEGDFVLMLAISPSHLGADLVAAPHARFDDGLVHLCWVRSGISRAALLRLFLAMERGSHFSLGCPQLGYAAARAFRLEPLTPRGVLTVDGEQVEYGPLQAQMHPGIGTLLTGPPGCPGRDCARFHGTRRDAGRWASSRLKRNGLVPRVVPDQ

SEQ ID NO: 865151 - protein, 789 aa, Homo sapiens
MNGHLEAEEQQDQRPDQELTGSWGHGPRSTLVRAKAMAPPPPPLAASTPLLHGEFGSYPARGPRFALTLTSQALHIQRLRPKPEARPRGGLVPLAEVSGCCTLRSRSPSDSAAYFCIYTYPRGRRGARRRATRTFRADGAATYEENRAEAQRWATALTCLLRGLPLPGDGEITPDLLPRPPRLLLLVNPFGGRGLAWQWCKNHVLPMISEAGLSFNLIQTERQNHARELVQGLSLSEWDGIVTVSGDGLLHEVLNGLLDRPDWEEAVKMPVGILPCGSGNALAGAVNQHGGQVEDTTKGGMSPSWGDRDPYISHSAKPTVSQVNQPACGMLTPSSWTFLPACFPAVSRAPRTLPGMGGSSVNCREQMKDDQEPGPVRSRLEVAPRLWWAWAMAFVVSLPAAFLPVSFPNPCLLLPSVCPSISGCEGFEPALGLDLLLNCSLLLCRGGGHPLDLLSVTLASGSRCFSFLSVAWGFVSDVDIQSERFRALGSARFTLGTVLGLATLHTYRGRLSYLPATVEPASPTPAHSLPRAKSELTLTPDPAPPMAHSPLHRSVSDLPLPLPQPALASPGSPEPLPILSLNGGGPELAGDWGGAGDAPLSPDPLLSSPPGSPKAALHSPVSEGAPVIPPSSGLPLPTPDARVGASTCGPPDHLLPPLGTPLPPDWVTLEGDFVLMLAISPSHLGADLVAAPHARFDDGLVHLCWVRSGISRAALLRLFLAMERGSHFSLGCPQLGYAAARAFRLEPLTPRGVLTVDGEQVEYGPLQAQMHPGIGTLLTGPPGCPGREP

SEQ ID NO: 865152 - protein, 423 aa, Homo sapiens
MKDDQEPGPVRSRLEVAPRLWWAWAMAFVVSLPAAFLPVSFPNPCLLLPSVCPSISGCEGFEPALGLDLLLNCSLLLCRGGGHPLDLLSVTLASGSRCFSFLSVAWGFVSDVDIQSERFRALGSARFTLGTVLGLATLHTYRGRLSYLPATVEPASPTPAHSLPRAKSELTLTPDPAPPMAHSPLHRSVSDLPLPLPQPALASPGSPEPLPILSLNGGGPELAGDWGGAGDAPLSPDPLLSSPPGSPKAALHSPVSEGAPVIPPSSGLPLPTPDARVGASTCGPPDHLLPPLGTPLPPDWVTLEGDFVLMLAISPSHLGADLVAAPHARFDDGLVHLCWVRSGISRAALLRLFLAMERGSHFSLGCPQLGYAAARAFRLEPLTPRGVLTVDGEQVEYGPLQAQMHPGIGTLLTGPPGCPGREP

SEQ ID NO: 865153 - protein, 587 aa, Homo sapiens
MQFLRALHIQRLRPKPEARPRGGLVPLAEVSGCCTLRSRSPSDSAAYFCIYTYPRGRRGARRRATRTFRADGAATYEENRAEAQRWATALTCLLRGLPLPGDGEITPDLLPRPPRLLLLVNPFGGRGLAWQWCKNHVLPMISEAGLSFNLIQTERQNHARELVQGLSLSEWDGIVTVSGDGLLHEVLNGLLDRPDWEEAVKMPVGILPCGSGNALAGAVNQHGGFEPALGLDLLLNCSLLLCRGGGHPLDLLSVTLASGSRCFSFLSVAWGFVSDVDIQSERFRALGSARFTLGTVLGLATLHTYRGRLSYLPATVEPASPTPAHSLPRAKSELTLTPDPAPPMAHSPLHRSVSDLPLPLPQPALASPGSPEPLPILSLNGGGPELAGDWGGAGDAPLSPDPLLSSPPGSPKAALHSPVSEGAPVIPPSSGLPLPTPDARVGASTCGPPDHLLPPLGTPLPPDWVTLEGDFVLMLAISPSHLGADLVAAPHARFDDGLVHLCWVRSGISRAALLRLFLAMERGSHFSLGCPQLGYAAARAFRLEPLTPRGVLTVDGEQVEYGPLQAQMHPGIGTLLTGPPGCPGREP

SEQ ID NO: 865154 - protein, 169 aa, Homo sapiens
KNLFNKRVGSRLVFVASAGPSASGTLELPALGADVGFGVAVRGSWGLADMPVHLSALARTGEQDSATALRGVQGQLVESEDLAPCPEDAAAGPAGHAQCTYLQFGYLLNPHIISYGPHNHGRLVFPARKLHLPDHPGKGQRRPVGATHKQPLQHNLVECGVGSSGQKPV

SEQ ID NO: 865155 - protein, 124 aa, Homo sapiens
ALGLGNVRGRTGRWLGGAVGNKGERKEEAESGQRAGRGPVGKGPQSCSHPLPGEQAARHPGQCSGTSSWPLPLAGARMWLLSDPVVPVISLLSSCLHACLVPLLFALPSTLSCLSRWGEKVLLS

SEQ ID NO: 865156 - protein, 387 aa, Homo sapiens
VLTCGTAWRRTRRRPDQELTGSWGHGPRSTLVRAKAMAPPPPPLAASTPLLHGEFGSYPARGPRFALTLTSQALHIQRLRPKPEARPRGGLVPLAEVSGCCTLRSRSPSDSAAYFCIYTYPRGRRGARRRATRTFRADGAATYEENRAEAQRWATALTCLLRGLPLPGDGEITPDLLPRPPRLLLLVNPFGGRGLAWQWCKNHVLPMISEAGLSFNLIQTERQNHARELVQGLSLSEWDGIVTVSGDGLLHEVLNGLLDRPDWEEAVKMPVGILPCGSGNALAGAVNQHGGPREDSDSSTSSSACPLWTTARSCPRAAASMPGSCPLLPQQLALGFSRFIQDRVNGGGGRIGSLTCRGHTQRTLPAPAREGGGSLFLKNINVFICII

SEQ ID NO: 865157 - protein, 654 aa, Homo sapiens; identical to SEQ ID NO: 865147

SEQ ID NO: 865158 - protein, 387 aa, Homo sapiens
MNGHLEAEEQQDQRPDQELTGSWGHGPRSTLVRAKAMAPPPPPLAASTPLLHGEFGSYPARGPRFALTLTSQALHIQRLRPKPEARPRGGLVPLAEVSGCCTLRSRSPSDSAAYFCIYTYPRGRRGARRRATRTFRADGAATYEENRAEAQRWATALTCLLRGLPLPGDGEITPDLLPRPPRLLLLVNPFGGRGLAWQWCKNHVLPMISEAGLSFNLIQTERQNHARELVQGLSLSEWDGIVTVSGDGLLHEVLNGLLDRPDWEEAVKMPVGILPCGSGNALAGAVNQHGGPREDSDSSTSSSACPLWTTARSCPRAAASMPGSCPLLPQQLALGFSRFIQDRVNGGGGRIGSLTCRGHTQRTLPAPAREGGGSLFLKNINVFICII

SEQ ID NO: 865159 - protein, 448 aa, Homo sapiens
MISEAGLSFNLIQTERQNHARELVQGLSLSEWDGIVTVSGDGLLHEVLNGLLDRPDWEEAVKMPVGILPCGSGNALAGAVNQHGGFEPALGLDLLLNCSLLLCRGGGHPLDLLSVTLASGSRCFSFLSVAWGFVSDVDIQSERFRALGSARFTLGTVLGLATLHTYRGRLSYLPATVEPASPTPAHSLPRAKSELTLTPDPAPPMAHSPLHRSVSDLPLPLPQPALASPGSPEPLPILSLNGGGPELAGDWGGAGDAPLSPDPLLSSPPGSPKAALHSPVSEGAPVIPPSSGLPLPTPDARVGASTCGPPDHLLPPLGTPLPPDWVTLEGDFVLMLAISPSHLGADLVAAPHARFDDGLVHLCWVRSGISRAALLRLFLAMERGSHFSLGCPQLGYAAARAFRLEPLTPRGVLTVDGEQVEYGPLQAQMHPGIGTLLTGPPGCPGREP

SEQ ID NO: 865160 - protein, 220 aa, Homo sapiens
MASLAPTQPEAHALPSPLHRRPCTYSGCAPNLKPGPGVAWSRWPRSQAAAPCEAAAPQTQRPTSASTPTPDARVGASTCGPPDHLLPPLGTPLPPDWVTLEGDFVLMLAISPSHLGADLVAAPHARFDDGLVHLCWVRSGISRAALLRLFLAMERGSHFSLGCPQLGYAAARAFRLEPLTPRGVLTVDGEQVEYGPLQAQMHPGIGTLLTGPPGCPGREP

SEQ ID NO: 865161 - protein, 169 aa, Homo sapiens; identical to SEQ ID NO: 865154

SEQ ID NO: 865162 - protein, 423 aa, Homo sapiens [sequence omitted]

SEQ ID NO: 865163 - protein, 71 aa, Homo sapiens
  misc_feature (9)..(9): Xaa can be any naturally occurring amino acid
MITKFKYDXTNRKFWPSKAKEILGTRAISCGGDVPPPSGLPACSLPAEGLSRTPLVLAAPSPLLVPPQTPG

SEQ ID NO: 865164 - protein, 447 aa, Homo sapiens
QPGSWTWLRQWVERGSQPQPEVSEMLPPQKKPWESMAKGLVLGALFTSFLLLMYSYAVPPLHAGLASTTPEAAASCSPPALEPEAVIRANGSAGECQPRRNIVFLKTHKTASSTLLNILFRFGQKHRLKFAFPNGRNDFDYPTFFARSLVQDYRPGACFNIICNHMRFHYDEVRGLVPTNAIFITVLRDPARLFESSFHYFGPVVPLTWKLSAGDKLTEFLQDPDRYYDPNGFNAHYLRNLLFFDLGYDNSLDPSSPQVQEHILEVERRFHLVLLQEYFDESLVLLKDLLCWELEDVLYFKLNARRDSPVPRLSGELYGRATAWNMLDSHLYRHFNASFWRKVEAFGRERMAREVAALRHANERMRTICIDGGHAVDAAAIQDEAMQPWQPLGTKSILGYNLKKSIGQRHAQLCRRMLTPEIQYLMDLGANLWVTKLWKFIRDFLRW

SEQ ID NO: 865165 - protein, 423 aa, Homo sapiens [sequence omitted]

SEQ ID NO: 865166 - protein, 412 aa, Homo sapiens
MAKGLVLGALFTSFLLLMYSYAVPPLHAGLASTTPEAAASCSPPALEPEAVIRANGSAGECQPRRNIVFLKTHKTASSTLLNILFRFGQKHRLKFAFPNGRNDFDYPTFFARSLVQDYRPGACFNIICNHMRFHYDEVRGLVPTNAIFITVLRDPARLFESSFHYFGPVVPLTWKLSAGDKLTEFLQDPDRYYDPNGFNAHYLRNLLFFDLGYDNSLDPSSPQVQEHILEVERRFHLVLLQEYFDESLVLLKDLLCWELEDVLYFKLNARRDSPVPRLSGELYGRATAWNMLDSHLYRHFNASFWRKVEAFGRERMAREVAALRHANERMRTICIDGGHAVDAAAIQDEAMQPWQPLGTKSILGYNLKKSIGQRHAQLCRRMLTPEIQYLMDLGANLWVTKLWKFIRDFLRW

SEQ ID NO: 865167 - protein, 433 aa, Homo sapiens
LIPEGTLVSEMLPPQKKPWESMAKGLVLGALFTSFLLLMYSYAVPPLHAGLASTTPEAAASCSPPALEPEAVIRANGSAGECQPRRNIVFLKTHKTASSTLLNILFRFGQKHRLKFAFPNGRNDFDYPTFFARSLVQDYRPGACFNIICNHMRFHYDEVRGLVPTNAIFITVLRDPARLFESSFHYFGPVVPLTWKLSAGDKLTEFLQDPDRYYDPNGFNAHYLRNLLFFDLGYDNSLDPSSPQVQEHILEVERRFHLVLLQEYFDESLVLLKDLLCWELEDVLYFKLNARRDSPVPRLSGELYGRATAWNMLDSHLYRHFNASFWRKVEAFGRERMAREVAALRHANERMRTICIDGGHAVDAAAIQDEAMQPWQPLGTKSILGYNLKKSIGQRHAQLCRRMLTPEIQYLMDLGANLWVTKLWKFIRDFLRW

SEQ ID NO: 865168 - protein, 443 aa, Homo sapiens
RGPGRASHAEAEEDGDKVSEMLPPQKKPWESMAKGLVLGALFTSFLLLMYSYAVPPLHAGLASTTPEAAASCSPPALEPEAVIRANGSAGECQPRRNIVFLKTHKTASSTLLNILFRFGQKHRLKFAFPNGRNDFDYPTFFARSLVQDYRPGACFNIICNHMRFHYDEVRGLVPTNAIFITVLRDPARLFESSFHYFGPVVPLTWKLSAGDKLTEFLQDPDRYYDPNGFNAHYLRNLLFFDLGYDNSLDPSSPQVQEHILEVERRFHLVLLQEYFDESLVLLKDLLCWELEDVLYFKLNARRDSPVPRLSGELYGRATAWNMLDSHLYRHFNASFWRKVEAFGRERMAREVAALRHANERMRTICIDGGHAVDAAAIQDEAMQPWQPLGTKSILGYNLKKSIGQRHAQLCRRMLTPEIQYLMDLGANLWVTKLWKFIRDFLRW

SEQ ID NO: 865169 - protein, 247 aa, Homo sapiens
MAKGLVLGALFTSFLLLMYSYAVPPLHAGLASTTPEAAASCSPPALEPEAVIRANGSAGECQPRRNIVFLKTHKTASSTLLNILFRFGQKHRLKFAFPNGRNDFDYPTFFARSLVQDYRPGACFNIICNHMRFHVNASFWRKVEAFGRERMAREVAALRHANERMRTICIDGGHAVDAAAIQDEAMQPWQPLGTKSILGYNLKKSIGQRHAQLCRRMLTPEIQYLMDLGANLWVTKLWKFIRDFLRW

SEQ ID NO: 865170 - protein, 322 aa, Homo sapiens
PARMATEGEAARPGLEGDLALPRVPAMATSSAALPRILGAGARAPSRWLGFLGKATPRPARPSRRTLGSATALMIRESEDSTDFNDKILNEPLKHSDFFNVKELFSVRSLFDARVHLGHKAGCRHRFMEPYIFGSRLDHDIIDLEQTATHLQLALNFTAHMAYRKGIILFISRNRQFSYLIENMARDCGEYAHTRYFRGGMLTNARLLFGPTVRLPDLIIFLHTLNNIFEPHVAVRDAAKMNIPTVGIVDTNCNPCLITYPVPGNDDSPLAVHLYCRLFQTAITRAKEKRQQVEALYRLQGQKEPGDQGPAHPPGADMSHSL

SEQ ID NO: 865171 - protein, 128 aa, Homo sapiens
PARMATEGEAARPGLEGDLALPRVPAMATSSAALPRILGAGARAPSRWLGFLGKATPRPARPSRRTLGSATALMIRESEDSTDFNDKILNEPLKHSDFFNVKELFSVRSLFDARVHLGHKAGCRHSFR

SEQ ID NO: 865172 - protein, 249 aa, Homo sapiens [sequence omitted]

SEQ ID NO: 865173 - protein, 322 aa, Homo sapiens; identical to SEQ ID NO: 865170

SEQ ID NO: 865174 - protein, 211 aa, Homo sapiens
MSFWRHVGCPHIHMGFMEPYIFGSRLDHDIIDLEQTATHLQLALNFTAHMAYRKGIILFISRNRQFSYLIENMARDCGEYAHTRYFRGGMLTNARLLFGPTVRLPDLIIFLHTLNNIFEPHVAVRDAAKMNIPTVGIVDTNCNPCLITYPVPGNDDSPLAVHLYCRLFQTAITRAKEKRQQVEALYRLQGQKEPGDQGPAHPPGADMSHSL

SEQ ID NO: 865175 - protein, 125 aa, Homo sapiens
PARMATEGEAARPGLEGDLALPRVPAMATSSAALPRILGAGARAPSRWLGFLGKATPRPARPSRRTLGSATALMIRESEDSTDFNDKILNEPLKHSDFFNVKELFSVRSLFDARVHLGWWDSQAR

SEQ ID NO: 865176 - protein, 322 aa, Homo sapiens; identical to SEQ ID NO: 865170

SEQ ID NO: 865177 - protein, 304 aa, Homo sapiens
MRWGAGVVHSGLGARTSIYFPPGARAPSRWLGFLGKATPRPARPSRRTLGSATALMIRESEDSTDFNDKILNEPLKHSDFFNVKELFSVRSLFDARVHLGHKAGCRHRFMEPYIFGSRLDHDIIDLEQTATHLQLALNFTAHMAYRKGIILFISRNRQFSYLIENMARDCGEYAHTRYFRGGMLTNARLLFGPTVRLPDLIIFLHTLNNIFEPHVAVRDAAKMNIPTVGIVDTNCNPCLITYPVPGNDDSPLAVHLYCRLFQTAITRAKEKRQQVEALYRLQGQKEPGDQGPAHPPGADMSHSL

SEQ ID NO: 865178 - protein, 195 aa, Homo sapiens [sequence omitted]

SEQ ID NO: 865179 - protein, 389 aa, Homo sapiens
PARMATEGEAARPGLEGDLALPRVPAMATSSAALPRILGAGARAPSRWLGFLGKATPRPARPSRRTLGSATALMIRESEDSTGNTGRPAELGGNEERPAAAGDANPRGAWALHAVETARSAGLLPLPCSPPLGPAYVAQRAEATASPWKDFNDKILNEPLKHSDFFNVKELFSVRSLFDARVHLGHKAGCRHRFMEPYIFGSRLDHDIIDLEQTATHLQLALNFTAHMAYRKGIILFISRNRQFSYLIENMARDCGEYAHTRYFRGGMLTNARLLFGPTVRLPDLIIFLHTLNNIFEPHVAVRDAAKMNIPTVGIVDTNCNPCLITYPVPGNDDSPLAVHLYCRLFQTAITRAKEKRQQVEALYRLQGQKEPGDQGPAHPPGADMSHSL

SEQ ID NO: 865180 - protein, 217 aa, Homo sapiens
VTEMVKTRGDLGDITSLVPTRFMEPYIFGSRLDHDIIDLEQTATHLQLALNFTAHMAYRKGIILFISRNRQFSYLIENMARDCGEYAHTRYFRGGMLTNARLLFGPTVRLPDLIIFLHTLNNIFEPHVAVRDAAKMNIPTVGIVDTNCNPCLITYPVPGNDDSPLAVHLYCRLFQTAITRAKEKRQQVEALYRLQGQKEPGDQGPAHPPGADMSHSL

SEQ ID NO: 865181 - protein, 322 aa, Homo sapiens; identical to SEQ ID NO: 865170

SEQ ID NO: 865182 - protein, 86 aa, Homo sapiens
INPFFPRSPPDRRRAAIMDTSRVQPIKLARVTKVLGRTGSQGQCTQVRVEFMDDTSRSIIRNVKGPVREGDVLTLLESEREARRLR

SEQ ID NO: 865183 - protein, 94 aa, Homo sapiens
NSRPRRHGCERRQKGSPPDRRRAAIMDTSRVQPIKLARVTKVLGRTGSQGQCTQVRVEFMDDTSRSIIRNVKGPVREGDVLTLLESEREARRLR

SEQ ID NO: 865184 - protein, 81 aa, Homo sapiens
WYGRGEDRRAAIMDTSRVQPIKLARVTKVLGRTGSQGQCTQVRVEFMDDTSRSIIRNVKGPVREGDVLTLLESEREARRLR

SEQ ID NO: 865185 - protein, 76 aa, Homo sapiens
WIRIRIQPDQRRVQPIKLARVTKVLGRTGSQGQCTQVRVEFMDDTSRSIIRNVKGPVREGDVLTLLESEREARRLR

SEQ ID NO: 865186 - protein, 120 aa, Homo sapiens
LLLLNSRPRRPLASLIGCTRLVSAYQAGQGHQGPGQDRFSGTVHAGARGIHGRHEPIHHPQCKRPRARGRRAHPFGVRARSPEVALSLAARWVLDVGFDHLADGNGLSQSAPFFLSATRN

SEQ ID NO: 865187 - protein, 108 aa, Homo sapiens
  misc_feature (41)..(41): Xaa can be any naturally occurring amino acid
FSTCLVPSGFSRTTAFTMKLHELSQFKLGLLQHFYFSNASXLPIRHEIKLARVTKVLGRTGSQGQCTQVRVEFMDDTSRSIIRNVKGPVREGDVLTLLESEREARRLR

SEQ ID NO: 865188 - protein, 92 aa, Homo sapiens
ESEIYADEYDSEMDFGDRRRAAIMDTSRVQPIKLARVTKVLGRTGSQGQCTQVRVEFMDDTSRSIIRNVKGPVREGDVLTLLESEREARRLR

SEQ ID NO: 865189 - protein, 90 aa, Homo sapiens
  misc_feature (2)..(2): Xaa can be any naturally occurring amino acid
  misc_feature (7)..(8): Xaa can be any naturally occurring amino acid
AXFREPXXVMSLRQYRRRAAIMDTSRVQPIKLARVTKVLGRTGSQGQCTQVRVEFMDDTSRSIIRNVKGPVREGDVLTLLESEREARRLR

SEQ ID NO: 865190 - protein, 134 aa, Homo sapiens
GNWPSCNAKVTFLLSPALTMWRVVTEPPCIEDILIQVAFSSMVTIFNIITTTTITPHSDRRRAAIMDTSRVQPIKLARVTKVLGRTGSQGQCTQVRVEFMDDTSRSIIRNVKGPVREGDVLTLLESEREARRLR

SEQ ID NO: 865191 - protein, 81 aa, Homo sapiens; identical to SEQ ID NO: 865184

SEQ ID NO: 865192 - protein, 81 aa, Homo sapiens; identical to SEQ ID NO: 865184

SEQ ID NO: 865193 - protein, 94 aa, Homo sapiens; identical to SEQ ID NO: 865183

SEQ ID NO: 865194 - protein, 94 aa, Homo sapiens; identical to SEQ ID NO: 865183

SEQ ID NO: 865195 - protein, 117 aa, Homo sapiens
MVPFNDLYSGPDTFSEFISASHSAVPFRGPPLLLPPLRWGPVGARGIHGRHEPIHHPQCKRPRARGRRAHPFGVRARSPEVALSLAARWVLDVGFDHLADGNGLSQSAPFFLSATRN

SEQ ID NO: 865196 - protein, 134 aa, Homo sapiens; identical to SEQ ID NO: 865190

SEQ ID NO: 865197 - protein, 78 aa, Homo sapiens
IRGGALLLLLDHGLYQPIKLARVTKVLGRTGSQGQCTQVRVEFMDDTSRSIIRNVKGPVREGDVLTLLESEREARRLR

SEQ ID NO: 865198 - protein, 93 aa, Homo sapiens
AAAYYYYTARIQASNDVRGARGIHGRHEPIHHPQCKRPRARGRRAHPFGVRARSPEVALSLAARWVLDVGFDHLADGNGLSQSAPFFLSATRN

SEQ ID NO: 865199 - protein, 86 aa, Homo sapiens; identical to SEQ ID NO: 865182

SEQ ID NO: 865200 - protein, 92 aa, Homo sapiens; identical to SEQ ID NO: 865188

SEQ ID NO: 865201 - protein, 212 aa, Homo sapiens
MVIDVRHGTLVPVVVLESRRREELAEASEGKPLGSGLLNWFDCDVSFSLLFCHRGPHCNILRDVSPTVTPRSCSPFRTFLDGRPSPFLKSSLARLRVSAQDLDRPDMAAAGNGGGRGTAPQTPGVARLSSARQAPAQHRRAAIMDTSRVQPIKLARVTKVLGRTGSQGQCTQVRVEFMDDTSRSIIRNVKGPVREGDVLTLLESEREARRLR

SEQ ID NO: 865202 - protein, 72 aa, Homo sapiens
AYGKALPYADAYGKAKVTKVLGRTGSQGQCTQVRVEFMDDTSRSIIRNVKGPVREGDVLTLLESEREARRLR

SEQ ID NO: 865203 - protein, 94 aa, Homo sapiens; identical to SEQ ID NO: 865183

SEQ ID NO: 865204 - protein, 94 aa, Homo sapiens; identical to SEQ ID NO: 865183

SEQ ID NO: 865205 - protein, 86 aa, Homo sapiens; identical to SEQ ID NO: 865182

SEQ ID NO: 865206 - protein, 91 aa, Homo sapiens
VSSRGSLMRFSGTVHAGARGIHGRHEPIHHPQCKRPRARGRRAHPFGVRARSPEVALSLAARWVLDVGFDHLADGNGLSQSAPFFLSATRN

SEQ ID NO: 865207 - protein, 117 aa, Homo sapiens; identical to SEQ ID NO: 865195

SEQ ID NO: 865208 - protein, 112 aa, Homo sapiens
MVPFNDLYSGPDTFSEFISASHSAVPFRGPPLLLPPLRWGPVGARGIHGRHEPIHHPQCKRPRARGRRAHPFGVRARSPEVALSLAARWWVQRGHPFDRPLVGGREASLSPG

SEQ ID NO: 865209 - protein, 287 aa, Homo sapiens
ARKRSSPGLYPAQLGAAASSGVVSPPGMGLLDLCEEVFGTADLYRVLGVRREASDGEVRRGYHKVSLQVHPDRVGEGDKEDATRRFQILGKVYSVLSDREQRAVYDEQGTVDEDSPVLTQDRDWEAYWRLLFKKISLEDIQAFEKTYKGSEEELADIKQAYLDFKGDMDQIMESVLCVQYTEEPRIRNIIQQAIDAGEVPSYNAFVKESKQKMNARKRRAQEEAKEAEMSRKELGLDEGVDSLKAAIQSRQKDRQKEMDNFLAQMEAKYCKSSKGGGKKSALKKEKK

SEQ ID NO: 865210 - protein, 80 aa, Homo sapiens
YGSPTMVARKRRAQEEAKEAEMSRKELGLDEGVDSLKAAIQSRQKDRQKEMDNFLAQMEAKYCKSSKGGGKKSALKKEKK

SEQ ID NO: 865211 - protein, 287 aa, Homo sapiens; identical to SEQ ID NO: 865209

SEQ ID NO: 865212 - protein, 102 aa, Homo sapiens
RKRSSPGLYPAQLGAAASSGVVSPPGMGLLDLCEEVFGTADLYRVLGVRREASDGEVRRGYHKVSLQVHPDRVGEGDKEDATRRFQVCRVPPRSRPAARASP

SEQ ID NO: 865213 - protein, 287 aa, Homo sapiens; identical to SEQ ID NO: 865209

SEQ ID NO: 865214 - protein, 255 aa, Homo sapiens
ARKRSSPGLYPAQLGAAASSGVVSPPGMGLLDLCEEVFGTADLYRVLGVRREASDGEVRRGYHKVSLQVHPDRVGEGDKEDATRRFQILGKVYSVLSDREQRAVYDEQGTVDEDSPVLTQDRDWEAYWRLLFKKISLEDIQAFEKTYKGSEEELADIKQAYLDFKGDMDQIMESVLCVQYTEEPRIRNIIQQAIDAGEVPSYNAFVKESKQKMNARKRRAQEEAKEAEMSRKELGLDEGVDSLKAAIQVLASRLC

SEQ ID NO: 865215 - protein, 447 aa, Homo sapiens
MAAALKCLLTLGRWCPGLGVAPQARALAALVPGVTQVDNKSGFLQKRPHRQHPGILKLPHVRLPQALANGAQLLLLGSAGPTMENQVQTLTSYLWSRHLPVEPEELQRRARHLEKKFLENPDLSQTEEKLRGAVLHALRKTTYHWQELSYTEGLSLVYMAARLDGGFAAVSRAFHEIRARNPAFQPQTLMDFGSGTGSVTWAAHSIWGQSLREYMCVDRSAAMLVLAEKLLKGGSESGEPYIPGVFFRQFLPVSPKVQFDVVVSAFSLSELPSKADRTEVVQTLWRKTGHFLVLVENGTKAGHSLLMDARDLVLKGKEKSPLDPRPGFVFAPCPHELPCPQLTNLACSFSQAYHPIPFSWNKKPKEEKFSMVILARGSPEEAHRWPRITQPVLKRPRHVHCHLCCPDGHMQHAVLTARRHGSSWGDLLPVLTPSAFPPSTAQDPSES

SEQ ID NO: 865216 - protein, 158 aa, Homo sapiens
MAAALKCLLTLGRWCPGLGVAPQARALAALVPGVTQVDNKSGFLQKRPHRQHPGILKLPHVRLPQALANGAQLLLLGSAGPTMENQVQTLTSYLWSRHLPVEPEELQRRARHLEKKFLENPGPDFQSLFSPQTYLRQRRNFVEQCYTHYVKLPTIGKN

SEQ ID NO: 865217 - protein, 294 aa, Homo sapiens
MAAALKCLLTLGRWCPGLGVAPQARALAALVPGVTQVDNKSGFLQKRPHRQHPGILKLPHVRLPQALANGAQLLLLGSAGPTMENQVQTLTSYLWSRHLPVEPEELQRRARHLEKKFLENPDLSQTEEKLRGAVLHALRKTTYHWQELSYTEGLSLVYMAARLDGGFAAVSRAFHEIRARNPAFQPQTLMDFGSGTGSVTWAAHSIWGQSLREYMCVDRSAAMLVLAEKLLKGGSESGEPYIPGVFFRQFLPVSPKVQFDVVVSAFSLSELPSKADRTEVVQTLWRKTGHFLVS

SEQ ID NO: 865218 - protein, 461 aa, Homo sapiens
MAAALKCLLTLGRWCPGLGVAPQARALAALVPGVTQVDNKSGFLQKRPHRQHPGILKLPHVRLPQALANGAQLLLLGSAGPTMENQVQTLTSYLWSRHLPVEPEELQRRARHLEKKFLENPDLSQTEEKLRGAVLHALRKTTYHWQELSYTEGLSLVYMAARLDGGFAAVSRAFHEIRARNPAFQPQTLMDFGSGTGSVTWAAHSIWGQSLREYMCVDRSAAMLVLAEKLLKGGSESGEPYIPGVFFRQFLPVSPKVQFDVVVSAFSLSELPSKADRTEVVQTLWRKTGHFLVLVENGTKAGHSLLMDARDLVLKCPHELPCPQLTNLACSFSQAYHPIPFSWNKKPKEEKFSMVILARGSPEEAHRWPRITQPVLKRPRHVHCHLCCPDGHMQHAVLTARRHGRYGGCDQNQWDVAGSCSPRQHLFPQGFVSLCPCQLLGRSFTCAYSVCVSSIYGSGSL

SEQ ID NO: 865219 - protein, 494 aa, Homo sapiens
MVPRPWSGSPGPGECLHSLLSERLWICRDISAQRRSAPGSPRPSDCQQLSFLPGNQPTFLCLQALAALVPGVTQVDNKSGFLQKRPHRQHPGILKLPHVRLPQALANGAQLLLLGSAGPTMENQVQTLTSYLWSRHLPVEPEELQRRARHLEKKFLENPDLSQTEEKLRGAVLHALRKTTYHWQELSYTEGLSLVYMAARLDGGFAAVSRAFHEIRARNPAFQPQTLMDFGSGTGSVTWAAHSIWGQSLREYMCVDRSAAMLVLAEKLLKGGSESGEPYIPGVFFRQFLPVSPKVQFDVVVSAFSLSELPSKADRTEVVQTLWRKTGHFLVLVENGTKAGHSLLMDARDLVLKGKEKSPLDPRPGFVFAPCPHELPCPQLTNLACSFSQAYHPIPFSWNKKPKEEKFSMVILARGSPEEAHRWPRITQPVLKRPRHVHCHLCCPDGHMQHAVLTARRHGRDLYRCARVSSWGDLLPVLTPSAFPPSTAQDPSES

SEQ ID NO: 865220 - protein, 374 aa, Homo sapiens [sequence omitted]

SEQ ID NO: 865221 - protein, 158 aa, Homo sapiens
MAAALKCLLTLGRWCPGLGVAPQARALAALVPGVTQVDNKSGFLQKRPHRQHPGILKLPHVRLPQALANGAQLLLLGSAGPTMENQVQTLTSYLWSRHLPVEPEELQRRARHLEKKFLENPDLSQTEEKLRGAVLHALRKTTYHWQELSVPMNSLVPS

SEQ ID NO: 865222 - protein, 191 aa, Homo sapiens [sequence omitted]

SEQ ID NO: 865223 - protein, 108 aa, Homo sapiens
MVILARGSPEEAHRWPRITQPVLKRPRHVHCHLCCPDGHMQHAVLTARRHGRYGGCDQNQWDVAGSCSPRQHLFPQGFVSLCPCQLLGRSFTCAYSVCVSSIYGSGSL

SEQ ID NO: 865224 - protein, 232 aa, Homo sapiens
MAAALKCLLTLGRWCPGLGVAPQARALAALVPGVTQVDNKSGFLQKRPHRQHPGILKLPHVRLPQALANGAQLLLLGSAGPTMENQVQTLTSYLWSRHLPVEPEELQRRARHLEKKFLENPDLSQTEEKLRGAVLHALRKTTYHWQELSYTEGLSLVYMAARLDGGFAAVSRAFHEIRARNPAFQPQTLMDFGSGTGSVTWAAHSIWGQSLREYMCVDRSAAMLVLAEKLLK

SEQ ID NO: 865225 - protein, 154 aa, Homo sapiens
MAAALKCLLTLGRWCPGLGVAPQARALAALVPGVTQVDNKSGFLQKRPHRQHPGILKLPHVRLPQALANGAQLLLLGSAGPTMENQVQTLTSYLWSRHLPVEPEELQRRARHLEKKFLENPDLSQTEEKLRGAVLHALRKTTYHWQELRVDEDV

SEQ ID NO: 865226 - protein, 456 aa, Homo sapiens
MAAALKCLLTLGRWCPGLGVAPQARALAALVPGVTQVDNKSGFLQKRPHRQHPGILKLPHVRLPQALANGAQLLLLGSAGPTMENQVQTLTSYLWSRHLPVEPEELQRRARHLEKKFLENPDLSQTEEKLRGAVLHALRKTTYHWQELSYTEGLSLVYMAARLDGGFAAVSRAFHEIRARNPAFQPQTLMDFGSGTGSVTWAAHSIWGQSLREYMCVDRSAAMLVLAEKLLKGGSESGEPYIPGVFFRQFLPVSPKVQFDVVVSAFSLSELPSKADRTEVVQTLWRKTGHFLVLVENGTKAGHSLLMDARDLVLKGKEKSPLDPRPGFVFAPCPHELPCPQLTNLACSFSQAYHPIPFSWNKKPKEEKFSMVILARGSPEEAHRWPRITQPVLKRPRHVHCHLCCPDGHMQHAVLTARRHGRDLYRCARVSSWGDLLPVLTPSAFPPSTAQDPSES

SEQ ID NO: 865227 - protein, 478 aa, Homo sapiens
MAAALKCLLTLGRWCPGLGVAPQARALAALVPGVTQVDNKSGFLQKRPHRQHPGILKLPHVRLPQALANGAQLLLLGSAGPTMENQVQTLTSYLWSRHLPVEPEELQRRARHLEKKFLENPDLSQTEEKLRGAVLHALRKTTYHWQELSYTEGLSLVYMAARLDGGFAAVSRAFHEIRARNPAFQPQTLMDFGSGTGSVTWAAHSIWGQSLREYMCVDRSAAMLVLAEKLLKGGSESGEPYIPGVFFRQFLPVSPKVQFDVVVSAFSLSELPSKADRTEVVQTLWRKTGHFLVLVENGTKAGHSLLMDARDLVLKGKEKSPLDPRPGFVFAPCPHELPCPQLTNLACSFSQAYHPIPFSWNKKPKEEKFSMVILARGSPEEAHRWPRITQPVLKRPRHVHCHLCCPDGHMQHAVLTARRHGRYGGCDQNQWDVAGSCSPRQHLFPQGFVSLCPCQLLGRSFTCAYSVCVSSIYGSGSL

SEQ ID NO: 865228 - protein, 294 aa, Homo sapiens; identical to SEQ ID NO: 865217

SEQ ID NO: 865229 - protein, 344 aa, Homo sapiens
MAAALKCLLTLGRWCPGLGVAPQARALAALVPGVTQVDNKSGFLQKRPHRQHPGILKLPHVRLPQALANGAQLLLLGSAGPTMENQVQTLTSYLWSRHLPVEPEELQRRARHLEKKFLENPDLSQTEEKLRGAVLHALRKTTYHWQELSYTEGLSLVYMAARLDGGFAAVSRAFHEIRARNPAFQPQTLMDFGSGTGSVTWAAHSIWGQSLREYMCVDRSAAMLVLAEKLLKGGSESGEPYIPGVFFRQFLPVSPKVQFDVVVSAFSLSELPSKADRTEVVQTLWRKTGHFLVLVENGTKAGHSLLMDARDLVLKGKEKSPLDPRPGFVFAPVSITSACPTTRI

SEQ ID NO: 865230 - protein, 467 aa, Homo sapiens
MAAALKCLLTLGRWCPGLGVAPQARALAALVPGVTQVDNKSGFLQKRPHRQHPGILKLPHVRLPQALANGAQLLLLGSAGPTMENQVQTLTSYLWSRHLPVEPEELQRRARHLEKKFLENPGPDFQSLFLTTDLSQTEEKLRGAVLHALRKTTYHWQELSYTEGLSLVYMAARLDGGFAAVSRAFHEIRARNPAFQPQTLMDFGSGTGSVTWAAHSIWGQSLREYMCVDRSAAMLVLAEKLLKGGSESGEPYIPGVFFRQFLPVSPKVQFDVVVSAFSLSELPSKADRTEVVQTLWRKTGHFLVLVENGTKAGHSLLMDARDLVLKGKEKSPLDPRPGFVFAPCPHELPCPQLTNLACSFSQAYHPIPFSWNKKPKEEKFSMVILARGSPEEAHRWPRITQPVLKRPRHVHCHLCCPDGHMQHAVLTARRHGRDLYRCARVSSWGDLLPVLTPSAFPPSTAQDPSES

SEQ ID NO: 865231 - protein, 374 aa, Homo sapiens [sequence omitted]

SEQ ID NO: 865232 - protein, 349 aa, Homo sapiens
EACVRVGGVYRIPEREENEDDLSVARLNALSCITVHISQGLSYTEGLSLVYMAARLDGGFAAVSRAFHEIRARNPAFQPQTLMDFGSGTGSVTWAAHSIWGQSLREYMCVDRSAAMLVLAEKLLKGGSESGEPYIPGVFFRQFLPVSPKVQFDVVVSAFSLSELPSKADRTEVVQTLWRKTGHFLVLVENGTKAGHSLLMDARDLVLKGKEKSPLDPRPGFVFAPCPHELPCPQLTNLACSFSQAYHPIPFSWNKKPKEEKFSMVILARGSPEEAHRWPRITQPVLKRPRHVHCHLCCPDGHMQHAVLTARRHGRDLYRCARVSSWGDLLPVLTPSAFPPSTAQDPSES

SEQ ID NO: 865233 - protein, 240 aa, Homo sapiens
AGLVRKVLRRQFLPVSPKVQFDVVVSAFSLSELPSKADRTEVVQTLWRKTGHFLVLVENGTKAGHSLLMDARDLVLKGKEKSPLDPRPGFVFAPCPHELPCPQLTNLACSFSQAYHPIPFSWNKKPKEEKFSMVILARGSPEEAHRWPRITQPVLKRPRHVHCHLCCPDGHMQHAVLTARRHGRYGGCDQNQWDVAGSCSPRQHLFPQGFVSLCPCQLLGRSFTCAYSVCVSSIYGSGSL

SEQ ID NO: 865234 - protein, 180 aa, Homo sapiens
MAAALKCLLTLGRWCPGLGVAPQARALAALVPGVTQVDNKSGFLQKRPHRQHPGILKLPHVRLPQALANGAQLLLLGSAGPTMENQVQTLTSYLWSRHLPVEPEELQRRARHLEKKFLENPDLSQTEEKLRGAVLHALRKTTYHWQELSYTEGLSLVYMAARLDGGFAAVSRAFHEVKVP

SEQ ID NO: 865235 - protein, 106 aa, Homo sapiens
  misc_feature (91)..(91): Xaa can be any naturally occurring amino acid
  misc_feature (93)..(93): Xaa can be any naturally occurring amino acid
MAAALKCLLTLGRWCPGLGVAPQARALAALVPGVTQVDNKSGFLQKRPHRQHPGILKLPHVRLPQALANGAQLLLLASAGPAVANQALALXRXGWGGPPAGEPDGA

SEQ ID NO: 865236 - protein, 102 aa, Homo sapiens
MFLTMEAKKEDNLDLNQYFLHLNSPHHYGSKPDTEPNRNTFLQIQSCSPWKTLKPSVVAAGGLHQNAAIHLAAGGLHQNAAIHLCFCSTYKKCSLAHSRGQL

SEQ ID NO: 865237 - protein, 691 aa, Homo sapiens
AELREDLLAAVRSGGGRGRPAMIASCLCYLLLPATRLFRALSDAFFTCRKNVLLANSSSPQVEGDFAMAPRGPEQEECEGLLQQWREEGLSQVLSTASEGPLIDKGLAQSSLALLMDNPGEENAASEDRWSSRQLSDLRAAENLDEPFPEMLGEEPLLEVEGVEGSMWAAIPMQSEPQYADCAALPVGALATEQWEEDPAVLAWSIAPEPVPQEEASIWPFEGLGQLQPPAVEIPYHEILWREWEDFSTQPDAQGLKAGDGPQFQFTLMSYNILAQDLMQQSSELYLHCHPDILNWNYRFVNLMQEFQHWDPDILCLQEVQEDHYWEQLEPSLRMMGFTCFYKRRTGCKTDGCAVCYKPTRFRLLCASPVEYFRPGLELLNRDNVGLVLLLQPLVPEGLGQVSVAPLCVANTHILYNPRRGDVKLAQMAILLAEVDKVARLSDGSHCPIILCGDLNSVPDSPLYNFIRDGELQYHGMPAWKVSGQEDFSHQLYQRKLQAPLWPSSLGITDCCQYVTSCHPKRSERRKYGRDFLLRFRFCSIACQRPVGLVLMEGVTDTKPERPAGWAESVLEEDASELEPAFSRTVGTIQHCLHLTSVYTHFLPQRGRPEVTTMPLGLGMTVDYIFFSAESCENGNRTDHRLYRDGTLKLLGRLSLLSEEILWAANGLPNPFCSSDHLCLLASFGMEVTAP

SEQ ID NO: 865238 - protein, 691 aa, Homo sapiens; identical to SEQ ID NO: 865237

SEQ ID NO: 865239 - protein, 691 aa, Homo sapiens; identical to SEQ ID NO: 865237

SEQ ID NO: 865240 - protein, 624 aa, Homo sapiens [sequence omitted]

SEQ ID NO: 865241 - protein, 691 aa, Homo sapiens; identical to SEQ ID NO: 865237

SEQ ID NO: 865242 - protein, 691 aa, Homo sapiens; identical to SEQ ID NO: 865237

SEQ ID NO: 865243 - protein, 224 aa, Homo sapiens
MGEVRPVHGMPAWKVSGQEDFSHQLYQRKLQAPLWPSSLGITDCCQYVTSCHPKRSERRKYGRDFLLRFRFCSIACQRPVGLVLMEGVTDTKPERPAGWAESVLEEDASELEPAFSRTVGTIQHCLHLTSVYTHFLPQRGRPEVTTMPLGLGMTVDYIFFSAESCENGNRTDHRLYRDGTLKLLGRLSLLSEEILWAANGLPNPFCSSDHLCLLASFGMEVTAP

SEQ ID NO: 865244 - protein, 691 aa, Homo sapiens; identical to SEQ ID NO: 865237

SEQ ID NO: 865245 - protein, 691 aa, Homo sapiens; identical to SEQ ID NO: 865237

SEQ ID NO: 865246 - protein, 691 aa, Homo sapiens; identical to SEQ ID NO: 865237

SEQ ID NO: 865247 - protein, 190 aa, Homo sapiens
  misc_feature (63)..(63): Xaa can be any naturally occurring amino acid
AELREDLLAAVRSGGGRGRPAMIASCLCYLLLPATRLFRALSDAFFTCRKNVLLANSSSPFRXHSAAMTLRPPPSRCGGYDSLKVDNLTYRTSPDTLRRVFEKYGQRRRTCTSTRDRYTKESRRLRLRSLFTTKRDAEDAMDAMDRGRAGTDSELARMHNDSSIQATPQRITTTRQTGTDNHAKYTGAGG

SEQ ID NO: 865248 - protein, 691 aa, Homo sapiens; identical to SEQ ID NO: 865237

SEQ ID NO: 865249 - protein, 624 aa, Homo sapiens [sequence omitted]

SEQ ID NO: 865250 - protein, 691 aa, Homo sapiens; identical to SEQ ID NO: 865237

SEQ ID NO: 865251 - protein, 691 aa, Homo sapiens; identical to SEQ ID NO: 865237

SEQ ID NO: 865252 - protein, 368 aa, Homo sapiens
MKRSIHIVALGNEGDTFHQDNRPSGLIRTYLGRSPLVSGDESSLLLNAASTVARPVFTEYQASAFGNVKLVVHDCPVWDIFDSDWYTSRNLIGGADIIVIKYNVNDKFSFHEVKDNYIPVIKRALNSVPVIIAAVGTRQNEELPCTCPLCTSDRGSCVSTTEGIQLAKELGATYLELHSLDDFYIGKYFGGVLEYFMIQALNQKTSEKMKKRKMSNSFHGIRPPQLEQPEKMPVLKAEASHYNSDLNNLLFCCQCVDVVFYNPNLKKVVEAHKIVLCAVSHVFMLLFNVKSPTDIQDSSIIRTTQDLFAINRDTAFPGASHESSGNPPLRVIVKDALFCSCLSDILRFIYSGILSSGSGYLQSHKLWK

SEQ ID NO: 865253 - protein, 72 aa, Homo sapiens
SQKPEFQDLSDHTELLSKEQGRKQEVTGIFQAMCLLICAEMYQVSRLQHICELFIITQLAARTLRMRPNPQL

SEQ ID NO: 865254 - protein, 611 aa, Homo sapiens
MSIHIVALGNEGDTFHQDNRPSGLIRTYLGRSPLVSGDESSLLLNAASTVARPVFTEYQASAFGNVKLVVHDCPVWDIFDSDWYTSRNLIGGADIIVIKYNVNDKFSFHEVKDNYIPVIKRALNSVPVIIAAVGTRQNEELPCTCPLCTSDRGSCVSTTEGIQLAKELGATYLELHSLDDFYIGKYFGGVLEYFMIQALNQKTSEKMKKRKMSNSFHGIRPPQLEQPEKMPVLKAEASHYNSDLNNLLFCCQCVDVVFYNPNLKKVVEAHKIVLCAVSHVFMLLFNVKSPTDIQDSSIIRTTQDLFAINRDTAFPGASHESSGNPPLRVIVKDALFCSCLSDILRFIYSGAFQWEELEEDIRKKLKDSGDVSNVIEKVKCILKTPGKINCLRNCKTYQARKPLWFYNTSLKFFLNKPMLADVVFEIQGTTVPAHRAILVARCEVMAAMFNGNYMEAKSVLIPVYGVSKETFLSFLEYLYTDSCCPAGIFQAMCLLICAEMYQVSRLQHICELFIITQLQSMPSRELASMNLDIVDLLKKAKFHHSDCLSTWLLHFIATNYLIFSQKPEFQDLSVEERSFVEKHRWPSNMYLKQLAEYRKYIHSRKCRCLVM

SEQ ID NO: 865255 - protein, 611 aa, Homo sapiens; identical to SEQ ID NO: 865254

SEQ ID NO: 865256 - protein, 611 aa, Homo sapiens; identical to SEQ ID NO: 865254

SEQ ID NO: 865257 - protein, 611 aa, Homo sapiens; identical to SEQ ID NO: 865254

SEQ ID NO: 865258 - protein, 611 aa, Homo sapiens; identical to SEQ ID NO: 865254

SEQ ID NO: 865259 - protein, 326 aa, Homo sapiens
MISHEIIPRDLAQDRAVIEKESCMDFLEGLCHWNLSRGPPIETLIVKDALFCSCLSDILRFIYSGAFQWEELEEDIRKKLKDSGDVSNVIEKVKCILKTPGKINCLRNCKTYQARKPLWFYNTSLKFFLNKPMLADVVFEIQGTTVPAHRAILVARCEVMAAMFNGNYMEAKSVLIPVYGVSKETFLSFLEYLYTDSCCPAGIFQAMCLLICAEMYQVSRLQHICELFIITQLQSMPSRELASMNLDIVDLLKKAKFHHSDCLSTWLLHFIATNYLIFSQKPEFQDLSVEERSFVEKHRWPSNMYLKQLAEYRKYIHSRKCRCLVM

SEQ ID NO: 865260 - protein, 611 aa, Homo sapiens; identical to SEQ ID NO: 865254

SEQ ID NO: 865261 - protein, 599 aa, Homo sapiens
  misc_feature (593)..(593): Xaa can be any naturally occurring amino acid
MSIHIVALGNEGDTFHQDNRPSGLIRTYLGRSPLVSGDESSLLLNAASTVARPVFTEYQASAFGNVKLVVHDCPVWDIFDSDWYTSRNLIGGADIIVIKYNVNDKFSFHEVKDNYIPVIKRALNSVPVIIAAVGTRQNEELPCTCPLCTSDRGSCVSTTEGIQLAKELGATYLELHSLDDFYIGKYFGGVLEYFMIQALNQKTSEKMKKRKMSNSFHGIRPPQLEQPEKMPVLKAEASHYNSDLNNLLFCCQCVDVVFYNPNLKKVVEAHKIVLCAVSHVFMLLFNVKSPTDIQDSSIIRTTQDLFAINRDTAFPGASHESSGNPPLRVIVKDALFCSCLSDILRFIYSGAFQWEELEEDIRKKLKDSGDVSNVIEKVKCILKTPGKINCLRNCKTYQARKPLWFYNTSLKFFLNKPMLADVVFEIQGTTVPAHRAILVARCEVMAAMFNGNYMEAKSVLIPVYGVSKETFLSFLEYLYTDSCCPAGIFQAMCLLICAEMYQVSRLQHICELFIITQLQSMPSRELASMNLDIVDLLKKAKFHHSDCLSTWLLHFIATNYLIFSQKPEFQDLSVGKERQFFVWKKAQVGPFEXGYFEGQ

SEQ ID NO: 865262 - protein, 366 aa, Homo sapiens
MSIHIVALGNEGDTFHQDNRPSGLIRTYLGRSPLVSGDESSLLLNAASTVARPVFTEYQASAFGNVKLVVHDCPVWDIFDSDWYTSRNLIGGADIIVIKYNVNDKFSFHEVKDNYIPVIKRALNSVPVIIAAVGTRQNEELPCTCPLCTSDRGSCVSTTEGIQLAKELGATYLELHSLDDFYIGKYFGGVLEYFMIQALNQKTSEKMKKRKMSNSFHGIRPPQLEQPEKMPVLKAEASHYNSDLNNLLFCCQCVDVVFYNPNLKKVVEAHKIVLCAVSHVFMLLFNVKSPTDIQDSSIIRTTQDLFAINRDTAFPGASHESSGNPPLRVIVKDALFCSCLSDILRFIYSGILSSGSGYLQSHKLWK

SEQ ID NO: 865263 - protein, 611 aa, Homo sapiens; identical to SEQ ID NO: 865254

SEQ ID NO: 865264 - protein, 611 aa, Homo sapiens; identical to SEQ ID NO: 865254

SEQ ID NO: 865265 - protein, 611 aa, Homo sapiens; identical to SEQ ID NO: 865254

SEQ ID NO: 865266 - protein, 611 aa, Homo sapiens; identical to SEQ ID NO: 865254

SEQ ID NO: 865267 - protein, 611 aa, Homo sapiens; identical to SEQ ID NO: 865254

SEQ ID NO: 865268 - protein, 613 aa, Homo sapiens
MKRSIHIVALGNEGDTFHQDNRPSGLIRTYLGRSPLVSGDESSLLLNAASTVARPVFTEYQASAFGNVKLVVHDCPVWDIFDSDWYTSRNLIGGADIIVIKYNVNDKFSFHEVKDNYIPVIKRALNSVPVIIAAVGTRQNEELPCTCPLCTSDRGSCVSTTEGIQLAKELGATYLELHSLDDFYIGKYFGGVLEYFMIQALNQKTSEKMKKRKMSNSFHGIRPPQLEQPEKMPVLKAEASHYNSDLNNLLFCCQCVDVVFYNPNLKKVVEAHKIVLCAVSHVFMLLFNVKSPTDIQDSSIIRTTQDLFAINRDTAFPGASHESSGNPPLRVIVKDALFCSCLSDILRFIYSGAFQWEELEEDIRKKLKDSGDVSNVIEKVKCILKTPGKINCLRNCKTYQARKPLWFYNTSLKFFLNKPMLADVVFEIQGTTVPAHRAILVARCEVMAAMFNGNYMEAKSVLIPVYGVSKETFLSFLEYLYTDSCCPAGIFQAMCLLICAEMYQVSRLQHICELFIITQLQSMPSRELASMNLDIVDLLKKAKFHHSDCLSTWLLHFIATNYLIFSQKPEFQDLSVEERSFVEKHRWPSNMYLKQLAEYRKYIHSRKCRCLVM

SEQ ID NO: 865269 - protein, 417 aa, Homo sapiens
MIQALNQKTSEKMKKRKMSNSFHGIRPPQLEQPEKMPVLKAEASHYNSDLNNLLFCCQCVDVVFYNPNLKKVVEAHKIVLCAVSHVFMLLFNVKSPTDIQDSSIIRTTQDLFAINRDTAFPGASHESSGNPPLRVIVKDALFCSCLSDILRFIYSGAFQWEELEEDIRKKLKDSGDVSNVIEKVKCILKTPGKINCLRNCKTYQARKPLWFYNTSLKFFLNKPMLADVVFEIQGTTVPAHRAILVARCEVMAAMFNGNYMEAKSVLIPVYGVSKETFLSFLEYLYTDSCCPAGIFQAMCLLICAEMYQVSRLQHICELFIITQLQSMPSRELASMNLDIVDLLKKAKFHHSDCLSTWLLHFIATNYLIFSQKPEFQDLSVEERSFVEKHRWPSNMYLKQLAEYRKYIHSRKCRCLVM

SEQ ID NO: 865270 - protein, 167 aa, Homo sapiens
MAAMFNGNYMEAKSVLIPVYGVSKETFLSFLEYLYTDSCCPAGIFQAMCLLICAEMYQVSRLQHICELFIITQLQSMPSRELASMNLDIVDLLKKAKFHHSDCLSTWLLHFIATNYLIFSQKPEFQDLSVEERSFVEKHRWPSNMYLKQLAEYRKYIHSRKCRCLVM

SEQ ID NO: 865271 - protein, 611 aa, Homo sapiens; identical to SEQ ID NO: 865254

SEQ ID NO: 865272 - protein, 312 aa, Homo sapiens
MSIHIVALGNEGDTFHQDNRPSGLIRTYLGRSPLVSGDESSLLLNAASTVARPVFTEYQASAFGNVKLVVHDCPVWDIFDSDWYTSRNLIGGADIIVIKYNVNDKFSFHEVKDNYIPVIKRALNSVPVIIAAVGTRQNEELPCTCPLCTSDRGSCVSTTEGIQLAKELGATYLELHSLDDFYIGKYFGGVLEYFMIQALNQKTSEKMKKRKMSNSFHGIRPPQLEQPEKMPVLKAEASHYNSDLNNLLFCCQCVDVVFYNPNLKKVVEAHKIVLCAVSHVFMLLFNVKSPTDIQDSSIIRTTQDLVGLYNFL

SEQ ID NO: 865273 - protein, 417 aa, Homo sapiens
PSSHPHQQLQGWVRRPTLARHRGAARTRGNGPKPNPPASASQEPAPRPPPPLRPRPAQPPRSCAPRSEVPEMKVWLLLGLLLVHEALEDVTGQHLPKNKRPKEPGENRIKPTNKKVKPKIPKMKDRDSANSAPKTQSIMMQVLDKGRFQKPAATLSLLAGQTVELRCKGSRIGWSYPAYLDTFKDSRLSVKQNERYGQLTLVNSTSADTGEFSCWVQLCSGYICRKDEAKTGSTYIFFTEKGELFVPSPSYFDVVYLNPDRQAVVPCRVTVLSAKVTLHREFPAKEIPANGTDIVYDMKRGFVYLQPHSEHQGVVYCRAEAGGRSQISVKYQLLYVAVPSGPPSTTILASSNKVKSGDDISVLCTVLGEPDVEVEFTWIFPGQKQKLLQPAKIYLSNIDSFEFREEELTSHSSSVSP

SEQ ID NO: 865274 - protein, 107 aa, Homo sapiens
LSVRVQVDNIEVAGRRYKEFSFLCKKDEVEPDVEVEFTWIFPGQKDERPVTIQDTWRLIHRGLGHTTRISQSVITVEDFETIDAGYYICTAQNLQGQTTVATTVEFS

SEQ ID NO: 865275 - protein, 446 aa, Homo sapiens
PSSHPHQQLQGWVRRPTLARHRGAARTRGNGPKPNPPASASQEPAPRPPPPLRPRPAQPPRSCAPRSEVPEMKVWLLLGLLLVHEALEDVTGQHLPKNKRPKEPGENRIKPTNKKVKPKIPKMKDRDSANSAPKTQSIMMQVLDKGRFQKPAATLSLLAGQTVELRCKGSRIGWSYPAYLDTFKDSRLSVKQNERYGQLTLVNSTSADTGEFSCWVQLCSGYICRKDEAKTGSTYIFFTEKGELFVPSPSYFDVVYLNPDRQAVVPCRVTVLSAKVTLHREFPAKEIPANGTDIVYDMKRGFVYLQPHSEHQGVVYCRAEAGGRSQISVKYQLLYVAVPSGPPSTTILASSNKVKSGDDISVLCTVLGEPDVEVEFTWIFPGQKDERPVTIQDTWRLIHRGLGHTTRISQSVITVEDFETIDAGYYICTAQNLQGQTTVATTVEFS

SEQ ID NO: 865276 - protein, 750 aa, Homo sapiens
MGKSESQMDITDINTPKPKKKQRWTPLEISLSVLVLLLTIIAVTMIALYATYDDGICKSSDCIKSAARLIQNMDATTEPCTDFFKYACGGWLKRNVIPETSSRYGNFDILRDELEVVLKDVLQEPKTEDIVAVQKAKALYRSCINESAIDSRGGEPLLKLLPDIYGWPVATENWEQKYGASWTAEKAIAQLNSKYGKKVLINLFVGTDDKNSVNHVIHIDQPRLGLPSRDYYECTGIYKEACTAYVDFMISVARLIRQEERLPIDENQLALEMNKVMELEKEIANATAKPEDRNDPMLLYNKMTLAQIQNNFSLEINGKPFSWLNFTNEIMSTVNISITNEEDVVVYAPEYLTKLKPILTKYSARDLQNLMSWRFIMDLVSSLSRTYKESRNAFRKALYGTTSETATWRRCANYVNGNMENAVGRLYVEAAFAGESKHVVEDLIAQIREVFIQTLDDLTWMDAETKKRAEEKALAIKERIGYPDDIVSNDNKLNNEYLELNYKEDEYFENIIQNLKFSQSKQLKKLREKVDKDEWISGAAVVNAFYSSGRNQIVFPAGILQPPFFSAQQSNSLNYGGIGMVIGHEITHGFDDNGRNFNKDGDLVDWWTQQSASNFKEQSQCMVYQYGNFSWDLAGGQHLNGINTLGENIADNGGLGQAYRAYQNYIKKNGEEKLLPGLDLNHKQLFFLNFAQVWCGTYRPEYAVNSIKTDVHSPGNFRIIGTLQNSAEFSEAFHCRKNSYMNPEKKCRVW

SEQ ID NO: 865277 - protein, 750 aa, Homo sapiens; identical to SEQ ID NO: 865276

SEQ ID NO: 865278 - protein, 750 aa, Homo sapiens; identical to SEQ ID NO: 865276

SEQ ID NO: 865279 - protein, 750 aa, Homo sapiens; identical to SEQ ID NO: 865276

SEQ ID NO: 865280 - protein, 750 aa, Homo sapiens; identical to SEQ ID NO: 865276

SEQ ID NO: 865281 - protein, 750 aa, Homo sapiens; identical to SEQ ID NO: 865276

SEQ ID NO: 865282 - protein, 672 aa, Homo sapiens [sequence omitted]

SEQ ID NO: 865283 - protein, 750 aa, Homo sapiens; identical to SEQ ID NO: 865276

SEQ ID NO: 865284 - protein, 750 aa, Homo sapiens; identical to SEQ ID NO: 865276

SEQ ID NO: 865285 - protein, 145 aa, Homo sapiens
AEGERSKGRERPGRWEPVGRARGGQSQPRGAAAGRCAEQGPQLRSSAIRAPRTLRPWRRRALGRSRYWDLKSEGRERGPEGDLEEGSGSHVRLALQVHFHSSLRPLPWGVMFCYRDPRYQIAPGLIWGLGICHSAVQTLIFFSSF

SEQ ID NO: 865286 - protein, 156 aa, Homo sapiens
MGKSESQMDITDINTPKPKKKQRWTPLEISLSVLVLLLTIIAVTMIALYATYDDGICKSSDCIKSAARLIQNMDATTEPCTDFFKYACGGWLKRNVIPETSSRYGNFDILRDELEVVLKDVPFRTKMRYSSGGKKACEGLVKDLVWKGGNFEVRIL

SEQ ID NO: 865287 - protein, 750 aa, Homo sapiens; identical to SEQ ID NO: 865276

SEQ ID NO: 865288 - protein, 750 aa, Homo sapiens; identical to SEQ ID NO: 865276

SEQ ID NO: 865289 - protein, 750 aa, Homo sapiens; identical to SEQ ID NO: 865276

SEQ ID NO: 865290 - protein, 147 aa, Homo sapiens
GLAQHHRPMKKYIQPEQLHQELFLMGLHLLSSQLRSGQPVHRLLVSAAPPCPLLPGQGSDTTGQRYWHLFMPSSVRAYSGTNIGPRLWGWEMGFSHVPGRKSRECDEVRLRGSLLWSQHFGRPKQEDRSSPGGQGCSEPWSGSCTPA

SEQ ID NO: 865291 - protein, 132 aa, Homo sapiens
MLRSASYCGWCCSRGARGPLAARSLHCCSSPSVAVVARASCGSVRSSCVVVRLFDFSAPGELDKAAGDFCAAIARVPCVWVFVSGVLFWVCVPLCPPGGGSFLGVVGGWFSLCVCVCGALFWFLALLLAPFS

SEQ ID NO: 865292 - protein, 283 aa, Homo sapiens
MSSGTQMLTIRWEIQEESDMWKIRELEKQMEDAYRGTKRKMLPSSSSRMRSDGFDEESQRYYWRPKNEISGTLEDDFLKAKSWNKKFYDYEANMPDRWGHSGYKELYPEEFETDSSDQQDITNGKKTSPQVKSSTHESRKHKKSKKSHKKKQKKRSHKKQKKSKKEATDITADSSSEFSEETGASGTRKGKQPHKRKKKSRKKSLKKPALFLEAESNTSHSDDSASSSSEESEERDTKKTKRKKREKKAHTSVANNEIQERTNKRTNWKVATDERSAESSEDD

SEQ ID NO: 865293 - protein, 330 aa, Homo sapiens
MWLLVSVILISRISSVGGEATFCDFPKINHGILYDEEKYKPFSQVPTGEVFYYSCEYNFVSPSKSFWTRITCTEEGWSPTPKCLRLCFFPFVENGHSESSGQTHLEGDTVQIICNTGYRLQNNENNISCVERGWSTPPKCRSTDTSCVNPPTVQNAHILSRQMSKYPSGERVRYECRSPYEMFGDEEVMCLNGNWTEPPQCKDSTGKCGPPPPIDNGDITSFPLSVYAPASSVEYQCQNLYQLEGNKRITCRNGQWSEPPKCLHPCVISREIMENYNIALRWTAKQKLYSRTGESVEFVCKRGYRLSSRSHTLRTTCWDGKLEYPTCAKR

SEQ ID NO: 865294 - protein, 330 aa, Homo sapiens
MLLLINVILTLWVSCANGQVKPCDFPDIKHGGLFHENMRRPYFPVAVGKYYSYYCDEHFETPSGSYWDYIHCTQNGWSPAVPCLRKCYFPYLENGYNQNYGRKFVQGNSTEVACHPGYGLPKAQTTVTCTEKGWSPTPRCIRVRTCSKSDIEIENGFISESSSIYILNKEIQYKCKPGYATADGNSSGSITCLQNGWSAQPICINSSEKCGPPPPISNGDTTSFLLKVYVPQSRVEYQCQPYYELQGSNYVTCSNGEWSEPPRCIHPCIITEENMNKNNIKLKGRSDRKYYAKTGDTIEFMCKLGYNANTSILSFQAVCREGIVEYPRCE

SEQ ID NO: 865295 - protein, 212 aa, Homo sapiens
QDSARGQVKPCDFPDIKHGGLFHENMRRPYFPVAVGKYYSYYCDEHFETPSGSYWDYIHCTQNGWSPAVPCLRKCYFPYLENGYNQNYGRKFVQGNSTEVACHPGYGLPKAQTTVTCTEKGWSPTPRCIRVRTCSKSDIEIENGFISESSSIYILNKEIQYKCKPGYATADGNSSGSITCLQNGWSAQPICITACIAFRAHAQKKLYMSGEK

SEQ ID NO: 865296 - protein, 330 aa, Homo sapiens; identical to SEQ ID NO: 865293

SEQ ID NO: 865297 - protein, 168 aa, Homo sapiens
MSKYPSGERVRYECRSPYEMFGDEEVMCLNGNWTEPPQCKDSTGKCGPPPPIDNGDITSFPLSVYAPASSVEYQCQNLYQLEGNKRITCRNGQWSEPPKCLHPCVISREIMENYNIALRWTAKQKLYSRTGESVEFVCKRGYRLSSRSHTLRTTCWDGKLEYPTCAKR

SEQ ID NO: 865298 - protein, 276 aa, Homo sapiens
MWLLVSVILISRISSVGGEEEGWSPTPKCLRLCFFPFVENGHSESSGQTHLEGDTVQIICNTGYRLQNNENNISCVERGWSTPPKCRSTDTSCVNPPTVQNAHILSRQMSKYPSGERVRYECRSPYEMFGDEEVMCLNGNWTEPPQCKDSTGKCGPPPPIDNGDITSFPLSVYAPASSVEYQCQNLYQLEGNKRITCRNGQWSEPPKCLHPCVISREIMENYNIALRWTAKQKLYSRTGESVEFVCKRGYRLSSRSHTLRTTCWDGKLEYPTCAKR

SEQ ID NO: 865299 - protein, 235 aa, Homo sapiens
MHRRRMVTNTKVSHVQIICNTGYRLQNNENNISCVERGWSTPPKCRSTDTSCVNPPTVQNAHILSRQMSKYPSGERVRYECRSPYEMFGDEEVMCLNGNWTEPPQCKDSTGKCGPPPPIDNGDITSFPLSVYAPASSVEYQCQNLYQLEGNKRITCRNGQWSEPPKCLHPCVISREIMENYNIALRWTAKQKLYSRTGESVEFVCKRGYRLSSRSHTLRTTCWDGKLEYPTCAKR

SEQ ID NO: 865300 - protein, 330 aa, Homo sapiens; identical to SEQ ID NO: 865293

SEQ ID NO: 865301 - protein, 276 aa, Homo sapiens
MWLLVSVILISRISSVGGEATFCDFPKINHGILYDEEKYKPFSQVPTGEVFYYSCEYNFVSPSKSFWTRITCTEEGWSPTPKCLRLCFFPFVENGHSESSGQTHLEGDTVQIICNTGYRLQNNENNISCVERGWSTPPKCRSTDTSCVNPPTVQNAHILSRQMSKYPSGERVRYECRSPYEMFGDEEVMCLNGNWTEPPQCKDSTGKCGPPPPIDNGDITSFPLSVYAPASSVEYQCQNLYQLEGNKRITCRNGQWSEPPKCLHPCVISREIMENR

SEQ ID NO: 865302 - protein, 230 aa, Homo sapiens
MWLLVSVILISRISSVGGEATFCDFPKINHGILYDEEKYKPFSQVPTGEVFYYSCEYNFVSPSKSFWTRITCTEEGWSPTPKCLRLCFFPFVENGHSESSGQTHLEGDTVQIICNTGYRLQNNENNISCVERGWSTPPKCRSTDTSCVNPPTVQNAHILSRQMSKYPSGERVRYECRSPYEMFGDEEVMCLNGNWTEPPQCKDSRCQYMLQLHQLSTNARTCINLRVTSE

SEQ ID NO: 865303 - protein, 238 aa, Homo sapiens
  misc_feature (208)..(208): Xaa can be any naturally occurring amino acid
  misc_feature (212)..(212): Xaa can be any naturally occurring amino acid
  misc_feature (232)..(232): Xaa can be any naturally occurring amino acid
MLLLINVILTLWVSCANGQVKPCDFPDIKHGGLFHENMRRPYFPVAVGKYYSYYCDEHFETPSGSYWDYIHCTQNGWSPAVPCLRKCYFPYLENGYNQNYGRKFVQGNSTEVACHPGYGLPKAQTTVTCTEKGWSPTPRCIRVRTCSKSDIEIENGFISESSSIYILNKEIQYKCKPGYATADGNSSGSITCLQNGWSAQPICINTVXCFVXARSDMRENDRIYSVRRIDYXDMSLGS

SEQ ID NO: 865304 - protein, 200 aa, Homo sapiens
AKRGLTLLTTTATRTCSKSDIEIENGFISESSSIYILNKEIQYKCKPGYATADGNSSGSITCLQNGWSAQPICINSSEKCGPPPPISNGDTTSFLLKVYVPQSRVEYQCQPYYELQGSNYVTCSNGEWSEPPRCIHPCIITEENMNKNNIKLKGRSDRKYYAKTGDTIEFMCKLGYNANTSILSFQAVCREGIVEYPRCE

SEQ ID NO: 865305 - protein, 310 aa, Homo sapiens
MWLLVSVILISRISSVGGEATFCDFPKINHGILYDEEKYKPFSQVPTGEVFYYSCEYNFVSPSKSFWTRITCTEEGWSPTPKCLRLCFFPFVENGHSESSGQTHLEGDTVQIICNTGYRLQNNDTSCVNPPTVQNAHILSRQMSKYPSGERVRYECRSPYEMFGDEEVMCLNGNWTEPPQCKDSTGKCGPPPPIDNGDITSFPLSVYAPASSVEYQCQNLYQLEGNKRITCRNGQWSEPPKCLHPCVISREIMENYNIALRWTAKQKLYSRTGESVEFVCKRGYRLSSRSHTLRTTCWDGKLEYPTCAKR

SEQ ID NO: 865306 - protein, 265 aa, Homo sapiens
MWLLVSVILISRISSVGGEGLCFFPFVENGHSESSGQTHLEGDTVQIICNTGYRLQNNENNISCVERGWSTPPKCRSTDTSCVNPPTVQNAHILSRQMSKYPSGERVRYECRSPYEMFGDEEVMCLNGNWTEPPQCKDSTGKCGPPPPIDNGDITSFPLSVYAPASSVEYQCQNLYQLEGNKRITCRNGQWSEPPKCLHPCVISREIMENYNIALRWTAKQKLYSRTGESVEFVCKRGYRLSSRSHTLRTTCWDGKLEYPTCAKR

SEQ ID NO: 865307 - protein, 271 aa, Homo sapiens
MLLLINVILTLWVSCANGQVKPCDFPDIKHGGLFHENMRRPYFPVAVGKYYSYYCDEHFETPSGSYWDYIHCTQNGWSPAVPCLNTSCVNPPTVQNAHILSRQMSKYPSGERVRYECRSPYEMFGDEEVMCLNGNWTEPPQCKDSTGKCGPPPPIDNGDITSFPLSVYAPASSVEYQCQNLYQLEGNKRITCRNGQWSEPPKCLHPCVISREIMENYNIALRWTAKQKLYSRTGESVEFVCKRGYRLSSRSHTLRTTCWDGKLEYPTCAKR

SEQ ID NO: 865308 - protein, 230 aa, Homo sapiens; identical to SEQ ID NO: 865302

SEQ ID NO: 865309 - protein, 330 aa, Homo sapiens; identical to SEQ ID NO: 865293

SEQ ID NO: 865310 - protein, 330 aa, Homo sapiens; identical to SEQ ID NO: 865293

SEQ ID NO: 865311 - protein, 264 aa, Homo sapiens
MWLLVSVILISRISSVGGEATFCDFPKINHGILYDEEKYKPFSQVPTGEVFYYSCEYNFVSPSKSFWTRITCTEEGWSPTPKCLRLCFFPFVENGHSESSGQTHLEGDTVQIICNTGYRLQNNENNISCVERGWSTPPKCRSTDTSCVNPPTVQNAHILSRQMSKYPSGERVRYECRSPYEMFGDEEVMCLNGNWTEPPQCKDSTGKCGPPPPIDNGDITSFPLSVYAPASSVEYQCQNLYQLEGNKRITCRNGQWSEPPKCLL

SEQ ID NO: 865312 - protein, 3830 aa, Homo sapiens
MAFVATQGATVVDQTTLMKKYLQFVAALTDVNTPDETKLKMMQEVSENFENVTSSPQYSTFLEHIIPRFLTFLQDGEVQFLQEKPAQQLRKLVLEIIHRIPTNEHLRPHTKNVLSVMFRFLETENEENVLICLRIIIELHKQFRPPITQEIHHFLDFVKQIYKELPKVVNRYFENPQVIPENTVPPPEMVGMITTIAVKVNPEREDSETRTHSIIPRGSLSLKVLAELPIIVVLMYQLYKLNIHNVVAEFVPLIMNTIAIQVSAQARQHKLYNKELYADFIAAQIKTLSFLAYIIRIYQELVTKYSQQMVKGMLQLLSNCPAETAHLRKELLIAAKHILTTELRNQFIPCMDKLFDESILIGSGYTARETLRPLAYSTLADLVHHVRQHLPLSDLSLAVQLFAKNIDDESLPSSIQTMSCKLLLNLVDCIRSKSEQESGNGRDVLMRMLEVFVLKFHTIARYQLSAIFKKCKPQSELGAVEAALPGVPTAPAAPGPAPSPAPVPAPPPPPPPPPPATPVTPAPVPPFEKQGEKDKEDKQTFQVTDCRSLVKTLVCGVKTITWGITSCKAPGEAQFIPNKQLQPKETQIYIKLVKYAMQALDIYQVQIAGNGQTYIRVANCQTVRMKEEKEVLEHFAGVFTMMNPLTFKEIFQTTVPYMVERISKNYALQIVANSFLANPTTSALFATILVEYLLDRLPEMGSNVELSNLYLKLFKLVFGSVSLFAAENEQMLKPHLHKIVNSSMELAQTAKEPYNYFLLLRALFRSIGGGSHDLLYQEFLPLLPNLLQGLNMLQSGLHKQHMKDLFVELCLTVPVRLSSLLPYLPMLMDPLVSALNGSQTLVSQGLRTLELCVDNLQPDFLYDHIQPVRAELMQALWRTLRNPADSISHVAYRVLGKFGGSNRKMLKESQKLHYVVTEVQGPSITVEFSDCKASLQLPMEKAIETALDCLKSANTEPYYRRQAWEVIKCFLVAMMSLEDNKHALYQLLAHPNFTEKTIPNVIISHRYKAQDTPARKTFEQALTGAFMSAVIKDLRPSALPFVASLIRHYTMVAVAQQCGPFLLPCYQVGSQPSTAMFHSEENGSKGMDPLVLIDAIAICMAYEEKELCKIGEVALAVIFDVASIILGSKERACQLPLFSYIVERLCACCYEQAWYAKLGGVVSIKFLMERLPLTWVLQNQQTFLKALLFVMMDLTGEVSNGAVAMAKTTLEQLLMRCATPLKDEERAEEIVAAQEKSFHHVTHDLVREVTSPNSTVRKQAMHSLQVLAQVTGKSVTVIMEPHKEVLQDMVPPKKHLLRHQPANAQIGLMEGNTFCTTLQPRLFTMDLNVVEHKVFYTELLNLCEAEDSALTKLPCYKSLPSLVPLRIAALNALAACNYLPQSREKIIAALFKALNSTNSELQEAGEACMRKFLEGATIEVDQIHTHMRPLLMMLGDYRSLTLNVVNRLTSVTRLFPNSFNDKFCDQMMQHLRKWMEVVVITHKGGQRSDGNEMKICSAIINLFHLIPAAPQTLVKPLLEVVMKTERAMLIEAGSPFREPLIKFLTRHPSQTVELFMMEATLNDPQWSRMFMSFLKHKDARPLRDVLAANPNRFITLLLPGGAQTAVRPGSPSTSTMRLDLQFQAIKIISIIVKNDDSWLASQHSLVSQLRRVWVSENFQERHRKENMAATNWKEPKLLAYCLLNYCKRNYGDIELLFQLLRAFTGRFLCNMTFLKEYMEEEIPKNYSIAQKRALFFRFVDFNDPNFGDELKAKVLQHILNPAFLYSFEKGEGEQLLGPPNPEGDNPESITSVFITKVLDPEKQADMLDSLRIYLLQYATLLVEHAPHHIHDNNKNRNSKLRRLMTFAWPCLLSKACVDPACKYSGHLLLAHIIAKFAIHKKIVLQVFHSLLKAHAMEARAIVRQAMAILTPAVPARMEDGHQMLTHWTRKIIVEEGHTVPQLVHILHLIVQHFKVYYPVRHHLVQHMVSAMQRLGFTPSVTIEQRRLAVDLSEVVIKWELQRIKDQQPDSDMDPNSSGEGVNSVSSSIKRGLSVDSAQEVKRFRTATGAISAVFGRSQSLPGADSLLAKPIDKQHTDTVVNFLIRVACQVNDNTNTAGSPGEVLSRRCVNLLKTALRPDMWPKSELKLQWFDKLLMTVEQPNQVNYGNICTGLEVLSFLLTVLQSPAILSSFKPLQRGIAACMTCGNTKVLRAVHSLLSRLMSIFPTEPSTSSVASKYEELECLYAAVGKVIYEGLTNYEKATNANPSQLFGTLMILKSACSNNPSYIDRLISVFMRSLQKMVREHLNPQAASGSTEATSGTSELVMLSLELVKTRLAVMSMEMRKNFIQAILTSLIEKSPDAKILRAVVKIVEEWVKNNSPMAANQTPTLREKSILLVKMMTYIEKRFPEDLELNAQFLDLVNYVYRDETLSGSELTAKLEPAFLSGLRCAQPLIRAKFFEVFDNSMKRRVYERLLYVTCSQNWEAMGNHFWIKQCIELLLAVCEKSTPIGTSCQGAMLPSITNVINLADSHDRAAFAMVTHVKQEPRERENSESKEEDVEIDIELAPGDQTSTPKTKELSEKDIGNQLHMLTNRHDKFLDTLREVKTGALLSAFVQLCHISTTLAEKTWVQLFPRLWKILSDRQQHALAGEISPFLCSGSHQVQRDCQPSALNCFVEAMSQCVPPIPIRPCVLKYLGKTHNLWFRSTLMLEHQAFEKGLSLQIKPKQTTEFYEQESITPPQQEILDSLAELYSLLQEEDMWAGLWQKRCKYSETATAIAYEQHGFFEQAQESYEKAMDKAKKEHERSNASPAIFPEYQLWEDHWIRCSKELNQWEALTEYGQSKGHINPYLVLECAWRVSNWTAMKEALVQVEVSCPKEMAWKVNMYRGYLAICHPEEQQLSFIERLVEMASSLAIREWRRLPHVVSHVHTPLLQAAQQIIELQEAAQINAGLQPTNLGRNNSLHDMKTVVKTWRNRLPIVSDDLSHWSSIFMWRQHHYQAIVTAYENSSQHDPSSNNAMLGVHASASAIIQYGKIARKQGLVNVALDILSRIHTIPTVPIVDCFQKIRQQVKCYLQLAGVMGKNECMQGLEVIESTNLKYFTKEMTAEFYALKGMFLAQINKSEEANKAFSAAVQMHDVLVKAWAMWGDYLENIFVKERQLHLGVSAITCYLHACRHQNESKSRKYLAKVLWLLSFDDDKNTLADAVDKYCIGVPPIQWLAWIPQLLTCLVGSEGKLLLNLISQVGRVYPQAVYFPIRTLYLTLKIEQRERYKSDPGPIRATAPMWRCSRIMHMQRELHPTLLSSLEGIVDQMVWFRENWHEEVLRQLQQGLAKCYSVAFEKSGAVSDAKITPHTLNFVKKLVSTFGVGLENVSNVSTMFSSAASESLARRAQATAQDPVFQKLKGQFTTDFDFSVPGSMKLHNLISKLKKWIKILEAKTKQLPKFFLIEEKCRFLSNFSAQTAEVEIPGEFLMPKPTHYYIKIARFMPRVEIVQKHNTAARRLYIRGHNGKIYPYLVMNDACLTESRREERVLQLLRLLNPCLEKRKETTKRHLFFTVPRVVAVSPQMRLVEDNPSSLSLVEIYKQRCAKKGIEHDNPISRYYDRLATVQARGTQASHQVLRDILKEVQSNMVPRSMLKEWALHTFPNATDYWTFRKMFTIQLALIGFAEFVLHLNRLNPEMLQIAQDTGKLNVAYFRFDINDATGDLDANRPVPFRLTPNISEFLTTIGVSGPLTASMIAVARCFAQPNFKVDGILKTVLRDEIIAWHKKTQEDTSSPLSAAGQPENMDSQQLVSLVQKAVTAIMTRLHNLAQFEGGESKVNTLVAAANSLDNLCRMDPAWHPWL

SEQ ID NO: 865313 - protein, 3859 aa, Homo sapiens
MAFVATQGATVVDQTTLMKKYLQFVAALTDVNTPDETKLKMMQEVSENFENVTSSPQYSTFLEHIIPRFLTFLQDGEVQFLQEKPAQQLRKLVLEIIHRIPTNEHLRPHTKNVLSVMFRFLETENEENVLICLRIIIELHKQFRPPITQEIHHFLDFVKQIYKELPKVVNRYFENPQVIPENTVPPPEMVGMITTIAVKVNPEREDSETRTHSIIPRGSLSLKVLAELPIIVVLMYQLYKLNIHNVVAEFVPLIMNTIAIQVSAQARQHKLYNKELYADFIAAQIKTLSFLAYIIRIYQELVTKYSQQMVKGMLQLLSNCPAETAHLRKELLIAAKHILTTELRNQFIPCMDKLFDESILIGSGYTARETLRPLAYSTLADLVHHVRQHLPLSDLSLAVQLFAKNIDDESLPSSIQTMSCKLLLNLVDCIRSKSEQESGNGRDVLMRMLEVFVLKFHTIARYQLSAIFKKCKPQSELGAVEAALPGVPTAPAAPGPAPSPAPVPAPPPPPPPPPPATPVTPAPVPPFEKQGEKDKEDKQTFQVTDCRSLVKTLVCGVKTITWGITSCKAPGEAQFIPNKQLQPKETQIYIKLVKYAMQALDIYQVQIAGNGQTYIRVANCQTVRMKEEKEVLEHFAGVFTMMNPLTFKEIFQTTVPYMVERISKNYALQIVANSFLANPTTSALFATILVEYLLDRLPEMGSNVELSNLYLKLFKLVFGSVSLFAAENEQMLKPHLHKIVNSSMELAQTAKEPYNYFLLLRALFRSIGGGSHDLLYQEFLPLLPNLLQGLNMLQSGLHKQHMKDLFVELCLTVPVRLSSLLPYLPMLMDPLVSALNGSQTLVSQGLRTLELCVDNLQPDFLYDHIQPVRAELMQALWRTLRNPADSISHVAYRVLGKFGGSNRKMLKESQKLHYVVTEVQGPSITVEFSDCKASLQLPMEKAIETALDCLKSANTEPYYRRQAWEVIKCFLVAMMSLEDNKHALYQLLAHPNFTEKTIPNVIISHRYKAQDTPARKTFEQALTGAFMSAVIKDLRPSALPFVASLIRHYTMVAVAQQCGPFLLPCYQVGSQPSTAMFHSEENGSKGMDPLVLIDAIAICMAYEEKELCKIGEVALAVIFDVASIILGSKERACQLPLFSYIVERLCACCYEQAWYAKLGGVVSIKFLMERLPLTWVLQNQQTFLKALLFVMMDLTGEVSNGAVAMAKTTLEQLLMRCATPLKDEERAEEIVAAQEKSFHHVTHDLVREVTSPNSTVRKQAMHSLQVLAQVTGKSVTVIMEPHKEVLQDMVPPKKHLLRHQPANAQIGLMEGNTFCTTLQPRLFTMDLNVVEHKVFYTELLNLCEAEDSALTKLPCYKSLPSLVPLRIAALNALAACNYLPQSREKIIAALFKALNSTNSELQEAGEACMRKFLEGATIEVDQIHTHMRPLLMMLGDYRSLTLNVVNRLTSVTRLFPNSFNDKFCDQMMQHLRKWMEVVVITHKGGQRSDGNESISECGRCPLSPFCQFEEMKICSAIINLFHLIPAAPQTLVKPLLEVVMKTERAMLIEAGSPFREPLIKFLTRHPSQTVELFMMEATLNDPQWSRMFMSFLKHKDARPLRDVLAANPNRFITLLLPGGAQTAVRPGSPSTSTMRLDLQFQAIKIISIIVKNDDSWLASQHSLVSQLRRVWVSENFQERHRKENMAATNWKEPKLLAYCLLNYCKRNYGDIELLFQLLRAFTGRFLCNMTFLKEYMEEEIPKNYSIAQKRALFFRFVDFNDPNFGDELKAKVLQHILNPAFLYSFEKGEGEQLLGPPNPEGDNPESITSVFITKVLDPEKQADMLDSLRIYLLQYATLLVEHAPHHIHDNNKNRNSKLRRLMTFAWPCLLSKACVDPACKYSGHLLLAHIIAKFAIHKKIVLQVFHSLLKAHAMEARAIVRQAMAILTPAVPARMEDGHQMLTHWTRKIIVEEGHTVPQLVHILHLIVQHFKVYYPVRHHLVQHMVSAMQRLGFTPSVTIEQRRLAVDLSEVVIKWELQRIKDQQPDSDMDPNSSGEGVNSVSSSIKRGLSVDSAQEVKRFRTATGAISAVFGRSQSLPGADSLLAKPIDKQHTDTVVNFLIRVACQVNDNTNTAGSPGEVLSRRCVNLLKTALRPDMWPKSELKLQWFDKLLMTVEQPNQVNYGNICTGLEVLSFLLTVLQSPAILSSFKPLQRGIAACMTCGNTKVLRAVHSLLSRLMSIFPTEPSTSSVASKYEELECLYAAVGKVIYEGLTNYEKATNANPSQLFGTLMILKSACSNNPSYIDRLISVFMRSLQKMVREHLNPQAASGSTEATSGTSELVMLSLELVKTRLAVMSMEMRKNFIQAILTSLIEKSPDAKILRAVVKIVEEWVKNNSPMAANQTPTLREKSILLVKMMTYIEKRFPEDLELNAQFLDLVNYVYRDETLSGSELTAKLEPAFLSGLRCAQPLIRAKFFEVFDNSMKRRVYERLLYVTCSQNWEAMGNHFWIKQCIELLLAVCEKSTPIGTSCQGAMLPSITNVINLADSHDRAAFAMVTHVKQEPRERENSESKEEDVEIDIELAPGDQTSTPKTKELSEKDIGNQLHMLTNRHDKFLDTLREVKTGALLSAFVQLCHISTTLAEKTWVQLFPRLWKILSDRQQHALAGEISPFLCSGSHQVQRDCQPSALNCFVEAMSQCVPPIPIRPCVLKYLGKTHNLWFRSTLMLEHQAFEKGLSLQIKPKQTTEFYEQESITPPQQEILDSLAELYSLLQEEDMWAGLWQKRCKYSETATAIAYEQHGFFEQAQESYEKAMDKAKKEHERSNASPAIFPEYQLWEDHWIRCSKELNQWEALTEYGQSKGHINPYLVLECAWRVSNWTAMKEALVQVEVSCPKEMAWKVNMYRGYLAICHPEEQQLSFIERLVEMASSLAIREWRRLPHVVSHVHTPLLQAAQQIIELQEAAQINAGLQPTNLGRNNSLHDMKTVVKTWRNRLPIVSDDLSHWSSIFMWRQHHYQGKPTWSGMHSSSIVTAYENSSQHDPSSNNAMLGVHASASAIIQYGKIARKQGLVNVALDILSRIHTIPTVPIVDCFQKIRQQVKCYLQLAGVMGKNECMQGLEVIESTNLKYFTKEMTAEFYALKGMFLAQINKSEEANKAFSAAVQMHDVLVKAWAMWGDYLENIFVKERQLHLGVSAITCYLHACRHQNESKSRKYLAKVLWLLSFDDDKNTLADAVDKYCIGVPPIQWLAWIPQLLTCLVGSEGKLLLNLISQVGRVYPQAVYFPIRTLYLTLKIEQRERYKSDPGPIRATAPMWRCSRIMHMQRELHPTLLSSLEGIVDQMVWFRENWHEEVLRQLQQGLAKCYSVAFEKSGAVSDAKITPHTLNFVKKLVSTFGVGLENVSNVSTMFSSAASESLARRAQATAQDPVFQKLKGQFTTDFDFSVPGSMKLHNLISKLKKWIKILEAKTKQLPKFFLIEEKCRFLSNFSAQTAEVEIPGEFLMPKPTHYYIKIARFMPRVEIVQKHNTAARRLYIRGHNGKIYPYLVMNDACLTESRREERVLQLLRLLNPCLEKRKETTKRHLFFTVPRVVAVSPQMRLVEDNPSSLSLVEIYKQRCAKKGIEHDNPISRYYDRLATVQARGTQASHQVLRDILKEVQSNMVPRSMLKEWALHTFPNATDYWTFRKMFTIQLALIGFAEFVLHLNRLNPEMLQIAQDTGKLNVAYFRFDINDATGDLDANRPVPFRLTPNISEFLTTIGVSGPLTASMIAVARCFAQPNFKVDGILKTVLRDEIIAWHKKTQEDTSSPLSAAGQPENMDSQQLVSLVQKAVTAIMTRLHNLAQFEGGESKVNTLVAAANSLDNLCRMDPAWHPWL

SEQ ID NO: 865314 - protein, 3866 aa, Homo sapiens
MAFVATQGATVVDQTTLMKKYLQFVAALTDVNTPDETKLKMMQEVSENFENVTSSPQYSTFLEHIIPRFLTFLQDGEVQFLQEKPAQQLRKLVLEIIHRIPTNEHLRPHTKNVLSVMFRFLETENEENVLICLRIIIELHKQFRPPITQEIHHFLDFVKQIYKELPKVVNRYFENPQVIPENTVPPPEMVGMITTIAVKVNPEREDSETRTHSIIPRGSLSLKVLAELPIIVVLMYQLYKLNIHNVVAEFVPLIMNTIAIQVSAQARQHKLYNKELYADFIAAQIKTLSFLAYIIRIYQELVTKYSQQMVKGMLQLLSNCPAETAHLRKELLIAAKHILTTELRNQFIPCMDKLFDESILIGSGYTARETLRPLAYSTLADLVHHVRQHLPLSDLSLAVQLFAKNIDDESLPSSIQTMSCKLLLNLVDCIRSKSEQESGNGRDVLMRMLEVFVLKFHTIARYQLSAIFKKCKPQSELGAVEAALPGVPTAPAAPGPAPSPAPVPAPPPPPPPPPPATPVTPAPVPPFEKQGEKDKEDKQTFQVTDCRSLVKTLVCGVKTITWGITSCKAPGEAQFIPNKQLQPKETQIYIKLVKYAMQALDIYQVQIAGNGQTYIRVANCQTVRMKEEKEVLEHFAGVFTMMNPLTFKEIFQTTVPYMVERISKNYALQIVANSFLANPTTSALFATILVEYLLDRLPEMGSNVELSNLYLKLFKLVFGSVSLFAAENEQMLKPHLHKIVNSSMELAQTAKEPYNYFLLLRALFRSIGGGSHDLLYQEFLPLLPNLLQGLNMLQSGLHKQHMKDLFVELCLTVPVRLSSLLPYLPMLMDPLVSALNGSQTLVSQGLRTLELCVDNLQPDFLYDHIQPVRAELMQALWRTLRNPADSISHVAYRVLGKFGGSNRKMLKESQKLHYVVTEVQGPSITVEFSDCKASLQLPMEKAIETALDCLKSANTEPYYRRQAWEVIKCFLVAMMSLEDNKHALYQLLAHPNFTEKTIPNVIISHRYKAQDTPARKTFEQALTGAFMSAVIKDLRPSALPFVASLIRHYTMVAVAQQCGPFLLPCYQVGSQPSTAMFHSEENGSKGMDPLVLIDAIAICMAYEEKELCKIGEVALAVIFDVASIILGSKERACQLPLFSYIVERLCACCYEQAWYAKLGGVVSIKFLMERLPLTWVLQNQQTFLKALLFVMMDLTGEVSNGAVAMAKTTLEQLLMRCATPLKDEERAEEIVAAQEKSFHHVTHDLVREVTSPNSTVRKQAMHSLQVLAQVTGKSVTVIMEPHKEVLQDMVPPKKHLLRHQPANAQIGLMEGNTFCTTLQPRLFTMDLNVVEHKVFYTELLNLCEAEDSALTKLPCYKSLPSLVPLRIAALNALAACNYLPQSREKIIAALFKALNSTNSELQEAGEACMRKFLEGATIEVDQIHTHMRPLLMMLGDYRSLTLNVVNRLTSVTRLFPNSFNDKFCDQMMQHLRKWMEVVVITHKGGQRSDGNESISECGRCPLSPFCQFEEMKICSAIINLFHLIPAAPQTLVKPLLEVVMKTERAMLIEAGSPFREPLIKFLTRHPSQTVELFMMEATLNDPQWSRMFMSFLKHKDARPLRDVLAANPNRFITLLLPGGAQTAVRPGSPSTSTMRLDLQFQAIKIISIIVKNDDSWLASQHSLVSQLRRVWVSENFQERHRKENMAATNWKEPKLLAYCLLNYCKRNYGDIELLFQLLRAFTGRFLCNMTFLKEYMEEEIPKNYSIAQKRALFFRFVDFNDPNFGDELKAKVLQHILNPAFLYSFEKGEGEQLLGPPNPEGDNPESITSVFITKVLDPEKQADMLDSLRIYLLQYATLLVEHAPHHIHDNNKNRNSKLRRLMTFAWPCLLSKACVDPACKYSGHLLLAHIIAKFAIHKKIVLQVFHSLLKAHAMEARAIVRQAMAILTPAVPARMEDGHQMLTHWTRKIIVEEGHTVPQLVHILHLIVQHFKVYYPVRHHLVQHMVSAMQRLGFTPSVTIEQRRLAVDLSEVVIKWELQRIKDQQPDSDMDPNSSGEGVNSVSSSIKRGLSVDSAQEVKRFRTATGAISAVFGRSQSLPGADSLLAKPIDKQHTDTVVNFLIRVACQVNDNTNTAGSPGEVLSRRCVNLLKTALRPDMWPKSELKLQWFDKLLMTVEQPNQVNYGNICTGLEVLSFLLTVLQSPAILSSFKPLQRGIAACMTCGNTKVLRAVHSLLSRLMSIFPTEPSTSSVASKYEELECLYAAVGKVIYEGLTNYEKATNANPSQLFGTLMILKSACSNNPSYIDRLISVFMRSLQKMVREHLNPQAASGSTEATSGTSELVMLSLELVKTRLAVMSMEMRKNFIQAILTSLIEKSPDAKILRAVVKIVEEWVKNNSPMAANQTPTLREKSILLVKMMTYIEKRFPEDLELNAQFLDLVNYVYRDETLSGSELTAKLEPAFLSGLRCAQPLIRAKFFEVFDNSMKRRVYERLLYVTCSQNWEAMGNHFWIKQCIELLLAVCEKSTPIGTSCQGAMLPSITNVINLADSHDRAAFAMVTHVKQEPRERENSESKEEDVEIDIELAPGDQTSTPKTKELSEKDIGNQLHMLTNRHDKFLDTLREVKTGALLSAFVQLCHISTTLAEKTWVQLFPRLWKILSDRQQHALAGEISPFLCSGSHQVQRDCQPSALNCFVEAMSQCVPPIPIRPCVLKYLGKTHNLWFRSTLMLEHQAFEKGLSLQIKPKQTTEFYEQESITPPQQEILDSLAELYSLLQEEDMWAGLWQKRCKYSETATAIAYEQHGFFEQAQESYEKAMDKAKKEHERSNASPAIFPEYQLWEDHWIRCSKELNQWEALTEYGQSKGHINPYLVLECAWRVSNWTAMKEALVQVEVSCPKEMAWKVNMYRGYLAICHPEEQQLSFIERLVEMASSLAIREWRRLPHVVSHVHTPLLQAAQQIIELQEAAQINAGLQPTNLGRNNSLHDMKTVVKTWRNRLPIVSDDLSHWSSIFMWRQHHYQAIVTAYENSSQHDPSSNNAMLGVHASASAIIQYGKIARKQGLVNVALDILSRIHTIPTVPIVDCFQKIRQQVKCYLQLAGVMGKNECMQGLEVIESTNLKYFTKEMTAEFYALKGMFLAQINKSEEANKAFSAAVQMHDVLVKAWAMWGDYLENIFVKERQLHLGVSAITCYLHACRHQNESKSRKYLAKVLWLLSFDDDKNTLADAVDKYCIGVPPIQWLAWIPQLLTCLVGSEGKLLLNLISQVGRVYPQAVYFPIRTLYLTLKIEQRERYKSDSGQQQPSSVGNQSHSASDPGPIRATAPMWRCSRIMHMQRELHPTLLSSLEGIVDQMVWFRENWHEEVLRQLQQGLAKCYSVAFEKSGAVSDAKITPHTLNFVKKLVSTFGVGLENVSNVSTMFSSAASESLARRAQATAQDPVFQKLKGQFTTDFDFSVPGSMKLHNLISKLKKWIKILEAKTKQLPKFFLIEEKCRFLSNFSAQTAEVEIPGEFLMPKPTHYYIKIARFMPRVEIVQKHNTAARRLYIRGHNGKIYPYLVMNDACLTESRREERVLQLLRLLNPCLEKRKETTKRHLFFTVPRVVAVSPQMRLVEDNPSSLSLVEIYKQRCAKKGIEHDNPISRYYDRLATVQARGTQASHQVLRDILKEVQSNMVPRSMLKEWALHTFPNATDYWTFRKMFTIQLALIGFAEFVLHLNRLNPEMLQIAQDTGKLNVAYFRFDINDATGDLDANRPVPFRLTPNISEFLTTIGVSGPLTASMIAVARCFAQPNFKVDGILKTVLRDEIIAWHKKTQEDTSSPLSAAGQPENMDSQQLVSLVQKAVTAIMTRLHNLAQFEGGESKVNTLVAAANSLDNLCRMDPAWHPWL

SEQ ID NO: 865315 - protein, 3848 aa, Homo sapiens
MAFVATQGATVVDQTTLMKKYLQFVAALTDVNTPDETKLKMMQEVSENFENVTSSPQYSTFLEHIIPRFLTFLQDGEVQFLQEKPAQQLRKLVLEIIHRIPTNEHLRPHTKNVLSVMFRFLETENEENVLICLRIIIELHKQFRPPITQEIHHFLDFVKQIYKELPKVVNRYFENPQVIPENTVPPPEMVGMITTIAVKVNPEREDSETRTHSIIPRGSLSLKVLAELPIIVVLMYQLYKLNIHNVVAEFVPLIMNTIAIQVSAQARQHKLYNKELYADFIAAQIKTLSFLAYIIRIYQELVTKYSQQMVKGMLQLLSNCPAETAHLRKELLIAAKHILTTELRNQFIPCMDKLFDESILIGSGYTARETLRPLAYSTLADLVHHVRQHLPLSDLSLAVQLFAKNIDDESLPSSIQTMSCKLLLNLVDCIRSKSEQESGNGRDVLMRMLEVFVLKFHTIARYQLSAIFKKCKPQSELGAVEAALPGVPTAPAAPGPAPSPAPVPAPPPPPPPPPPATPVTPAPVPPFEKQGEKDKEDKQTFQVTDCRSLVKTLVCGVKTITWGITSCKAPGEAQFIPNKQLQPKETQIYIKLVKYAMQALDIYQVQIAGNGQTYIRVANCQTVRMKEEKEVLEHFAGVFTMMNPLTFKEIFQTTVPYMVERISKNYALQIVANSFLANPTTSALFATILVEYLLDRLPEMGSNVELSNLYLKLFKLVFGSVSLFAAENEQMLKPHLHKIVNSSMELAQTAKEPYNYFLLLRALFRSIGGGSHDLLYQEFLPLLPNLLQGLNMLQSGLHKQHMKDLFVELCLTVPVRLSSLLPYLPMLMDPLVSALNGSQTLVSQGLRTLELCVDNLQPDFLYDHIQPVRAELMQALWRTLRNPADSISHVAYRVLGKFGGSNRKMLKESQKLHYVVTEVQGPSITVEFSDCKASLQLPMEKAIETALDCLKSANTEPYYRRQAWEVIKCFLVAMMSLEDNKHALYQLLAHPNFTEKTIPNVIISHRYKAQDTPARKTFEQALTGAFMSAVIKDLRPSALPFVASLIRHYTMVAVAQQCGPFLLPCYQVGSQPSTAMFHSEENGSKGMDPLVLIDAIAICMAYEEKELCKIGEVALAVIFDVASIILGSKERACQLPLFSYIVERLCACCYEQAWYAKLGGVVSIKFLMERLPLTWVLQNQQTFLKALLFVMMDLTGEVSNGAVAMAKTTLEQLLMRCATPLKDEERAEEIVAAQEKSFHHVTHDLVREVTSPNSTVRKQAMHSLQVLAQVTGKSVTVIMEPHKEVLQDMVPPKKHLLRHQPANAQIGLMEGNTFCTTLQPRLFTMDLNVVEHKVFYTELLNLCEAEDSALTKLPCYKSLPSLVPLRIAALNALAACNYLPQSREKIIAALFKALNSTNSELQEAGEACMRKFLEGATIEVDQIHTHMRPLLMMLGDYRSLTLNVVNRLTSVTRLFPNSFNDKFCDQMMQHLRKWMEVVVITHKGGQRSDGNESISECGRCPLSPFCQFEEMKICSAIINLFHLIPAAPQTLVKPLLEVVMKTERAMLIEAGSPFREPLIKFLTRHPSQTVELFMMEATLNDPQWSRMFMSFLKHKDARPLRDVLAANPNRFITLLLPGGAQTAVRPGSPSTSTMRLDLQFQAIKIISIIVKNDDSWLASQHSLVSQLRRVWVSENFQERHRKENMAATNWKEPKLLAYCLLNYCKRNYGDIELLFQLLRAFTGRFLCNMTFLKEYMEEEIPKNYSIAQKRALFFRFVDFNDPNFGDELKAKVLQHILNPAFLYSFEKGEGEQLLGPPNPEGDNPESITSVFITKVLDPEKQADMLDSLRIYLLQYATLLVEHAPHHIHDNNKNRNSKLRRLMTFAWPCLLSKACVDPACKYSGHLLLAHIIAKFAIHKKIVLQVFHSLLKAHAMEARAIVRQAMAILTPAVPARMEDGHQMLTHWTRKIIVEEGHTVPQLVHILHLIVQHFKVYYPVRHHLVQHMVSAMQRLGFTPSVTIEQRRLAVDLSEVVIKWELQRIKDQQPDSDMDPNSSGEGVNSVSSSIKRGLSVDSAQEVKRFRTATGAISAVFGRSQSLPGADSLLAKPIDKQHTDTVVNFLIRVACQVNDNTNTAGSPGEVLSRRCVNLLKTALRPDMWPKSELKLQWFDKLLMTVEQPNQVNYGNICTGLEVLSFLLTVLQSPAILSSFKPLQRGIAACMTCGNTKVLRAVHSLLSRLMSIFPTEPSTSSVASKYEELECLYAAVGKVIYEGLTNYEKATNANPSQLFGTLMILKSACSNNPSYIDRLISVFMRSLQKMVREHLNPQAASGSTEATSGTSELVMLSLELVKTRLAVMSMEMRKNFIQAILTSLIEKSPDAKILRAVVKIVEEWVKNNSPMAANQTPTLREKSILLVKMMTYIEKRFPEDLELNAQFLDLVNYVYRDETLSGSELTAKLEPAFLSGLRCAQPLIRAKFFEVFDNSMKRRVYERLLYVTCSQNWEAMGNHFWIKQCIELLLAVCEKSTPIGTSCQGAMLPSITNVINLADSHDRAAFAMVTHVKQEPRERENSESKEEDVEIDIELAPGDQTSTPKTKELSEKDIGNQLHMLTNRHDKFLDTLREVKTGALLSAFVQLCHISTTLAEKTWVQLFPRLWKILSDRQQHALAGEISPFLCSGSHQVQRDCQPSALNCFVEAMSQCVPPIPIRPCVLKYLGKTHNLWFRSTLMLEHQAFEKGLSLQIKPKQTTEFYEQESITPPQQEILDSLAELYSLLQEEDMWAGLWQKRCKYSETATAIAYEQHGFFEQAQESYEKAMDKAKKEHERSNASPAIFPEYQLWEDHWIRCSKELNQWEALTEYGQSKGHINPYLVLECAWRVSNWTAMKEALVQVEVSCPKEMAWKVNMYRGYLAICHPEEQQLSFIERLVEMASSLAIREWRRLPHVVSHVHTPLLQAAQQIIELQEAAQINAGLQPTNLGRNNSLHDMKTVVKTWRNRLPIVSDDLSHWSSIFMWRQHHYQAIVTAYENSSQHDPSSNNAMLGVHASASAIIQYGKIARKQGLVNVALDILSRIHTIPTVPIVDCFQKIRQQVKCYLQLAGVMGKNECMQGLEVIESTNLKYFTKEMTAEFYALKGMFLAQINKSEEANKAFSAAVQMHDVLVKAWAMWGDYLENIFVKERQLHLGVSAITCYLHACRHQNESKSRKYLAKVLWLLSFDDDKNTLADAVDKYCIGVPPIQWLAWIPQLLTCLVGSEGKLLLNLISQVGRVYPQAVYFPIRTLYLTLKIEQRERYKSDSGQQQPSSVGNQSHSASDPGPIRATAPMWRCSRIMHMQRELHPTLLSSLEGIVDQMVWFRENWHEEVLRQLQQGLAKCYSVAFEKSGAVSDAKITPHTLNFVKKLVSTFGVGLENVSNVSTMFSSAASESLARRAQATAQDPVFQKLKGQFTTDFDFSVPGSMKLHNLISKLKKWIKILEAKTKQLPKFFLIEEKCRFLSNFSAQTAEVEIPGEFLMPKPTHYYIKIARFMPRVEIVQKHNTAARRLYIRGHNGKIYPYLVMNDACLTESRREERVLQLLRLLNPCLEKRKETTKRHLFFTVPRVVAVSPQMRLVEDNPSSLSLVEIYKQRCAKKGIEHDNPISRYYDRLATVQARGTQASHQVLRDILKEVQSNMVPRSMLKEWALHTFPNATDYWTFRKMFTIQLALIGFAEFVLHLNRLNPEMLQIAQDTGKLNVAYFRFDINDATGDLDANRPVPFRLTPNISEFLTTIGVSGPLTASMIAVARCFAQPNFKVDGILKTVLRDEIIAWHKMDSQQLVSLVQKAVTAIMTRLHNLAQFEGGESKVNTLVAAANSLDNLCRMDPAWHPWL

SEQ ID NO: 865316 - protein, 1244 aa, Homo sapiens
TEYEEAVLLLFQCGGGGSLTVHGRALAGEISPFLCSGSHQVQRDCQPSALNCFVEAMSQCVPPIPIRPCVLKYLGKTHNLWFRSTLMLEHQAFEKGLSLQIKPKQTTEFYEQESITPPQQEILDSLAELYSLLQEEDMWAGLWQKRCKYSETATAIAYEQHGFFEQAQESYEKAMDKAKKEHERSNASPAIFPEYQLWEDHWIRCSKELNQWEALTEYGQSKGHINPYLVLECAWRVSNWTAMKEALVQVEVSCPKEMAWKVNMYRGYLAICHPEEQQLSFIERLVEMASSLAIREWRRLPHVVSHVHTPLLQAAQQIIELQEAAQINAGLQPTNLGRNNSLHDMKTVVKTWRNRLPIVSDDLSHWSSIFMWRQHHYQAIVTAYENSSQHDPSSNNAMLGVHASASAIIQYGKIARKQGLVNVALDILSRIHTIPTVPIVDCFQKIRQQVKCYLQLAGVMGKNECMQGLEVIESTNLKYFTKEMTAEFYALKGMFLAQINKSEEANKAFSAAVQMHDVLVKAWAMWGDYLENIFVKERQLHLGVSAITCYLHACRHQNESKSRKYLAKVLWLLSFDDDKNTLADAVDKYCIGVPPIQWLAWIPQLLTCLVGSEGKLLLNLISQVGRVYPQAVYFPIRTLYLTLKIEQRERYKSDSGQQQPSSVGNQSHSASDPGPIRATAPMWRCSRIMHMQRELHPTLLSSLEGIVDQMVWFRENWHEEVLRQLQQGLAKCYSVAFEKSGAVSDAKITPHTLNFVKKLVSTFGVGLENVSNVSTMFSSAASESLARRAQATAQDPVFQKLKGQFTTDFDFSVPGSMKLHNLISKLKKWIKILEAKTKQLPKFFLIEEKCRFLSNFSAQTAEVEIPGEFLMPKPTHYYIKIARFMPRVEIVQKHNTAARRLYIRGHNGKIYPYLVMNDACLTESRREERVLQLLRLLNPCLEKRKETTKRHLFFTVPRVVAVSPQMRLVEDNPSSLSLVEIYKQRCAKKGIEHDNPISRYYDRLATVQARGTQASHQVLRDILKEVQSNMVPRSMLKEWALHTFPNATDYWTFRKMFTIQLALIGFAEFVLHLNRLNPEMLQIAQDTGKLNVAYFRFDINDATGDLDANRPVPFRLTPNISEFLTTIGVSGPLTASMIAVARCFAQPNFKVDGILKTVLRDEIIAWHKKTQEDTSSPLSAAGQPENMDSQQLVSLVQKAVTAIMTRLHNLAQFEGGESKVNTLVAAANSLDNLCRMDPAWHPWL

SEQ ID NO: 865317 - protein, 729 aa, Homo sapiens
QLWRELLTQGELLTQGELLTQERQLHLGVSAITCYLHACRHQNESKSRKYLAKVLWLLSFDDDKNTLADAVDKYCIGVPPIQWLAWIPQLLTCLVGSEGKLLLNLISQVGRVYPQAVYFPIRTLYLTLKIEQRERYKSDSGQQQPSSVGNQSHSASDPGPIRATAPMWRCSRIMHMQRELHPTLLSSLEGIVDQMVWFRENWHEEVLRQLQQGLAKCYSVAFEKSGAVSDAKITPHTLNFVKKLVSTFGVGLENVSNVSTMFSSAASESLARRAQATAQDPVFQKLKGQFTTDFDFSVPGSMKLHNLISKLKKWIKILEAKTKQLPKFFLIEEKCRFLSNFSAQTAEVEIPGEFLMPKPTHYYIKIARFMPRVEIVQKHNTAARRLYIRGHNGKIYPYLVMNDACLTESRREERVLQLLRLLNPCLEKRKETTKRHLFFTVPRVVAVSPQMRLVEDNPSSLSLVEIYKQRCAKKGIEHDNPISRYYDRLATVQARGTQASHQVLRDILKEVQSNMVPRSMLKEWALHTFPNATDYWTFRKMFTIQLALIGFAEFVLHLNRLNPEMLQIAQDTGKLNVAYFRFDINDATGDLDANRPVPFRLTPNISEFLTTIGVSGPLTASMIAVARCFAQPNFKVDGILKTVLRDEIIAWHKKTQEDTSSPLSAAGQPENMDSQQLVSLVQKAVTAIMTRLHNLAQFEGGESKVNTLVAAANSLDNLCRMDPAWHPWL

SEQ ID NO: 865318 - protein, 3866 aa, Homo sapiens; identical to SEQ ID NO: 865314

SEQ ID NO: 865319 - protein, 2762 aa, Homo sapiens
MAFVATQGATVVDQTTLMKKYLQFVAALTDVNTPDETKLKMMQEVSENFENVTSSPQYSTFLEHIIPRFLTFLQDGEVQFLQEKPAQQLRKLVLEIIHRIPTNEHLRPHTKNVLSVMFRFLETENEENVLICLRIIIELHKQFRPPITQEIHHFLDFVKQIYKELPKVVNRYFENPQVIPENTVPPPEMVGMITTIAVKVNPEREDSETRTHSIIPRGSLSLKVLAELPIIVVLMYQLYKLNIHNVVAEFVPLIMNTIAIQVSAQARQHKLYNKELYADFIAAQIKTLSFLAYIIRIYQELVTKYSQQMVKGMLQLLSNCPAETAHLRKELLIAAKHILTTELRNQFIPCMDKLFDESILIGSGYTARETLRPLAYSTLADLVHHVRQHLPLSDLSLAVQLFAKNIDDESLPSSIQTMSCKLLLNLVDCIRSKSEQESGNGRDVLMRMLEVFVLKFHTIARYQLSAIFKKCKPQSELGAVEAALPGVPTAPAAPGPAPSPAPVPAPPPPPPPPPPATPVTPAPVPPFEKQGEKDKEDKQTFQVTDCRSLVKTLVCGVKTITWGITSCKAPGEAQFIPNKQLQPKETQIYIKLVKYAMQALDIYQVQIAGNGQTYIRVANCQTVRMKEEKEVLEHFAGVFTMMNPLTFKEIFQTTVPYMVERISKNYALQIVANSFLANPTTSALFATILVEYLLDRLPEMGSNVELSNLYLKLFKLVFGSVSLFAAENEQMLKPHLHKIVNSSMELAQTAKEPYNYFLLLRALFRSIGGGSHDLLYQEFLPLLPNLLQGLNMLQSGLHKQHMKDLFVELCLTVPVRLSSLLPYLPMLMDPLVSALNGSQTLVSQGLRTLELCVDNLQPDFLYDHIQPVRAELMQALWRTLRNPADSISHVAYRVLGKFGGSNRKMLKESQKLHYVVTEVQGPSITVEFSDCKASLQLPMEKAIETALDCLKSANTEPYYRRQAWEVIKCFLVAMMSLEDNKHALYQLLAHPNFTEKTIPNVIISHRYKAQDTPARKTFEQALTGAFMSAVIKDLRPSALPFVASLIRHYTMVAVAQQCGPFLLPCYQVGSQPSTAMFHSEENGSKGMDPLVLIDAIAICMAYEEKELCKIGEVALAVIFDVASIILGSKERACQLPLFSYIVERLCACCYEQAWYAKLGGVVSIKFLMERLPLTWVLQNQQTFLKALLFVMMDLTGEVSNGAVAMAKTTLEQLLMRCATPLKDEERAEEIVAAQEKSFHHVTHDLVREVTSPNSTVRKQAMHSLQVLAQVTGKSVTVIMEPHKEVLQDMVPPKKHLLRHQPANAQIGLMEGNTFCTTLQPRLFTMDLNVVEHKVFYTELLNLCEAEDSALTKLPCYKSLPSLVPLRIAALNALAACNYLPQSREKIIAALFKALNSTNSELQEAGEACMRKFLEGATIEVDQIHTHMRPLLMMLGDYRSLTLNVVNRLTSVTRLFPNSFNDKFCDQMMQHLRKWMEVVVITHKGGQRSDGNESISECGRCPLSPFCQFEEMKICSAIINLFHLIPAAPQTLVKPLLEVVMKTERAMLIEAGSPFREPLIKFLTRHPSQTVELFMMEATLNDPQWSRMFMSFLKHKDARPLRDVLAANPNRFITLLLPGGAQTAVRPGSPSTSTMRLDLQFQAIKIISIIVKNDDSWLASQHSLVSQLRRVWVSENFQERHRKENMAATNWKEPKLLAYCLLNYCKRNYGDIELLFQLLRAFTGRFLCNMTFLKEYMEEEIPKNYSIAQKRALFFRFVDFNDPNFGDELKAKVLQHILNPAFLYSFEKGEGEQLLGPPNPEGDNPESITSVFITKVLDPEKQADMLDSLRIYLLQYATLLVEHAPHHIHDNNKNRNSKLRRLMTFAWPCLLSKACVDPACKYSGHLLLAHIIAKFAIHKKIVLQVFHSLLKAHAMEARAIVRQAMAILTPAVPARMEDGHQMLTHWTRKIIVEEGHTVPQLVHILHLIVQHFKVYYPVRHHLVQHMVSAMQRLGFTPSVTIEQRRLAVDLSEVVIKWELQRIKDQQPDSDMDPNSSGEGVNSVSSSIKRGLSVDSAQEVKRFRTATGAISAVFGRSQSLPGADSLLAKPIDKQHTDTVVNFLIRVACQVNDNTNTAGSPGEVLSRRCVNLLKTALRPDMWPKSELKLQWFDKLLMTVEQPNQVNYGNICTGLEVLSFLLTVLQSPAILSSFKPLQRGIAACMTCGNTKVLRAVHSLLSRLMSIFPTEPSTSSVASKYEELECLYAAVGKVIYEGLTNYEKATNANPSQLFGTLMILKSACSNNPSYIDRLISVFMRSLQKMVREHLNPQAASGSTEATSGTSELVMLSLELVKTRLAVMSMEMRKNFIQAILTSLIEKSPDAKILRAVVKIVEEWVKNNSPMAANQTPTLREKSILLVKMMTYIEKRFPEDLELNAQFLDLVNYVYRDETLSGSELTAKLEPAFLSGLRCAQPLIRAKFFEVFDNSMKRRVYERLLYVTCSQNWEAMGNHFWIKQCIELLLAVCEKSTPIGTSCQGAMLPSITNVINLADSHDRAAFAMVTHVKQEPRERENSESKEEDVEIDIELAPGDQTSTPKTKELSEKDIGNQLHMLTNRHDKFLDTLREVKTGALLSAFVQLCHISTTLAEKTWVQLFPRLWKILSDRQQHALAGEISPFLCSGSHQVQRDCQPSALNCFVEAMSQCVPPIPIRPCVLKYLGKTHNLWFRSTLMLEHQAFEKGLSLQIKPKQTTEFYEQESITPPQQVRVRLSLLITSSLPVTSHFK

SEQ ID NO: 865320 - protein, 1307 aa, Homo sapiens
MAFVATQGATVVDQTTLMKKYLQFVAALTDVNTPDETKLKMMQEVSENFENVTSSPQYSTFLEHIIPRFLTFLQDGEVQFLQEKPAQQLRKLVLEIIHRIPTNEHLRPHTKNVLSVMFRFLETENEENVLICLRIIIELHKQFRPPITQEIHHFLDFVKQIYKELPKVVNRYFENPQVIPENTVPPPEMVGMITTIAVKVNPEREDSETRTHSIIPRGSLSLKVLAELPIIVVLMYQLYKLNIHNVVAEFVPLIMNTIAIQVSAQARQHKLYNKELYADFIAAQIKTLSFLAYIIRIYQELVTKYSQQMVKGMLQLLSNCPAETAHLRKELLIAAKHILTTELRNQFIPCMDKLFDESILIGSGYTARETLRPLAYSTLADLVHHVRQHLPLSDLSLAVQLFAKNIDDESLPSSIQTMSCKLLLNLVDCIRSKSEQESGNGRDVLMRMLEVFVLKFHTIARYQLSAIFKKCKPQSELGAVEAALPGVPTAPAAPGPAPSPAPVPAPPPPPPPPPPATPVTPAPVPPFEKQGEKDKEDKQTFQVTDCRSLVKTLVCGVKTITWGITSCKAPGEAQFIPNKQLQPKETQIYIKLVKYAMQALDIYQVQIAGNGQTYIRVANCQTVRMKEEKEVLEHFAGVFTMMNPLTFKEIFQTTVPYMVERISKNYALQIVANSFLANPTTSALFATILVEYLLDRLPEMGSNVELSNLYLKLFKLVFGSVSLFAAENEQMLKPHLHKIVNSSMELAQTAKEPYNYFLLLRALFRSIGGGSHDLLYQEFLPLLPNLLQGLNMLQSGLHKQHMKDLFVELCLTVPVRLSSLLPYLPMLMDPLVSALNGSQTLVSQGLRTLELCVDNLQPDFLYDHIQPVRAELMQALWRTLRNPADSISHVAYRVLGKFGGSNRKMLKESQKLHYVVTEVQGPSITVEFSDCKASLQLPMEKAIETALDCLKSANTEPYYRRQAWEVIKCFLVAMMSLEDNKHALYQLLAHPNFTEKTIPNVIISHRYKAQDTPARKTFEQALTGAFMSAVIKDLRPSALPFVASLIRHYTMVAVAQQCGPFLLPCYQVGSQPSTAMFHSEENGSKGMDPLVLIDAIAICMAYEEKELCKIGEVALAVIFDVASIILGSKERACQLPLFSYIVERLCACCYEQAWYAKLGGVVSIKFLMERLPLTWVLQNQQTFLKALLFVMMDLTGEVSNGAVAMAKTTLEQLLMRCATPLKDEERAEEIVAAQEKSFHHVTHDLVREVTSPNSTVRKQAMHSLQVLAQVTGKSVTVIMEPHKEVLQDMSPYRSTCSNTPTHIEVRY

SEQ ID NO: 865321 - protein, 76 aa, Homo sapiens
TLMILKSACSNNPSYIDRLISVFMRSLQKMVREHLNPQAASGSTEATSGDVLATGGLSSDSVEQRTDSVVQAGAEL

SEQ ID NO: 865322 - protein, 1064 aa, Homo sapiens
FFEQAQESYEKAMDKANWEDHWIRCSKELNQWEALTEYGQSKGHINPYLVLECAWRVSNWTAMKEALVQVEVSCPKEMAWKVNMYRGYLAICHPEEQQLSFIERLVEMASSLAIREWRRLPHVVSHVHTPLLQAAQQIIELQEAAQINAGLQPTNLGRNNSLHDMKTVVKTWRNRLPIVSDDLSHWSSIFMWRQHHYQAIVTAYENSSQHDPSSNNAMLGVHASASAIIQYGKIARKQGLVNVALDILSRIHTIPTVPIVDCFQKIRQQVKCYLQLAGVMGKNECMQGLEVIESTNLKYFTKEMTAEFYALKGMFLAQINKSEEANKAFSAAVQMHDVLVKAWAMWGDYLENIFVKERQLHLGVSAITCYLHACRHQNESKSRKYLAKVLWLLSFDDDKNTLADAVDKYCIGVPPIQWLAWIPQLLTCLVGSEGKLLLNLISQVGRVYPQAVYFPIRTLYLTLKIEQRERYKSDSGQQQPSSVGNQSHSASDPGPIRATAPMWRCSRIMHMQRELHPTLLSSLEGIVDQMVWFRENWHEEVLRQLQQGLAKCYSVAFEKSGAVSDAKITPHTLNFVKKLVSTFGVGLENVSNVSTMFSSAASESLARRAQATAQDPVFQKLKGQFTTDFDFSVPGSMKLHNLISKLKKWIKILEAKTKQLPKFFLIEEKCRFLSNFSAQTAEVEIPGEFLMPKPTHYYIKIARFMPRVEIVQKHNTAARRLYIRGHNGKIYPYLVMNDACLTESRREERVLQLLRLLNPCLEKRKETTKRHLFFTVPRVVAVSPQMRLVEDNPSSLSLVEIYKQRCAKKGIEHDNPISRYYDRLATVQARGTQASHQVLRDILKEVQSNMVPRSMLKEWALHTFPNATDYWTFRKMFTIQLALIGFAEFVLHLNRLNPEMLQIAQDTGKLNVAYFRFDINDATGDLDANRPVPFRLTPNISEFLTTIGVSGPLTASMIAVARCFAQPNFKVDGILKTVLRDEIIAWHKKTQEDTSSPLSAAGQPENMDSQQLVSLVQKAVTAIMTRLHNLAQFEGGESKVNTLVAAANSLDNLCRMDPAWHPWL

SEQ ID NO: 865323 - protein, 476 aa, Homo sapiens
CKVVDWCCRRQRSGLGENAWAQATAQDPVFQKLKGQFTTDFDFSVPGSMKLHNLISKLKKWIKILEAKTKQLPKFFLIEEKCRFLSNFSAQTAEVEIPGEFLMPKPTHYYIKIARFMPRVEIVQKHNTAARRLYIRGHNGKIYPYLVMNDACLTESRREERVLQLLRLLNPCLEKRKETTKRHLFFTVPRVVAVSPQMRLVEDNPSSLSLVEIYKQRCAKKGIEHDNPISRYYDRLATVQARGTQASHQVLRDILKEVQSNMVPRSMLKEWALHTFPNATDYWTFRKMFTIQLALIGFAEFVLHLNRLNPEMLQIAQDTGKLNVAYFRFDINDATGDLDANRPVPFRLTPNISEFLTTIGVSGPLTASMIAVARCFAQPNFKVDGILKTVLRDEIIAWHKKTQEDTSSPLSAAGQPENMDSQQLVSLVQKAVTAIMTRLHNLAQFEGGESKVNTLVAAANSLDNLCRMDPAWHPWL

SEQ ID NO: 865324 - protein, 3866 aa, Homo sapiens; identical to SEQ ID NO: 865314

SEQ ID NO: 865325 - protein, 1067 aa, Homo sapiens
MAFVATQGATVVDQTTLMKKYLQFVAALTDVNTPDETKLKMMQEVSENFENVTSSPQYSTFLEHIIPRFLTFLQDGEVQFLQEKPAQQLRKLVLEIIHRIPTNEHLRPHTKNVLSVMFRFLETENEENVLICLRIIIELHKQFRPPITQEIHHFLDFVKQIYKELPKVVNRYFENPQVIPENTVPPPEMVGMITTIAVKVNPEREDSETRTHSIIPRGSLSLKVLAELPIIVVLMYQLYKLNIHNVVAEFVPLIMNTIAIQVSAQARQHKLYNKELYADFIAAQIKTLSFLAYIIRIYQELVTKYSQQMVKGMLQLLSNCPAETAHLRKELLIAAKHILTTELRNQFIPCMDKLFDESILIGSGYTARETLRPLAYSTLADLVHHVRQHLPLSDLSLAVQLFAKNIDDESLPSSIQTMSCKLLLNLVDCIRSKSEQESGNGRDVLMRMLEVFVLKFHTIARYQLSAIFKKCKPQSELGAVEAALPGVPTAPAAPGPAPSPAPVPAPPPPPPPPPPATPVTPAPVPPFEKQGEKDKEDKQTFQVTDCRSLVKTLVCGVKTITWGITSCKAPGEAQFIPNKQLQPKETQIYIKLVKYAMQALDIYQVQIAGNGQTYIRVANCQTVRMKEEKEVLEHFAGVFTMMNPLTFKEIFQTTVPYMVERISKNYALQIVANSFLANPTTSALFATILVEYLLDRLPEMGSNVELSNLYLKLFKLVFGSVSLFAAENEQMLKPHLHKIVNSSMELAQTAKEPYNYFLLLRALFRSIGGGSHDLLYQEFLPLLPNLLQGLNMLQSGLHKQHMKDLFVELCLTVPVRLSSLLPYLPMLMDPLVSALNGSQTLVSQGLRTLELCVDNLQPDFLYDHIQPVRAELMQALWRTLRNPADSISHVAYRVLGKFGGSNRKMLKESQKLHYVVTEVQGPSITVEFSDCKASLQLPMEKAIETALDCLKSANTEPYYRRQAWEVIKCFLVAMMSLEDNKHALYQLLAHPNFTEKTIPNVIISHRYKAQDTPARKTFEQALTGAFMSAVIKDLRPSALPFVASLIRHYTMVAVAQQCDRVSLCCPG

SEQ ID NO: 865326 - protein, 1443 aa, Homo sapiens
MAFVATQGATVVDQTTLMKKYLQFVAALTDVNTPDETKLKMMQEVSENFENVTSSPQYSTFLEHIIPRFLTFLQDGEVQFLQEKPAQQLRKLVLEIIHRIPTNEHLRPHTKNVLSVMFRFLETENEENVLICLRIIIELHKQFRPPITQEIHHFLDFVKQIYKELPKVVNRYFENPQVIPENTVPPPEMVGMITTIAVKVNPEREDSETRTHSIIPRGSLSLKVLAELPIIVVLMYQLYKLNIHNVVAEFVPLIMNTIAIQVSAQARQHKLYNKELYADFIAAQIKTLSFLAYIIRIYQELVTKYSQQMVKGMLQLLSNCPAETAHLRKELLIAAKHILTTELRNQFIPCMDKLFDESILIGSGYTARETLRPLAYSTLADLVHHVRQHLPLSDLSLAVQLFAKNIDDESLPSSIQTMSCKLLLNLVDCIRSKSEQESGNGRDVLMRMLEVFVLKFHTIARYQLSAIFKKCKPQSELGAVEAALPGVPTAPAAPGPAPSPAPVPAPPPPPPPPPPATPVTPAPVPPFEKQGEKDKEDKQTFQVTDCRSLVKTLVCGVKTITWGITSCKAPGEAQFIPNKQLQPKETQIYIKLVKYAMQALDIYQVQIAGNGQTYIRVANCQTVRMKEEKEVLEHFAGVFTMMNPLTFKEIFQTTVPYMVERISKNYALQIVANSFLANPTTSALFATILVEYLLDRLPEMGSNVELSNLYLKLFKLVFGSVSLFAAENEQMLKPHLHKIVNSSMELAQTAKEPYNYFLLLRALFRSIGGGSHDLLYQEFLPLLPNLLQGLNMLQSGLHKQHMKDLFVELCLTVPVRLSSLLPYLPMLMDPLVSALNGSQTLVSQGLRTLELCVDNLQPDFLYDHIQPVRAELMQALWRTLRNPADSISHVAYRVLGKFGGSNRKMLKESQKLHYVVTEVQGPSITVEFSDCKASLQLPMEKAIETALDCLKSANTEPYYRRQAWEVIKCFLVAMMSLEDNKHALYQLLAHPNFTEKTIPNVIISHRYKAQDTPARKTFEQALTGAFMSAVIKDLRPSALPFVASLIRHYTMVAVAQQCGPFLLPCYQVGSQPSTAMFHSEENGSKGMDPLVLIDAIAICMAYEEKELCKIGEVALAVIFDVASIILGSKERACQLPLFSYIVERLCACCYEQAWYAKLGGVVSIKFLMERLPLTWVLQNQQTFLKALLFVMMDLTGEVSNGAVAMAKTTLEQLLMRCATPLKDEERAEEIVAAQEKSFHHVTHDLVREVTSPNSTVRKQAMHSLQVLAQVTGKSVTVIMEPHKEVLQDMVPPKKHLLRHQPANAQIGLMEGNTFCTTLQPRLFTMDLNVVEHKVFYTELLNLCEAEDSALTKLPCYKSLPSLVPLRIAALNALAACNYLPQSREKIIAALFKALNSTNSELQESPAAVTSEPREGQPGSQMIGKTTVLKRDSGVTERGSSTGV

SEQ ID NO: 865327 - protein, 100 aa, Homo sapiens
TLSGSELTAKLEPAFLSGLRCAQPLIRAKFFEVFDNSMKRRVYERLLYVTCSQNWEAMGNHFWIKQCIEVGRLGSHLWPGAAVGFLSWGSKARRCSHTLR

SEQ ID NO: 865328 - protein, 270 aa, Homo sapiens
MRLIELLDSDRQEHQDLGLYHLKQINSPMMTVSAYNNFLNYVSSLPSTKAGPKIVSHLLHLVDNKESLENISENDDYLKHQPEISLQMQLLRGLWQICPQAYFSMVSEHLLVLALKTAYQSNTVAACSPFVLQFLQGRTLTLGALNLQYFFDHPESLSLLRSIHFSIRGNKTSPRAHFSVLETCFDKSQVPTIDQDYASAFEPMNEWGAKFRLEKEDNVKSYMDMAAQGITRTLVLAIGKLFSKGRYKIPCLEVDVNDIDVVGQDMLEIL

SEQ ID NO: 865329 - protein, 623 aa, Homo sapiens
MNRYTTMRQLGDGTYGSVLMGKSNESGELVAIKRMKRKFYSWDECMNLREVKSLKKLNHANVIKLKEVIRENDHLYFIFEYMKENLYQLMKDRNKLFPESVIRNIMYQILQGLAFIHKHGFFHRDMKPENLLCMGPELVKIADFGLARELRSQPPYTDYVSTRWYRAPEVLLRSSVYSSPIDVWAVGSIMAELYMLRPLFPGTSEVDEIFKICQVLGTPKKSDWPEGYQLASSMNFRFPQCVPINLKTLIPNASNEAIQLMTEMLNWDPKKRPTASQALKHPYFQVGQVLGPSSNHLESKQSLNKQLQPLESKPSLVEVEPKPLPDIIDQVVGQPQPKTSQQPLQPIQPPQNLSVQQPPKQQSQEKPPQTLFPSIVKNMPTKPNGTLSHKSGRRRWGQTIFKSGDSWEELEDYDFGASHSKKPSMGVFKEKRKKDSPFRLPEPVPSGSNHSTGENKSLPAVTSLKSDSELSTAPTSKQYYLKQSRYLPGVNPKKVSLIASGKEINPHTWSNQLFPKSLGPVGAELAFKRSNAGNLGSYATYNQSGYIPSFLKKEVQSAGQRIHLAPLNATASEYTWNTKTGRGQFSGRTYNPTAKNLNIVNRAQPIPSVHGRTDWVAKYGGHR

SEQ ID NO: 865330 - protein, 623 aa, Homo sapiens; identical to SEQ ID NO: 865329

SEQ ID NO: 865331 - protein, 386 aa, Homo sapiens
MNRYTTMRQLGDGTYGSVLMGKSNESGELVAIKRMKRKFYSWDECMNLREVKSLKKLNHANVIKLKEVIRENDHLYFIFEYMKENLYQLMKDRNKLFPESVIRNIMYQILQGLAFIHKHGFFHRDMKPENLLCMGPELVKIADFGLARELRSQPPYTDYVSTRWYRAPEVLLRSSVYSSPIDVWAVGSIMAELYMLRPLFPGTSEVDEIFKICQVLGTPKKSDWPEGYQLASSMNFRFPQCVPINLKTLIPNASNEAIQLMTEMLNWDPKKRPTASQALKHPYFQVGQVLGPSSNHLESKQSLNKQLQPLESKPSLVEVEPKPLPDIIDQVVGQPQPKTSQQPLQPIQPPQNLSVQQPPKQQSQEKPPQTLFPSIVKNMPTVSSQS

SEQ ID NO: 865332 - protein, 623 aa, Homo sapiens; identical to SEQ ID NO: 865329

SEQ ID NO: 865333 - protein, 434 aa, Homo sapiens
MAELYMLRPLFPGTSEVDEIFKICQVLGTPKKSDWPEGYQLASSMNFRFPQCVPINLKTLIPNASNEAIQLMTEMLNWDPKKRPTASQALKHPYFQVGQVLGPSSNHLESKQSLNKQLQPLESKPSLVEVEPKPLPDIIDQVVGQPQPKTSQQPLQPIQPPQNLSVQQPPKQQSQEKPPQTLFPSIVKNMPTKPNGTLSHKSGRRRWGQTIFKSGDSWEELEDYDFGASHSKKPSMGVFKEKRKKDSPFRLPEPVPSGSNHSTGENKSLPAVTSLKSDSELSTAPTSKQYYLKQSRYLPGVNPKKVSLIASGKEINPHTWSNQLFPKSLGPVGAELAFKRSNAGNLGSYATYNQSGYIPSFLKKEVQSAGQRIHLAPLNATASEYTWNTKTGRGQFSGRTYNPTAKNLNIVNRAQPIPSVHGRTDWVAKYGGHR

SEQ ID NO: 865334 - protein, 128 aa, Homo sapiens
MSKPPCYEEAVLMAEPPPPYSEVLTDTRGLYRKIVTPFLSRRDSAEKQEQPPPSYKPLFLDRGYTSALHLPSAPRPAPPCPALCLQADRGRRVFPSWTDSELSSREPLEHGAWRLPVSIPLFGRTTAV

SEQ ID NO: 865335 - protein, 274 aa, Homo sapiens
MVMSQGTYTFLTCFAGFWLIWGLIVLLCCFCSFLRRRLKRRQEERLREQNLRALELEPLELEGSLAGSPPGLAPPQPPPHRSRLEAPAHAHSHPHVHVHPLLHHGPAQPHAHAHPHPHHHALPHPPPTHLSVPPRPWSYPRQAESDMSKPPCYEEAVLMAEPPPPYSEVLTDTRGLYRKIVTPFLSRRDSAEKQEQPPPSYKPLFLDRGYTSALHLPSAPRPAPPCPALCLQADRGRRVFPSWTDSELSSREPLEHGAWRLPVSIPLFGRTTAV

SEQ ID NO: 865336 - protein, 181 aa, Homo sapiens
ASIRSLRENTGGGGLGFGLGLGRGRPLAGASARGWEPAASPPPTASHSAAESDMSKPPCYEEAVLMAEPPPPYSEVLTDTRGLYRKIVTPFLSRRDSAEKQEQPPPSYKPLFLDRGYTSALHLPSAPRPAPPCPALCLQADRGRRVFPSWTDSELSSREPLEHGAWRLPVSIPLFGRTTAV

SEQ ID NO: 865337 - protein, 274 aa, Homo sapiens; identical to SEQ ID NO: 865335

SEQ ID NO: 865338 - protein, 358 aa, Homo sapiens
MAAVLKPVLLGLRDAPVHGSPTGPGAWTASKLGGIPDALPTVAAPRPVCQRCGQPLALVVQVYCPLEGSPFHRLLHVFACACPGCSTGGARSWKVFRSQCLQVPEREAQDAQKQGNSLAAEDWCEGADDWGSDTEEGPSPQFTLDFGNDASSAKDVDWTARLQDLRLQDAVLGAAHPVPPGLPLFLPYYICVADEDDYRDFVNLDHAHSLLRDYQQREGIAMDQLLSQSLPNDGDEKYEKTIIKSGDQTFYKFMKRIAACQEQILRYSWSGEPLFLTCPTSEVTELPACSQCGGQRIFEFQLMPALVSMLKSANLGLSVEFGTILVYTCEKSCWPPNHQTPMEEFCIIQEDPDELLFK

SEQ ID NO: 865339 - protein, 396 aa, Homo sapiens
MAAVLKPVLLGLRDAPVHGSPTGPGAWTASKLGGIPDALPTVAAPRPVCQRCGQPLALVVQVYCPLEGSPFHRLLHVFACACPGCSTGGARRKAGKSQSCSRGVLSSGLGRAGGLESGCSPHGPLSSPRSWKVFRSQCLQVPEREAQDAQKQGNSLAAEDWCEGADDWGSDTEEGPSPQFTLDFGNDASSAKDVDWTARLQDLRLQDAVLGAAHPVPPGLPLFLPYYICVADEDDYRDFVNLDHAHSLLRDYQQREGIAMDQLLSQSLPNDGDEKYEKTIIKSGDQTFYKFMKRIAACQEQILRYSWSGEPLFLTCPTSEVTELPACSQCGGQRIFEFQLMPALVSMLKSANLGLSVEFGTILVYTCEKSCWPPNHQTPMEEFCIIQEDPDELLFK

SEQ ID NO: 865340 - protein, 242 aa, Homo sapiens
MAAVLKPVLLGLRDAPVHGSPTGPGAWTASKLGGIPDALPTVAAPRPVCQRCGQPLALVVQVYCPLEGSPFHRLLHVFACACPGCSTGGARRRRGSPRAAPGVSFPAGWGGPAGWSRGAALTALCLHPEAGRCSAPSACRCQRERRRTLRYSWSGEPLFLTCPTSEVTELPACSQCGGQRIFEFQLMPALVSMLKSANLGLSVEFGTILVYTCEKSCWPPNHQTPMEEFCIIQEDPDELLFK

SEQ ID NO: 865341 - protein, 358 aa, Homo sapiens; identical to SEQ ID NO: 865338

SEQ ID NO: 865342 - protein, 389 aa, Homo sapiens
PRVDGKYITKSGTRVDHQTGPIVWGEPGTNGQHAFYQLIHQGTKMIPCDFLIPVQTQHPIRKGLHHKDALPTVAAPRPVCQRCGQPLALVVQVYCPLEGSPFHRLLHVFACACPGCSTGGARSWKVFRSQCLQVPEREAQDAQKQGNSLAAEDWCEGADDWGSDTEEGPSPQFTLDFGNDASSAKDVDWTARLQDLRLQDAVLGAAHPVPPGLPLFLPYYICVADEDDYRDFVNLDHAHSLLRDYQQREGIAMDQLLSQSLPNDGDEKYEKTIIKSGDQTFYKFMKRIAACQEQILRYSWSGEPLFLTCPTSEVTELPACSQCGGQRIFEFQLMPALVSMLKSANLGLSVEFGTILVYTCEKSCWPPNHQTPMEEFCIIQEDPDELLFK

SEQ ID NO: 865343 - protein, 375 aa, Homo sapiens
MEKILFYLFLIGIAVKAQICPKRCVCQILSPNLATLCAKKGLLFVPPNIDRRTVELRLADNFVTNIKRKDFANMTSLVDLTLSRNTISFITPHAFADLRNLRALHLNSNRLTKITNDMFSGLSNLHHLILNNNQLTLISSTAFDDVFALEELDLSYNNLETIPWDAVEKMVSLHTLSLDHNMIDNIPKGTFSHLHKMTRLDVTSNKLQKLPPDPLFQRAQVLATSGIISPSTFALSFGGNPLHCNCELLWLRRLSREDDLETCASPPLLTGRYFWSIPEEEFLCEPPLITRHTHEMRVLEGQRATLRCKARGDPEPAIHWISPEGKLISNATRSLVYDHGTLDILITTVKDTGAFTCLASHPAGEATPNSGSSYN

SEQ ID NO: 865344 - protein, 375 aa, Homo sapiens; identical to SEQ ID NO: 865343

SEQ ID NO: 865345 - protein, 292 aa, Homo sapiens
  misc_feature (204)..(204): Xaa can be any naturally occurring amino acid
AICTADGTMRLGEPTSNETLSCVIIFVIVYYALMAGVVTMRLGEPTSNETLSCVIIFVIVYYALMAGVVWFVVLTYAWHTSFKALGTTYQPLSGKTSYFHLLTWSLPFVLTVAILAVAQVDGDSVSGICFVGYKNYRYRAGFVLAPIGLVLIVAAFSLSSPGWLLLMNHHGAGTLYTYPENWRAFKALIAAQYSGAQVPGALPXPPTSILAKQRTLNSRKFLAGRPHIEGDGSGSETPLPICGRARGRPKSPGEGAGAQLPHTGARCPTKEGGRGGFTGSETGNHPLGRQHG

SEQ ID NO: 865346 - protein, 781 aa, Homo sapiens
VSKGLKTTWIARLGLGESCIPFRASAAQHGPRVPKFAKLGAEGPGRAERPGGPGPGFSGRTGRLSRLRGAEVVRVAGGLRGAGGGAGAFAELAGLAMAAARPARGPELPLLGLLLLLLLGDPGRGAASSGNATGPGPRSAGGSARRSAAVTGPPPPLSHCGRAAPCEPLRYNVCLGSVLPYGATSTLLAGDSDSQEEAHGKLVLWSGLRNAPRCWAVIQPLLCAVYMPKCENDRVELPSRTLCQATRGPCAIVERERGWPDFLRCTPDRFPEGCTNEVQNIKFNSSGQCEVPLVRTDNPKSWYEDVEGCGIQCQNPLFTEAEHQDMHSYIAAFGAVTGLCTLFTLATFVADWRNSNRYPAVILFYVNACFFVGSIGWLAQFMDGARREIVCRADGTMRLGEPTSNETLSCVIIFVIVYYALMAGVVWFVVLTYAWHTSFKALGTTYQPLSGKTSYFHLLTWSLPFVLTVAILAVAQVDGDSVSGICFVGYKNYRYRAGFVLAPIGLVLIVGGYFLIRGVMTLFSIKSNHPGLLSEKAASKINETMLRLGIFGFLAFGFVLITFSCHFYDFFNQAEWERSFRDYVLCQANVTIGLPTKQPIPDCEIKNRPSLLVEKINLFAMFGTGIAMSTWVWTKATLLIWRRTWCRLTGQSDDEPKRIKKSKMIAKAFSKRHELLQNPGQELSFSMHTVSHDGPVAGLAFDLNEPSADVSSAWAQHVTKMVARRGAILPQDISVTPVATPGMRVQASGGRWGEHRGWGLLGLEYRGCRRRRKRKERPQRI

SEQ ID NO: 865347 - protein, 751 aa, Homo sapiens
MAAARPARGPELPLLGLLLLLLLGDPGRGAASSGNATGPGPRSAGGSARRSAAVTGPPPPLSHCGRAAPCEPLRYNVCLGSVLPYGATSTLLAGDSDSQEEAHGKLVLWSGLRNAPRCWAVIQPLLCAVYMPKCENDRVELPSRTLCQATRGPCAIVERERGWPDFLRCTPDRFPEGCTNEVQNIKFNSSGQCEVPLVRTDNPKSWYEDVEGCGIQCQNPLFTEAEHQDMHSYIAAFGAVTGLCTLFTLATFVADWRNSNRYPAVILFYVNACFFVGSIGWLAQFMDGARREIVCRADGTMRLGEPTSNETLSCVIIFVIVYYALMAGVVWFVVLTYAWHTSFKALGTTYQPLSGKTSYFHLLTWSLPFVLTVAILAVAQVDGDSVSGICFVGYKNYRYRAGFVLAPIGLVLIVGGYFLIRGVMTLFSIKSNHPGLLSEKAASKINETMLRLGCQANVTIGLPTKQPIPDCEIKNRPSLLVEKINLFAMFGTGIAMSTWVWTKATLLIWRRTWCRLTGQSDDEPKRIKKSKMIAKAFSKRHELLQNPGQELSFSMHTVSHDGPVAGLAFDLNEPSADVSSAWAQHVTKMVARRGAILPQDISVTPVATPVPPEEQANLWLVEAEISPELQKRLGRKKKRRKRKKEVCPLAPPPELHPPAPAPSTIPRLPQLPRQKCLVAAGAWGAGDSCRQGAWTLVSNPFCPEPSPPQDPFLPSAPAPVAWAHGRRQGLGPIHSRTNLMDTELMDADSDF

SEQ ID NO: 865348 - protein, 925 aa, Homo sapiens
VSKGLKTTWIARLGLGESCIPFRASAAQHGPRVPKFAKLGAEGPGRAERPGGPGPGFSGRTGRLSRLRGAEVVRVAGGLRGAGGGAGAFAELAGLAMAAARPARGPELPLLGLLLLLLLGDPGRGAASSGNATGPGPRSAGGSARRSAAVTGPPPPLSHCGRAAPCEPLRYNVCLGSVLPYGATSTLLAGDSDSQEEAHGKLVLWSGLRNAPRCWAVIQPLLCAVYMPKCENDRVELPSRTLCQATRGPCAIVERERGWPDFLRCTPDRFPEGCTNEVQNIKFNSSGQCEVPLVRTDNPKSWYEDVEGCGIQCQNPLFTEAEHQDMHSYIAAFGAVTGLCTLFTLATFVADWRNSNRYPAVILFYVNACFFVGSIGWLAQFMDGARREIVCRADGTMRLGEPTSNETLSCVIIFVIVYYALMAGVVWFVVLTYAWHTSFKALGTTYQPLSGKTSYFHLLTWSLPFVLTVAILAVAQVDGDSVSGICFVGYKNYRYRAGFVLAPIGLVLIVGGYFLIRGVMTLFSIKSNHPGLLSEKAASKINETMLRLGIFGFLAFGFVLITFSCHFYDFFNQAEWERSFRDYVLCQANVTIGLPTKQPIPDCEIKNRPSLLVEKINLFAMFGTGIAMSTWVWTKATLLIWRRTWCRLTGQSDDEPKRIKKSKMIAKAFSKRHELLQNPGQELSFSMHTVSHDGPVVALPGQEKSGFQELDFWPPVRPFGDVRPFSSDSEGVEITVVQAGLAFDLNEPSADVSSAWAQHVTKMVARRGAILPQDISVTPVATPVPPEEQANLWLVEAEISPELQKRLGRKKKRRKRKKEVCPLAPPPELHPPAPAPSTIPRLPQLPRQKCLVAAGAWGAGDSCRQGAWTLVSNPFCPEPSPPQDPFLPSAPAPVAWAHGRRQGLGPIHSRTNLMDTELMDADSDF

SEQ ID NO: 865349 - protein, 883 aa, Homo sapiens
VSKGLKTTWIARLGLGESCIPFRASAAQHGPRVPKFAKLGAEGPGRAERPGGPGPGFSGRTGRLSRLRGAEVVRVAGGLRGAGGGAGAFAELAGLAMAAARPARGPELPLLGLLLLLLLGDPGRGAASSGNATGPGPRSAGGSARRSAAVTGPPPPLSHCGRAAPCEPLRYNVCLGSVLPYGATSTLLAGDSDSQEEAHGKLVLWSGLRNAPRCWAVIQPLLCAVYMPKCENDRVELPSRTLCQATRGPCAIVERERGWPDFLRCTPDRFPEGCTNEVQNIKFNSSGQCEVPLVRTDNPKSWYEDVEGCGIQCQNPLFTEAEHQDMHSYIAAFGAVTGLCTLFTLATFVADWRNSNRYPAVILFYVNACFFVGSIGWLAQFMDGARREIVCRADGTMRLGEPTSNETLSCVIIFVIVYYALMAGVVWFVVLTYAWHTSFKALGTTYQPLSGKTSYFHLLTWSLPFVLTVAILAVAQVDGDSVSGICFVGYKNYRYRAGFVLAPIGLVLIVGGYFLIRGVMTLFSIKSNHPGLLSEKAASKINETMLRLGIFGFLAFGFVLITFSCHFYDFFNQAEWERSFRDYVLCQANVTIGLPTKQPIPDCEIKNRPSLLVEKINLFAMFGTGIAMSTWVWTKATLLIWRRTWCRLTGQSDDEPKRIKKSKMIAKAFSKRHELLQNPGQELSFSMHTVSHDGPVAGLAFDLNEPSADVSSAWAQHVTKMVARRGAILPQDISVTPVATPVPPEEQANLWLVEAEISPELQKRLGRKKKRRKRKKEVCPLAPPPELHPPAPAPSTIPRLPQLPRQKCLVAAGAWGAGDSCRQGAWTLVSNPFCPEPSPPQDPFLPSAPAPVAWAHGRRQGLGPIHSRTNLMDTELMDADSDF

SEQ ID NO: 865350 - protein, 628 aa, Homo sapiens
ELEQQRSRVAGGESSGGCGALGRRWLLGRGLARGRSRNSDSQEEAHGKLVLWSGLRNAPRCWAVIQPLLCAVYMPKCENDRVELPSRTLCQATRGPCAIVERERGWPDFLRCTPDRFPEGCTNEVQNIKFNSSGQCEVPLVRTDNPKSWYEDVEGCGIQCQNPLFTEAEHQDMHSYIAAFGAVTGLCTLFTLATFVADWRNSNRYPAVILFYVNACFFVGSIGWLAQFMDGARREIVCRADGTMRLGEPTSNETLSCVIIFVIVYYALMAGVVWFVVLTYAWHTSFKALGTTYQPLSGKTSYFHLLTWSLPFVLTVAILAVAQVDGDSVSGICFVGYKNYRYRAGFVLAPIGLVLIVGGYFLIRGVMTLFSIKSNHPGLLSEKAASKINETMLRLGIFGFLAFGFVLITFSCHFYDFFNQAEWERSFRDYVLCQANVTIGLPTKQPIPDCEIKNRPSLLVEKINLFAMFGTGIAMSTWVWTKATLLIWRRTWCRLTGQSDDEPKRIKKSKMIAKAFSKRHELLQNPGQELSFSMHTVSHDGPVAGLAFDLNEPSADVSSAWAQHVTKMVARRGAILPQDISVTPVATPGMRVQASGGRWGEHRGWGLLGLEYRGCRRRRKRKERPQRI

SEQ ID NO: 865351 - protein, 883 aa, Homo sapiens; identical to SEQ ID NO: 865349

SEQ ID NO: 865352 - protein, 893 aa, Homo sapiens
MEKDDPPQLVTPTSVKAIILRIEAAQLTRAQEDISTQLSDILDNVNCVINRFQEELGYDLKENAKSQQRDPKGKKRFILLEKIASFSKDAMMKEKHLYDILRWLGDWGDTLTYEIGPRKSEEEAAALDEWIEVTEKVLPLSLIATKRGIESLTALCSTLIEGQKKRSQVSKRTFWQGWQGRSPQTSPSHPQPLSPEQMLQDQHTMNTKASEVTSMLQELLDSTMFSKGEVRAIRYMATVVENLNKALILQHKENRSLETKYRHLQMQATKELSSQRLHFQQFMEVLESRRDALLKQVEILGGRYHDLLLMKQALEFQLKKAQNATGQAEDLAEVSVDSPGPSERETLPRKETVMEESQQEPMKEEQLFSPLPPSPMAMIRDSGAIAAGHQPLSTMTVRSRVADVFGSKDTESLEPVLLPLVDRRFPKKWERPVAESLGHKDKDQEDYFQKGGLQIKFHCSKQLSLESSRQVTSESQEEPWEEEFGREMRRQLWLEEEEMWQQRQKKWALLEQEHQEKLRQWNLEDLAREQQRRWVQLEKEQESPRREPEQLGEDVERRIFTPTSRWRDLEKAELSLVPAPSRTQSAHQSRRPHLPMSPSTQQPALGKQRPMSSVEFTYRPRTRRVPTKPKKSASFPVTGTSIRRLTWPSLQISPANIKKKVYHMDMEAQRKNLQLLSEESELRLPHYLRSKALELTTTTMELGALRLQYLCHKYIFYRRLQSLRQEAINHVQIMKETEASYKAQNLYIFLENIDRLQSLRLQAWTDKQKGLEEKHRECLSSMVTMFPKLQLEWNVHLNIPEVTSPKPKKCKLPAASPRHIRPSGPTYKQPFLSRHRACVPLQMARQQGKQMEAVWKTEVASSSYAIEKKTPASLPRDQLRGHPDIPRLLTLDV

SEQ ID NO: 865353 - protein, 871 aa, Homo sapiens
MEKDDPPQLVTPTSVKAIILRIEAAQLTRAQEDISTQLSDILDNVNCVINRFQEELGYDLKENAKSQQRDPKGKKRFILLEKIASFSKDAMMKEKHLYDILRWLGDWGDTLTYEIGPRKSEEEAAALDEWIEVTEKVLPLSLIATKRGIESLTALCSTLIEGQKKRSQVSKRTFWQGWQGRSPQTSPSHPQPLSPEQMLQDQHTMNTKASEVTSMLQELLDSTMFSKGEVRAIRYMATVVENLNKALILQHKENRSLETKYRHLQMQATKELSSQRLHFQQFMEVLESRRDALLKQVEILGGRYHDLLLMKQALEFQLKKAQNATGQAEDLAEVSVDSPGPSERETLPRKETVMEESQQEPMKEEQLFSPLPPSPMAMIRDSGAIAAGHQPLSTMTVRSRVADVFGSKDTESLEPVLLPLVDRRFPKKWERPVAESLGHKDKDQEDYFQKGGLQIKFHCSKQLSLESSRQVTSESQEEPWEEEFGREMRRQLWLEEEEMWQQRQKKWALLEQEHQEKLRQWNLEDLAREQQRRWVQLEKEQESPRREPEQLGEDVERRIFTPTSRWRDLEKAELSLVPAPSRTQSAHQSRRPHLPMSPSTQQPALGKQRPMSSVEFTYRPRTRRVPTKPKKSASFPVTGTSIRRLTWPSLQISPANIKKKVYHMDMEAQRKNLQLLSEESELRLPHYLRSKALELTTTTMELGALRLQYLCHKYIFYRRLQSLRQEAINHVQIMKETEASYKAQNLYIFLENIDRLQSLRLQAWTDKQKGLEEKHRECLSSMVTMFPKLQLEWNVHLNIPEVTSPKPKKCKLPAASPRHIRPSGPTYKQPFLSRHRACVPLQMARLLALCLRGLVAELALVMEDFDLLHVL

SEQ ID NO: 865354 - protein, 696 aa, Homo sapiens
MLQDQHTMNTKASEVTSMLQELLDSTMFSKGEVRAIRYMATVVENLNKALILQHKENRSLETKYRHLQMQATKELSSQRLHFQQFMEVLESRRDALLKQVEILGGRYHDLLLMKQALEFQLKKAQNATGQAEDLAEVSVDSPGPSERETLPRKETVMEESQQEPMKEEQLFSPLPPSPMAMIRDSGAIAAGHQPLSTMTVRSRVADVFGSKDTESLEPVLLPLVDRRFPKKWERPVAESLGHKDKDQEDYFQKGGLQIKFHCSKQLSLESSRQVTSESQEEPWEEEFGREMRRQLWLEEEEMWQQRQKKWALLEQEHQEKLRQWNLEDLAREQQRRWVQLEKEQESPRREPEQLGEDVERRIFTPTSRWRDLEKAELSLVPAPSRTQSAHQSRRPHLPMSPSTQQPALGKQRPMSSVEFTYRPRTRRVPTKPKKSASFPVTGTSIRRLTWPSLQISPANIKKKVYHMDMEAQRKNLQLLSEESELRLPHYLRSKALELTTTTMELGALRLQYLCHKYIFYRRLQSLRQEAINHVQIMKETEASYKAQNLYIFLENIDRLQSLRLQAWTDKQKGLEEKHRECLSSMVTMFPKLQLEWNVHLNIPEVTSPKPKKCKLPAASPRHIRPSGPTYKQPFLSRHRACVPLQMARQQGKQMEAVWKTEVASSSYAIEKKTPASLPRDQLRGHPDIPRLLTLDV

SEQ ID NO: 865355 - protein, 893 aa, Homo sapiens; identical to SEQ ID NO: 865352

SEQ ID NO: 865356 - protein, 893 aa, Homo sapiens; identical to SEQ ID NO: 865352

SEQ ID NO: 865357 - protein, 358 aa, Homo sapiens
MKENKENSSPSVTSANLDHTKPCWYWDKKDLAHTPSQLEGLDPATEARYRREGARFIFDVGTRLGLHYDTLATGIIYFHRFYMFHSFKQFPRYVTGACCLFLAGKVEETPKKCKDIIKTARSLLNDVQFGQFGDDPKEEVMVLERILLQTIKFDLQVEHPYQFLLKYAKQLKGDKNKIQKLVQMAWTFVNDSLCTTLSLQWEPEIIAVAVMYLAGRLCKFEIQEWTSKPMYRRWWEQFVQDVPVDVLEDICHQILDLYSQGKQQMPHHTPHQLQQPPSLQPTPQVPQVQQSQPSQSSEPSQPQQKDPPPSSSRVGPAASQLPTSCRPPWRTASCAPAHSPTRHASSWGAGAGSLDEIT

SEQ ID NO: 865358 - protein, 357 aa, Homo sapiens
MKENKENSSPSVTSANLDHTKPCWYWDKKDLAHTPSQLEGLDPATEARYRREGARFIFDVGTRLGLHYDTLATGIIYFHRFYMFHSFKQFPRYVTGACCLFLAGKVEETPKKCKDIIKTARSLLNDVQFGQFGDDPKEEVMVLERILLQTIKFDLQVEHPYQFLLKYAKQLKGDKNKIQKLVQMAWTFVNDSLCTTLSLQWEPEIIAVAVMYLAGRLCKFEIQEWTSKPMYRRWWEQFVQDVPVDVLEDICHQILDLYSQGKQQMPHHTPHQLQQPPSLQPTPQVPQVQQSQPSQSSEPSQPQQKDPPPHPPPGLGLPPASYPPPAVPPGGQPPVPPPIPPPGMPPVGGLGRAAWMR

SEQ ID NO: 865359 - protein, 357 aa, Homo sapiens; identical to SEQ ID NO: 865358

SEQ ID NO: 865360 - protein, 293 aa, Homo sapiens
DIGEPALGEELGVHRCLYVSCACKQFPRYVTGACCLFLAGKVEETPKKCKDIIKTARSLLNDVQFGQFGDDPKEEVMVLERILLQTIKFDLQVEHPYQFLLKYAKQLKGDKNKIQKLVQMAWTFVNDSLCTTLSLQWEPEIIAVAVMYLAGRLCKFEIQEWTSKPMYRRWWEQFVQDVPVDVLEDICHQILDLYSQGKQQMPHHTPHQLQQPPSLQPTPQVPQVQQSQPSQSSEPSQPQQKDPPPHPPPGLGLPPASYPPPAVPPGGQPPVPPPIPPPGMPPVGGLGRAAWMR

SEQ ID NO: 865361 - protein, 358 aa, Homo sapiens; identical to SEQ ID NO: 865357

SEQ ID NO: 865362 - protein, 357 aa, Homo sapiens
MKENKENSSPSVTSANLDHTKPCWYWDKKDLAHTPSQLEGLDPATEARYRREGARFIFDVGTRLGLHYDTLATGIIYFHRFYMFHSFKQFPRYVTGACCLFLAGKVEETPKKCKDIIKTARSLLNDVQFGQFGDDPKEEVMVLERILLQTIKFDLQVEHPYQFLLKYAKQLKGDKNKIQKLVQMAWTFVNDSLCTTLSLQWEPEIIAVAVMYLAGRLCKFEIQEWTSKPMYRRWWEQFVQDVPVDVLEDICHQILDLYSQGKQQMPHHTPHQLQQPPSLQPTPQVPQVQQSQPSQSSEPSQPQQKDPQQPAQQQQPAQQPKKPSPQPSSPRQVKRAVVVSPKEENKAAEPAPSQHLW

SEQ ID NO: 865363 - protein, 412 aa, Homo sapiens
MKENKENSSPSVTSANLDHTKPCWYWDKKDLAHTPSQLEGLDPATEARYRREGARFIFDVGTRLGLHYDTLATGIIYFHRFYMFHSFKQFPRYVTGACCLFLAGKVEETPKKCKDIIKTARSLLNDVQFGQFGDDPKEEVMVLERILLQTIKFDLQVEHPYQFLLKYAKQLKGDKNKIQKLVQMAWTFVNDSLCTTLSLQWEPEIIAVAVMYLAGRLCKFEIQEWTSKPMYRRWWEQFVQDVPVDVLEDICHQILDLYSQGKQQMPHHTPHQLQQPPSLQPTPQVPQVQQSQPSQSSEPSQPQQKDPQQPAQQQQPAQQPKKPSPQPSSPRQVKRAVVVSPKEENKAAEPPPPKIPKIETTHPPLPPAHPPPDRKPPLAAALGEAEPPGPVDATDLPKVQIPPPAHPAPVHQ

SEQ ID NO: 865364 - protein, 310 aa, Homo sapiens
MKENKENSSPSVTSANLDHTKPCWYWDKKDLAHTPSQLEGLDPATEARYRREGARFIFDVGTRLGLHYDTLATGIIYFHRFYMFHSFKQFPRYVTGACCLFLAGKVEETPKKCKDIIKTARSLLNDVQFGQFGDDPKEEVMVLERILLQTIKFDLQVEHPYQFLLKYAKQLKGDKNKIQKLVQMAWTFVNDSLCTTLSLQWEPEIIAVAVMYLAGRLCKFEIQEWTSKPMYRRWWEQFVQDVPVDVLEDICHQILDLYSQGKQQMPHHTPHQLQQPPSLQPTPQVPQVQQSQPSQSSEPSQPQQKDPQCY

SEQ ID NO: 865365 - protein, 119 aa, Homo sapiens
MKENKENSSPSVTSANLDHTKPCWYWDKKDLAHTPSQLEGLDPATEARYRREGARFIFDVGTRLGLHYDTLATGIIYFHRFYMFHSFKQFPRYQEAHKEAFIYLAQSRHYHNLVCYSFY

SEQ ID NO: 865366 - protein, 173 aa, Homo sapiens
MKENKENSSPSVTSANLDHTKPCWYWDKKDLAHTPSQLEGLDPATEARYRREGARFIFDVGTRLGLHYDTLATGIIYFHRFYMFHSFKQFPRYVTGACCLFLAGKVEETPKKCKDIIKTARSLLNDVQFGQFGDDPKEEVMVLERILLQTIKFDLQVEHPYQFLLKYAKQLKV

SEQ ID NO: 865367 - protein, 157 aa, Homo sapiens
PSFRSFNSSSYSYMQSNSKGDKNKIQKLVQMAWTFVNDSLCTTLSLQWEPEIIAVAVMYLAGRLCKFEIQEWTSKPMYRRWWEQFVQDVPVDVLEDICHQILDLYSQGKQQMPHHTPHQLQQPPSLQPTPQVPQVQQSQPSQSSEPSQPQQKDPQCY

SEQ ID NO: 865368 - protein, 358 aa, Homo sapiens; identical to SEQ ID NO: 865357

SEQ ID NO: 865369 - protein, 357 aa, Homo sapiens; identical to SEQ ID NO: 865358

SEQ ID NO: 865370 - protein, 184 aa, Homo sapiens [sequence omitted]

SEQ ID NO: 865371 - protein, 139 aa, Homo sapiens
MSVLGLTLRAGKESMSRDGGQGPGAEQRLEDICHQILDLYSQGKQQMPHHTPHQLQQPPSLQPTPQVPQVQQSQPSQSSEPSQPQQKDPPPHPPPGLGLPPASYPPPAVPPGGQPPVPPPIPPPGMPPVGGLGRAAWMR

SEQ ID NO: 865372 - protein, 353 aa, Homo sapiens [sequence omitted]

SEQ ID NO: 865373 - protein, 79 aa, Homo sapiens
MSGFLICFFFVEPPPPKIPKIETTHPPLPPAHPPPGKHLLKQLGQLCTSPLNVGRSRSWELRKGRLGPRLTMSATGRNL

SEQ ID NO: 865374 - protein, 682 aa, Homo sapiens
TSTHSYFCSIYSSDEDDEDFEMCDHDYDGLLPKSGKRHLGKTRWTREEDEKLKKLVEQNGTDDWKVIANYLPNRTDVQCQHRWQKVLNPELIKGPWTKEEDQRVIELVQKYGPKRWSVIAKHLKGRIGKQCRERWHNHLNPEVKKTSWTEEEDRIIYQAHKRLGNRWAEIAKLLPGRTDNAIKNHWNSTMRRKVEQEGYLQESSKASQPAVATSFQKNSHLMGFAQAPPTAQLPATGQPTVNNDYSYYHISEAQNVSSHVPYPVALHVNIVNVPQPAAAAIQRHYNDEDPEKEKRIKELELLLMSTENELKGQQVLPLCGPLLNSDIFSDWAANWDGSLCFATYIVNQQRQEKRSDDPTQNHTCSYPGWHSTTIADHTRPHGDSAPVSCLGEHHSTPSLPADPGSLPEESASPARCMIVHQGTILDNVKNLLEFAETLQFIDSFLNTSSNHENSDLEMPSLTSTPLIGHKLTVTTPFHRDQTVKTQKENTVFRTPAIKRSILESSPRTPTPFKHALAAQEIKYGPLKMLPQTPSHLVEDLQDVIKQESDESGIVAEFQENGPPLLKKIKQEVESPTDKSGNFFCSHHWEGDSLNTQLFTQTSPVADAPNILTSSVLMAPASEDEDNVLKAFTVPKNRSLASPLQPCSSTWEPASCGKMEEQMTSSSQARKYVNAFSARTLVM

SEQ ID NO: 865375 - protein, 616 aa, Homo sapiens
MARRPRHSIYSSDEDDEDFEMCDHDYDGLLPKSGKRHLGKTRWTREENRTDVQCQHRWQKVLNPELIKGPWTKEEDQRVIELVQKYGPKRWSVIAKHLKGRIGKQCRERWHNHLNPEVKKTSWTEEEDRIIYQAHKRLGNRWAEIAKLLPGRTDNAIKNHWNSTMRRKVEQEGYLQESSKASQPAVATSFQKNSHLMGFAQAPPTAQLPATGQPTVNNDYSYYHISEAQNVSSHVPYPVALHVNIVNVPQPAAAAIQRHYNDEDPEKEKRIKELELLLMSTENELKGQQVLPTQNHTCSYPGWHSTTIADHTRPHGDSAPVSCLGEHHSTPSLPADPGSLPEESASPARCMIVHQGTILDNVKNLLEFAETLQFIDSFLNTSSNHENSDLEMPSLTSTPLIGHKLTVTTPFHRDQTVKTQKENTVFRTPAIKRSILESSPRTPTPFKHALAAQEIKYGPLKMLPQTPSHLVEDLQDVIKQESDESGIVAEFQENGPPLLKKIKQEVESPTDKSGNFFCSHHWEGDSLNTQLFTQTSPVADAPNILTSSVLMAPASEDEDNVLKAFTVPKNRSLASPLQPCSSTWEPASCGKMEEQMTSSSQARKYVNAFSARTLVM

SEQ ID NO: 865376 - protein, 329 aa, Homo sapiens
RGDRTDPREGVLRRSPWSIYSSDEDDEDFEMCDHDYDGLLPKSGKRHLGKTRWTREEDEKLKKLVEQNGTDDWKVIANYLPNRTDVQCQHRWQKVLNPELIKGPWTKEEDQRVIELVQKYGPKRWSVIAKHLKGRIGKQCRERWHNHLNPEVKKTSWTEEEDRIIYQAHKRLGNRWAEIAKLLPGRTDNAIKNHWNSTMRRKVEQEGYLQESSKASQPAVATSFQKNSHLMGFAQAPPTAQLPATGQPTVNNDYSYYHISEAQNVSSHVPYPVALHVNIVNVPQPAAAAIQRHYNDEDPEKEKRIKELELLLMSTENELKGQQVLPCYQ

SEQ ID NO: 865377 - protein, 300 aa, Homo sapiens
MARRPRHSIYSSDEDDEDFEMCDHDYDGLLPKSGKRHLGKTRWTREEDEKLKKLVEQNGTDDWKVIANYLPNRTDVQCQHRWQKVLNPELIKGPWTKEEDQRVIELVQKYGPKRWSVIAKHLKGRIGKQCRERWHNHLNPEVKKTSWTEEEDRIIYQAHKRLGNRWAEIAKLLPGRTDNAIKNHWNSTMRRKVEQEGYLQESSPVGLGVQGGLGQQHWVLLRGHAQLVVEGVVPDLLHVVPVGDDAMLNGVLQGQDATLALGLVAHVGVHLAHAHHDALVSKAPDDGRKHGSGSVVEPIS

SEQ ID NO: 865378 - protein, 640 aa, Homo sapiens
MARRPRHSIYSSDEDDEDFEMCDHDYDGLLPKSGKRHLGKTRWTREEDEKLKKLVEQNGTDDWKVIANYLPNRTDVQCQHRWQKVLNPELIKGPWTKEEDQRVIELVQKYGPKRWSVIAKHLKGRIGKQCRERWHNHLNPEVKKTSWTEEEDRIIYQAHKRLGNRWAEIAKLLPGRTDNAIKNHWNSTMRRKVEQEGYLQESSKASQPAVATSFQKNSHLMGFAQAPPTAQLPATGQPTVNNDYSYYHISEAQNVSSHVPYPVALHVNIVNVPQPAAAAIQRHYNDEDPEKEKRIKELELLLMSTENELKGQQVLPTQNHTCSYPGWHSTTIADHTRPHGDSAPVSCLGEHHSTPSLPADPGSLPEESASPARCMIVHQGTILDNVKNLLEFAETLQFIDSFLNTSSNHENSDLEMPSLTSTPLIGHKLTVTTPFHRDQTVKTQKENTVFRTPAIKRSILESSPRTPTPFKHALAAQEIKYGPLKMLPQTPSHLVEDLQDVIKQESDESGIVAEFQENGPPLLKKIKQEVESPTDKSGNFFCSHHWEGDSLNTQLFTQTSPVADAPNILTSSVLMAPASEDEDNVLKAFTVPKNRSLASPLQPCSSTWEPASCGKMEEQMTSSSQARKYVNAFSARTLVM

SEQ ID NO: 865379 - protein, 650 aa, Homo sapiens
RGDRTDPREGVLRRSPWSIYSSDEDDEDFEMCDHDYDGLLPKSGKRHLGKTRWTREEDEKLKKLVEQNGTDDWKVIANYLPNRTDVQCQHRWQKVLNPELIKGPWTKEEDQRVIELVQKYGPKRWSVIAKHLKGRIGKQCRERWHNHLNPEVKKTSWTEEEDRIIYQAHKRLGNRWAEIAKLLPGRTDNAIKNHWNSTMRRKVEQEGYLQESSKASQPAVATSFQKNSHLMGFAQAPPTAQLPATGQPTVNNDYSYYHISEAQNVSSHVPYPVALHVNIVNVPQPAAAAIQRHYNDEDPEKEKRIKELELLLMSTENELKGQQVLPTQNHTCSYPGWHSTTIADHTRPHGDSAPVSCLGEHHSTPSLPADPGSLPEESASPARCMIVHQGTILDNVKNLLEFAETLQFIDSFLNTSSNHENSDLEMPSLTSTPLIGHKLTVTTPFHRDQTVKTQKENTVFRTPAIKRSILESSPRTPTPFKHALAAQEIKYGPLKMLPQTPSHLVEDLQDVIKQESDESGIVAEFQENGPPLLKKIKQEVESPTDKSGNFFCSHHWEGDSLNTQLFTQTSPVADAPNILTSSVLMAPASEDEDNVLKAFTVPKNRSLASPLQPCSSTWEPASCGKMEEQMTSSSQARKYVNAFSARTLVM

SEQ ID NO: 865380 - protein, 364 aa, Homo sapiens
TLFQDSSSWCDLSSFEFFEEADFSPSQHHTGKALQLQQREGNGTKPAGEPSPRVNKRMLSESSLDPPKVLPPARHSTIPLVILRKKRGQASPLATGDCSSFIFADVSSSTPKRSPVKSLPFSPSQFLNTSSNHENSDLEMPSLTSTPLIGHKLTVTTPFHRDQTVKTQKENTVFRTPAIKRSILESSPRTPTPFKHALAAQEIKYGPLKMLPQTPSHLVEDLQDVIKQESDESGIVAEFQENGPPLLKKIKQEVESPTDKSGNFFCSHHWEGDSLNTQLFTQTSPVADAPNILTSSVLMAPASEDEDNVLKAFTVPKNRSLASPLQPCSSTWEPASCGKMEEQMTSSSQARKYVNAFSARTLVM

SEQ ID NO: 865381 - protein, 60 aa, Homo sapiens
REHHTRMRIISKINFELIRLQRPAHTDERIRDGKPPPQNWATEITSHKKRTAQNQTAEGT

SEQ ID NO: 865382 - protein, 307 aa, Homo sapiens
SGWLRRPPAPRRKRRAEGRGRRRPGGRHRAAGQAYRGSQFGSAAEMLSEQTAALGTRWESMNVQLDGAEPQVERGSQEERPWRTVPGPLEHLCCDLEEEPQSLQEKAQSAPWVPAIPQEGNTGDWEMAAALLAAGSQGLVTIKDVSLCFSQEEWRSLDPSQTDFYGEYVMQENCGIVVSLRFPIPKLDMLSQLEGGEEQWVPDPQDLEERDILRVTYTGDGSEHEGDTPELEAEPPRMLSSVSEDTVLWNPEHDESWDSMPSSSRGMLLGPPFLQEDSFSNLLCSTEMDSLLRPHTCPQCGKQFVWG

SEQ ID NO: 865383 - protein, 138 aa, Homo sapiens
MQENCGIVVSLRFPIPKLDMLSQLEGGEEQWVPDPQDLEERDILRVTYTGDGSEHEGDTPELEAEPPRMLSSVSEDTVLWNPEHDESWDSMPSSSRGMLLGPPFLQEDSFSNLLCSTEMDSLLRPHTCPQCGKQFVWG

SEQ ID NO: 865384 - protein, 119 aa, Homo sapiens
MLSQLEGGEEQWVPDPQDLEERDILRVTYTGDGSEHEGDTPELEAEPPRMLSSVSEDTVLWNPEHDESWDSMPSSSRGMLLGPPFLQEDSFSNLLCSTEMDSLLRPHTCPQCGKQFVWG

SEQ ID NO: 865385 - protein, 111 aa, Homo sapiens [sequence omitted]

SEQ ID NO: 865386 - protein, 328 aa, Homo sapiens
VAVGDVPASKMAAAAVSGALGRAGWRLLQLRCLPVARCRQALVPRAFHASAVGLRSSDEQKQQPPNSFSQQHSETQGAEKPDPESSHSPPRYTDQGGEEEEDYESEEQLQHRILTAALEFVPAHGWTAEAIAEGAQSLGLSSAAASMFGKDGSELILHFVTQCNTRLTRVLEEEQKLVQLGQAEKRKTDQFLRDAVETRLRMLIPYIEHWPRALSILMLPHNIPSSLSLLTSMVDDMWHYAGDQSTDFNWYTRRAMLAAIYNTTELVMMQDSSPDFEDTWRFLENRVNDAMNMGHTAKQVKSTGEALVQGLMGAAVTLKNLTGLNQRR

SEQ ID NO: 865387 - protein, 328 aa, Homo sapiens; identical to SEQ ID NO: 865386

SEQ ID NO: 865388 - protein, 328 aa, Homo sapiens; identical to SEQ ID NO: 865386

SEQ ID NO: 865389 - protein, 182 aa, Homo sapiens
MFGKDGSELILHFVTQCNTRLTRVLEEEQKLVQLGQAEKRKTDQFLRDAVETRLRMLIPYIEHWPRALSILMLPHNIPSSLSLLTSMVDDMWHYAGDQSTDFNWYTRRAMLAAIYNTTELVMMQDSSPDFEDTWRFLENRVNDAMNMGHTAKQVKSTGEALVQGLMGAAVTLKNLTGLNQRR

SEQ ID NO: 865390 - protein, 270 aa, Homo sapiens
VAVGDVPASKMAAAAVSGALGRAGWRLLQLRCLPVARCRQALVPRAFHASAVGLRSSDEQKQQPPNSFSQQHSETQGAEKPDPESSHSPPRYTDQGGEEEEDYESEEQLQHRILTAALEFVPAHGWTAEAIAEGAQSLGLSSAAASMFGKDGSELILHFVTQCNTRLTRVLEEEQKLVQLGQAEKRKTDQFLRDAVETRLRMLIPYIEHWPRALSILMLPHNIPSSLSLLTSMVDDMWHYAGDQSTDVSAFCRPTGGWERLVLSISSRSL

SEQ ID NO: 865391 - protein, 134 aa, Homo sapiens
MGGTPLKMMSQYCRAWAGALSILMLPHNIPSSLSLLTSMVDDMWHYAGDQSTDFNWYTRRAMLAAIYNTTELVMMQDSSPDFEDTWRFLENRVNDAMNMGHTAKQVKSTGEALVQGLMGAAVTLKNLTGLNQRR

SEQ ID NO: 865392 - protein, 352 aa, Homo sapiens
VAVGDVPASKMAAAAVSGALGRAGWRLLQLRCLPVARCRQALVPRAFHASAVGLRSSDEQKQQPPNSFSQQHSETQGAEKPDPESSHSPPRYTDQGGEEEEDYESEEQLQHRILTAALEFVPAHGWTAEAIAEGAQSLGLSSAAASMFGKDGSELILHFVTQCNTRLTRVLEEEQKLVQLGQAEKRKTDQFLRDAVETRLRMLIPYIEHWPRALSILMLPHNIPSSLSLLTSMVDDMWHYAGDQSTDFNWYTRRAMLAAIYNTTELVMMQDSSPDFEDTWRFLENRVNDAMNMGHTAKQVKSTGEALVQGLMGAAVTVSTAQHIPAPPLSHSGSVIHVLLTSHHFVALTWKQ

SEQ ID NO: 865393 - protein, 309 aa, Homo sapiens
VAVGDVPASKMAAAAVSGALGRAGWRLLQLRCLPVARCRQALVPRAFHASAVGLRSSDEQKQQPPNSFSQQHSETQGAEKPDPESSHSPPRYTDQGGEEEEDYESEEQLQHRILTAALEFVPAHGWTAEAIAEGAQSLGLSSAAASMFGKDGSELILHFVTQCNTRLTRVLEEEQKLVQLGQAEKRKTDQFLRDAVETRLRMLIPYIEHWPRALSILMLPHNIPSSLSLLTSMVDDMWHYAGDQSTDFNWYTRRAMLAAIYNTTELVMMQDSSPDFEDTWRFLENRVNDAMNLRQVPAGQRCDSRPGVT

SEQ ID NO: 865394 - protein, 272 aa, Homo sapiens
VAVGDVPASKMAAAAVSGALGRAGWRLLQLRCLPVARCRQALVPRAFHASAVGLRSSDEQKQQPPNSFSQQHSETQGAEKPDPESSHSPPRYTDQGGEEEEDYESEEQLQHRILTAALEFVPAHGWTAEAIAEGAQSLGLSSAAASMFGKDGSELILHFVTQCNTRLTRVLEEEQKLVQLGQAEKRKTDQFLRDAVETRLRMLIPYIEHWPRVPSLYPGPRATIILIFIILSTFHSDDFVHCSELSFSISINPTILSTLGKAGFQTWTYQRE

SEQ ID NO: 865395 - protein, 328 aa, Homo sapiens; identical to SEQ ID NO: 865386

SEQ ID NO: 865396 - protein, 328 aa, Homo sapiens; identical to SEQ ID NO: 865386

SEQ ID NO: 865397 - protein, 324 aa, Homo sapiens
MRLGTRLGLAAVSGALGRAGWRLLQLRCLPVARCRQALVPRAFHASAVGLRSSDEQKQQPPNSFSQQHSETQGAEKPDPESSHSPPRYTDQGGEEEEDYESEEQLQHRILTAALEFVPAHGWTAEAIAEGAQSLGLSSAAASMFGKDGSELILHFVTQCNTRLTRVLEEEQKLVQLGQAEKRKTDQFLRDAVETRLRMLIPYIEHWPRALSILMLPHNIPSSLSLLTSMVDDMWHYAGDQSTDFNWYTRRAMLAAIYNTTELVMMQDSSPDFEDTWRFLENRVNDAMNMGHTAKQVKSTGEALVQGLMGAAVTLKNLTGLNQRR

SEQ ID NO: 865398 - protein, 328 aa, Homo sapiens; identical to SEQ ID NO: 865386

SEQ ID NO: 865399 - protein, 270 aa, Homo sapiens; identical to SEQ ID NO: 865390

SEQ ID NO: 865400 - protein, 345 aa, Homo sapiens
VAVGDVPASKMAAAAVSGALGRAGWRLLQLRCLPVARCRQALVPRAFHASAVGLRSSDEQKQQPPNSFSQQHSETQGAEKPDPESSHSPPRYTDQGGEEEEDYESEEQLQHRILTAALEFVPAHGWTAEAIAEGAQSLGLSSAAASMFGKDGSELILHFVTQCNTRLTRVLEEEQKLVQLGQAEKRKTDQFLRDAVETRLRMLIPYIEHWPRALSILMLPHNIPSSLSLLTSMVDDMWHYAGDQSTDFNWYTRRAMLAAIYNTTELVMMQDSSPDFEDTWRFLENRVNDAMNMGHTAKQEVHGRGTGARTDGCSGHAQEPDGSKPASVREGNPCAGRSSSRYEGL

SEQ ID NO: 865401 - protein, 303 aa, Homo sapiens
VAVGDVPASKMAAAAVSGALGRAGWRLLQLRCLPVARCRQALVPRAFHASAVGLRSSDEQKQQPPNSFSQQHSETQGAEKPDPESSHSPPRYTDQGGEEEEDYESEEQLQHRILTAALEFVPAHGWTAEAIAEGAQSLGLSSAAASMFGKDGSELILHFVTQCNTRLTRVLEEEQKLVQLGQAEKRKTDQFLRDAVETRLRMLIPYIEHWPRALSILMLPHNIPSSLSLLTSMVDDMWHYAGDQSTDFNWYTRRAMLAAIYNTTELVMMQDSSPDFEDTWRFLENRVNDAMNMGHTAKQVGGD

SEQ ID NO: 865402 - protein, 105 aa, Homo sapiens
SFDFPGHNYTRETSCQVSTSLVPFHKTQNPQCPIFRLGDIFRETGDNFSDVAIQGGIMGIEIYWDCNLNMGHTAKQVKSTGEALVQGLMGAAVTLKNLTGLNQRR

SEQ ID NO: 865403 - protein, 130 aa, Homo sapiens
VAVGDVPASKMAAAAVSGALGRAGWRLLQLRCLPVARCRQALVPRAFHASAVGLRSSDEQKQQPPNSFSQQHSETQGAEKPDPESSHSPPRYTDQGGEEEEDYESEEQLQHRILTAALEFVPAHGWTAEV

SEQ ID NO: 865404 - protein, 260 aa, Homo sapiens
GGARLGGLCVLAVGGGGGCLAKVRDPSRAGGGPRSCAGSVWAQAAAPRLVRVGVCARFEGSARGFLFLLLRGCSSGLRPDPAPMASEELQKDLEEVKVLLEKATRKRVRDALTAEKSKIETEIKNKMQQKSQKKAELLDNEKPAAVVAPITTGYTVKISNYGWDQSDKFVKIYITLTGVHQVPTENVQVHFTERSFDLLVKNLNGKSYSMIVNNLLKPISVEGSSKKVKTDTVLILCRKKVENTRWDYLTQVEKECKEKE

SEQ ID NO: 865405 - protein, 103 aa, Homo sapiens
MQQKSQKKAELLDNEKPAAVVAPITTGYTVKISNYGWDQSDKFVKIYITLTGVHQVPTENVQVHFTERSFDLLVKNLNGKSYSMIVNNLLKPISVEGSSKKPD

SEQ ID NO: 865406 - protein, 261 aa, Homo sapiens
  misc_feature (204)..(204): Xaa can be any naturally occurring amino acid
  misc_feature (206)..(206): Xaa can be any naturally occurring amino acid
  misc_feature (217)..(218): Xaa can be any naturally occurring amino acid
  misc_feature (231)..(233): Xaa can be any naturally occurring amino acid
  misc_feature (235)..(235): Xaa can be any naturally occurring amino acid
  misc_feature (239)..(240): Xaa can be any naturally occurring amino acid
  misc_feature (246)..(246): Xaa can be any naturally occurring amino acid
  misc_feature (252)..(252): Xaa can be any naturally occurring amino acid
  misc_feature (258)..(258): Xaa can be any naturally occurring amino acid
GGARLGGLCVLAVGGGGGCLAKVRDPSRAGGGPRSCAGSVWAQAAAPRLVRVGVCARFEGSARGFLFLLLRGCSSGLRPDPAPMASEELQKDLEEVKVLLEKATRKRVRDALTAEKSKIETEIKNKMQQKSQKKAELLDNEKPAAVVAPITTGYTVKISNYGWDQSDKFVKIYITLTGVHQVPTENVQVHFTERHLNLWERIQXGXVTPRIWNNSLXXIPLGREFQKKPKXXXQXLKIXXKKKVGXPQGGGXPWPPGXKRG

SEQ ID NO: 865407 - protein, 311 aa, Homo sapiens
GGARLGGLCVLAVGGGGGCLAKVRDPSRAGGGPRSCAGSVWAQAAAPRLVRVGVCARFEGSARGFLFLLLRGCSSGLRPDPAPMASEELQKDLEEVKVLLEKATRKRVRDALTAEKSKIETEIKNKMQQKSQKKAELLDNEKPAAVVAPITTGYTVKISNYGWDQSDKFVKIYITLTGVHQVPTENVQVHFTERSFDLLVKNLNGKSYSMIVNNLLKPISVEGSSKKVKTDTVLILCRKKVENTRWDYLTQVEKECKEKEKPSYDTETDPSEGLMNVLKKIYEDGDDDMKRTINKAWVESREKQAKGDTEF

SEQ ID NO: 865408 - protein, 311 aa, Homo sapiens; identical to SEQ ID NO: 865407

SEQ ID NO: 865409 - protein, 311 aa, Homo sapiens; identical to SEQ ID NO: 865407

SEQ ID NO: 865410 - protein, 311 aa, Homo sapiens; identical to SEQ ID NO: 865407

SEQ ID NO: 865411 - protein, 294 aa, Homo sapiens
GGARLGGLCVLAVGGGGGCLAKVRDPSRAGGGPRSCVCARFEGSARGFLFLLLRGCSSGLRPDPAPMASEELQKDLEEVKVLLEKATRKRVRDALTAEKSKIETEIKNKMQQKSQKKAELLDNEKPAAVVAPITTGYTVKISNYGWDQSDKFVKIYITLTGVHQVPTENVQVHFTERSFDLLVKNLNGKSYSMIVNNLLKPISVEGSSKKVKTDTVLILCRKKVENTRWDYLTQVEKECKEKEKPSYDTETDPSEGLMNVLKKIYEDGDDDMKRTINKAWVESREKQAKGDTEF

SEQ ID NO: 865412 - protein, 185 aa, Homo sapiens
MQQKSQKKAELLDNEKPAAVVAPITTGYTVKISNYGWDQSDKFVKIYITLTGVHQVPTENVQVHFTERSFDLLVKNLNGKSYSMIVNNLLKPISVEGSSKKVKTDTVLILCRKKVENTRWDYLTQVEKECKEKEKPSYDTETDPSEGLMNVLKKIYEDGDDDMKRTINKAWVESREKQAKGDTEF

SEQ ID NO: 865413 - protein, 304 aa, Homo sapiens
GGARLGGLCVLAVGGGGGCLAKVRDPSRAGGGPRSCAGSVWAQAAAPRLVRVGVCARFEGSARGFLFLLLRGCSSGLRPDPAPMASEELQKDLEEVKVLLEKATRKRVRDALTAEKSKIETEIKNKMQQKSQKKAELLDNEKPAAVVAPITTGYTVKISNYGWDQSDKFVKIYITLTGVHQVPTENVQVHFTERSFDLLVKNLNGKSYSMIVNNLLKPISVEGSSKKVKTDTVLILCRKKVENTRWDYLTQVEKECKEKEKPSYDTETDPSEGLMNVLKPGWNQERSKPKETRNFETLKSFWEL

SEQ ID NO: 865414 - protein, 102 aa, Homo sapiens [sequence omitted]

SEQ ID NO: 865415 - protein, 102 aa, Homo sapiens [sequence omitted]

SEQ ID NO: 865416 - protein, 232 aa, Homo sapiens
GGARLGGLCVLAVGGGGGCLAKVRDPSRAGGGPRSCAGSVWAQAAAPRLVRVGVCARFEGSARGFLFLLLRGCSSGLRPDPAPMASEELQKDLEEVKVLLEKATRKRVRDALTAEKSKIETEIKNKMQQKSQKKAELLDNEKPAAVVAPITTGYTVKISNYGWDQSDKFVKIYITLTGVHQVPTENVQVHFTERSFDLLVKNLNGKSYSMIVNNLLKPISVEGSSKKLDSLP

SEQ ID NO: 865417 - protein, 311 aa, Homo sapiens; identical to SEQ ID NO: 865407

SEQ ID NO: 865418 - protein, 215 aa, Homo sapiens
GGARLGGLCVLAVGGGGGCLAKVRDPSRAGGGPRSCVCARFEGSARGFLFLLLRGCSSGLRPDPAPMASEELQKDLEEVKVLLEKATRKRVRDALTAEKSKIETEIKNKMQQKSQKKAELLDNEKPAAVVAPITTGYTVKISNYGWDQSDKFVKIYITLTGVHQVPTENVQVHFTERSFDLLVKNLNGKSYSMIVNNLLKPISVEGSSKKLDSLP

SEQ ID NO: 865419 - protein, 74 aa, Homo sapiens
MIVNNLLKPISVEGSSKKVKTDTVLILCRKKVENTRWDYLTQVEKECKEKDLYDTEPIQWGLMMSKVMDGTMFE

SEQ ID NO: 865420 - protein, 311 aa, Homo sapiens; identical to SEQ ID NO: 865407

SEQ ID NO: 865421 - protein, 228 aa, Homo sapiens
MASEELQKDLEEVKVLLEKATRKRVRDALTAEKSKIETEIKNKMQQKSQKKAELLDNEKPAAVVAPITTGYTVKISNYGWDQSDKFVKIYITLTGVHQVPTENVQVHFTERSFDLLVKNLNGKSYSMIVNNLLKPISVEGSSKKVKTDTVLILCRKKVENTRWDYLTQVEKECKEKEKPSYDTETDPSEGLMNVLKKIYEDGDDDMKRTINKAWVESREKQAKGDTEF

SEQ ID NO: 865422 - protein, 302 aa, Homo sapiens
GGARLGGLCVLAVGGGGGCLAKVRDPSRAGGGPRSCAGSVWAQAAAPRLVRVGVCARFEGSARGFLFLLLRGCSSGLRPDPAPMASEELQKDLEEVKVLLEKATRKRVRDALTAEKSKIETEIKNKMQQKSQKKAELLDNEKPAAVVAPITTGYTVKISNYGWDQSDKFVKIYITLTGVHQVPTENVQVHFTERSFDLLVKNLNGKSYSMIVNNLLKPISVEGSSKKVKTDTVLILCRKKVENTRWDYLTQVEKECKEKEKPSYDTETDPSEGLMNVLKKIYEDGDDDMKRTINKLKSFWEL

SEQ ID NO: 865423 - protein, 305 aa, Homo sapiens
AVQISKKRKFVADGIFKAELNEFLTRELAEDGYSGVEVRVTPTRTEIIILATRTQKRGFLFLLLRGCSSGLRPDPAPMASEELQKDLEEVKVLLEKATRKRVRDALTAEKSKIETEIKNKMQQKSQKKAELLDNEKPAAVVAPITTGYTVKISNYGWDQSDKFVKIYITLTGVHQVPTENVQVHFTERSFDLLVKNLNGKSYSMIVNNLLKPISVEGSSKKVKTDTVLILCRKKVENTRWDYLTQVEKECKEKEKPSYDTETDPSEGLMNVLKKIYEDGDDDMKRTINKAWVESREKQAKGDTEF

SEQ ID NO: 865424 - protein, 332 aa, Homo sapiens
  misc_feature (69)..(70): Xaa can be any naturally occurring amino acid
LVASGWRACRSDLSEQCVSRLPSTEGPEILTTCVEFVTKLHMHAHAVRCRASVAERRHRKSVLRVKVVXXACNRYRSELPVRGGALYLLHAPVVSSGLRPDPAPMASEELQKDLEEVKVLLEKATRKRVRDALTAEKSKIETEIKNKMQQKSQKKAELLDNEKPAAVVAPITTGYTVKISNYGWDQSDKFVKIYITLTGVHQVPTENVQVHFTERSFDLLVKNLNGKSYSMIVNNLLKPISVEGSSKKVKTDTVLILCRKKVENTRWDYLTQVEKECKEKEKPSYDTETDPSEGLMNVLKKIYEDGDDDMKRTINKAWVESREKQAKGDTEF

SEQ ID NO: 865425 - protein, 322 aa, Homo sapiens
PAPVSAPPSRGTPHSPLAAPSAPQRFHSTSHPTRLLGSSGGVRRLSVQAVRGVGLGERPFARVPQALSALVSQPVDRKLHSSKAGCKHECQFLVEGGWKLQKDLEEVKVLLEKATRKRVRDALTAEKSKIETEIKNKMQQKSQKKAELLDNEKPAAVVAPITTGYTVKISNYGWDQSDKFVKIYITLTGVHQVPTENVQVHFTERSFDLLVKNLNGKSYSMIVNNLLKPISVEGSSKKVKTDTVLILCRKKVENTRWDYLTQVEKECKEKEKPSYDTETDPSEGLMNVLKKIYEDGDDDMKRTINKAWVESREKQAKGDTEF

SEQ ID NO: 865426 - protein, 124 aa, Homo sapiens
MNSEVPMNSEVPMNSRYSSAPSMIVNNLLKPISVEGSSKKVKTDTVLILCRKKVENTRWDYLTQVEKECKEKEKPSYDTETDPSEGLMNVLKKIYEDGDDDMKRTINKAWVESREKQAKGDTEF

SEQ ID NO: 865427 - protein, 258 aa, Homo sapiens
GGARLGGLCVLAVGGGGGCLAKVRDPSRAGGGPRSCAGSVWAQAAAPRLVRVGVCARFEGSARGFLFLLLRGCSSGLRPDPAPMASEELQKDLEEVKVLLEKATRKRVRDALTAEKSKIETEIKNKMQQKSQKKAELLDNEKPAAVVAPITTGYTVKISNYGWDQSDKFVKIYITLTGVHQVPTENVQVHFTERSFDLLVKNLNGKSYSMIVNNLLKPISVEGSSKKRRFPIQNDTVLLSCRNKHANTSDLVDDDPAL

SEQ ID NO: 865428 - protein, 1969 aa, Homo sapiens
PEFRGRLLLLNSRPRRLKTQGMQCFSLGTKCIPVDSSGDQQLCFVLTENGLSLILFGLTQEEFLNRLMIHGSASTVDTLCHLNGWGRCSIPIHALEAGIENRQLDTVNFFLKSKENLFNPSSKSSVSDQFDHLSSHLYLRNVEELIPALDLLCSAIRESYSEPQSKHFSEQLLNLTLSFLNNQIKELFIHTEELDEHLQKGVNILTSYINELRTFMIKFPWKLTDAIDEYDVHENVPKVKESNIWKKLSFEEVIASAILNNKIPEAQTFFRIDSHSAQKLEELIGIGLNLVFDNLKKNNIKEASELLKNMGFDVKGQLLKICFYTTNKNIRDFLVEILKEKNYFSEKEKRTIDFVHQVEKLYLGHFQENMQIQSFPRYWIKEQDFFKHKSVLDSFLKYDCKDEFNKQDHRIVLNWALWWDQLTQESILLPRISPEEYKSYSPEALWRYLTARHDWLNIILWIGEFQTQHSYASLQQNKWPLLTVDVINQNTSCNNYMRNEILDKLARNGVFLASELEDFECFLLRLSRIGGVIQDTLPVQNYKTKEGWDFHSQFILYCLEHSLQLFFMSTLTVTNPKLIFQASLANAQILIPTNQASVSSMLLEGHTLLALATTMYSPGGVSQVVQNEENENCLKKVDPQLLKMALTPYPKLKTALFPQCTPPSVLPSDITIYHLIQSLSPFDPSRLFGWQSANTLAIGDAWSHLPHFSSPDLVNKYAIVERLNFAYYLHNGRPSFAFGTFLVQELIKSKTPKQLIQQVGNEAYVIGLSSFHIPSIGAACVCFLELLGLDSLKLRVDMKVANIILSYKCRNEDAQYSFIRESVAEKLSKLADGEKTTTEELLVLLEEGTWNSIQQQEIKRLSSESSSQWALVVQFCRLHNMKLSISYLRECAKANDWLQFIIHSQLHNYHPAEVKSLIQYFSPVIQDHLRLAFENLPSVPTSKMDSDQVCNKCPQELQGSKQEMTDLFEILLQCSEEPDSWHWLLVEAVKQQAPILSVLASCLQGASAISCLCVWIITSVEDNVATEAMGHIQDSTEDHTWNLEDLSVIWRTLLTRQKSKTLIRGFQLFFKDSPLLLVMEMYELCMFFRNYKEAEAKLLEFQKSLETLNTAATKVHPVIPAMWLEDQVCFLLKLMLQQCKTQYELGKLLQLFVEREHLFSDGPDVKKLCILCQILKDTSIAINHTIITSYSIENLQHECRSIWKDCRQMDNSALARRVAELAELPVDNLVIKEITQEMQTLKHIEQWSLKQARIDFWKKCHENFKKNSISSKAASSFFSTQAHVACEHPTGWSSMEERHLLLTLAGHWLAQEDVVPLDKLEELEKQIWLCRITQHTLGRNQEETEPRFSRQISTSGELSFDSLASEFSFSKLAALNTSKYLELNSLPSKETCENRLDWKEQESLNFLIGRLLDDGCVHEASRVCRYFHFYNPDVALVLHCRALASGEASMEDLHPEIHALLQSAELLEEEAPDIPLRRVHSTSSLDSQKFVTVPSSNEVVTNLEVLTSKCLHGKNYCRQVLCLYDLAKELGCSYTDVAAQDGEAMLRKILASQQPDRCKRAQAFISTQGLKPDTVAELVAEEVTRELLTSSQGTGHKQMFNPTEESQTFLQLTTLCQDRTLVGMKLLDKISSVPHGELSCTTELLILAHHCFTLTCHMEGIIRVLQAAHMLTDNHLAPSEEYGLVVRLLTGIGRYNEMTYIFDLLHKKHYFEVLMRKKLDPSGTLKTALLDYIKRCRPGDSEKHNMIALCFSMCREIGENHEAAARIQLKLIESQPWEDSLKDGHQLKQLLLKALTLMLDAAESYAKDSCVRQAQHCQRLTKLITLQIHFLNTGQNTMLINLGRHKLMDCILALPRFYQASIVAEAYDFVPDWAEILYQQVILKGDFNYLEEFKQQRLLKSSIFEEISKKYKQHQPTDMVMENLKKLLTYCEDVYLYYKLAYEHKFYEIVNVLLKDPQTGCCLKDMLAG

SEQ ID NO: 865429 - protein, 2327 aa, Homo sapiens
MCNEQQQEPAKISSFTSLKVSQDLDVAVIVSSSNSAVALNLNLYFRQHPGHLLCERILEDLPIQGPKGVDEDDPVNSAYNMKLAKFSFQIDRSWKAQLSSLNETIKNSKLEVSCCAPWFQDILHLESPESGNHSTSVQSWAFIPQDIMHGQYNVLQKDHAKTSDPGRSWKIMHISEQEEPIELKCVSVTGFTALFTWEVERMGYTITLWDLETQGMQCFSLGTKCIPVDSSGDQQLCFVLTENGLSLILFGLTQEEFLNRLMIHGSASTVDTLCHLNGWGRCSIPIHALEAGIENRQLDTVNFFLKSKENLFNPSSKSSVSDQFDHLSSHLYLRNVEELIPALDLLCSAIRESYSEPQSKHFSEQLLNLTLSFLNNQIKELFIHTEELDEHLQKGVNILTSYINELRTFMIKFPWKLTDAIDEYDVHENVPKVKESNIWKKLSFEEVIASAILNNKIPEAQTFFRIDSHSAQKLEELIGIGLNLVFDNLKKNNIKEASELLKNMGFDVKGQLLKICFYTTNKNIRDFLVGKGDDYIVYIFQKAWVKNLEENLGRKTLSNFNVQLISNKKKCDNPFIFFSPSSFFNDYFTFVAKEKFVLTYINSNVQNIILEMAYYLMTFFNESLIPSTTLFDNLMTFFAKVLDFLESHCFNYFLFKVEILKEKNYFSEKEKRTIDFVHQVEKLYLGHFQENMQIQSFPRYWIKEQDFFKHKSVLDSFLKYDCKDEFNKQDHRIVLNWALWWDQLTQESILLPRISPEEYKSYSPEALWRYLTARHDWLNIILWIGEFQTQHSYASLQQNKWPLLTVDVINQNTSCNNYMRNEILDKLARNGVFLASELEDFECFLLRLSRIGGVIQDTLPVQNYKTKEGWDFHSQFILYCLEHSLQHLLYVYLDCYKLSPENCPFLEKKELHEAHPWFEFLVQCRQVASNLTDPKLIFQASLANAQILIPTNQASVSSMLLEGHTLLALATTMYSPGGVSQVVQNEENENCLKKVDPQLLKMALTPYPKLKTALFPQCTPPSVLPSDITIYHLIQSLSPFDPSRLFGWQSANTLAIGDAWSHLPHFSSPDLVNKYAIVERLNFAYYLHNGRPSFAFGTFLVQELIKSKTPKQLIQQVGNEAYVIGLSSFHIPSIGAACVCFLELLGLDSLKLRVDMKVANIILSYKCRNEDAQYSFIRESVAEKLSKLADGEKTTTEELLVLLEEGTWNSIQQQEIKRLSSESSSQWALVVQFCRLHNMKLSISYLRECAKANDWLQFIIHSQLHNYHPAEVKSLIQYFSPVIQDHLRLAFENLPSVPTSKMDSDQVCNKCPQELQGSKQEMTDLFEILLQCSEEPDSWHWLLVEAVKQQAPILSVLASCLQGASAISCLCVWIITSVEDNVATEAMGHIQDSTEDHTWNLEDLSVIWRTLLTRQKSKTLIRGFQLFFKDSPLLLVMEMYELCMFFRNYKEAEAKLLEFQKSLETLNTAATKVHPVIPAMWLEDQVCFLLKLMLQQCKTQYELGKLLQLFVEREHLFSDGPDVKKLCILCQILKDTSIAINHTIITSYSIENLQHECRSIWKDCRQMDKFALARRVAELAELPVDNLVIKEITQEMQTLKHIEQWSLKQARIDFWKKCHENFKKNSISSKAASSFFSTQAHVACEHPTGWSSMEERHLLLTLAGHWLAQEDVVPLDKLEELEKQIWLCRITQHTLGRNQEETEPRFSRQISTSGELSFDSLASEFSFSKLAALNTSKYLELNSLPSKETCENRLDWKEQESLNFLIGRLLDDGCVHEASRVCRYFHFYNPDVALVLHCRALASGEASMEDLHPEIHALLQSAELLEEEAPDIPLRRVHSTSSLDSQKFVTVPSSNEVVTNLEVLTSKCLHGKNYCRQVLCLYDLAKELGCSYTDVAAQDGEAMLRKILASQQPDRCKRAQAFISTQGLKPDTVAELVAEEVTRELLTSSQGTGHKQMFNPTEESQTFLQLTTLCQDRTLVGMKLLDKISSVPHGELSCTTELLILAHHCFTLTCHMEGIIRVLQAAHMLTDNHLAPSEEYGLVVRLLTGIGRYNEMTYIFDLLHKKHYFEVLMRKKLDPSGTLKTALLDYIKRCRPGDSEKHNMIALCFSMCREIGENHEAAARIQLKLIESQPWEDSLKDGHQLKQLLLKALTLMLDAAESYAKDSCVRQAQHCQRLTKLITLQIHFLNTGQNTMLINLGRHKLMDCILALPRFYQASIVAEAYDFVPDWAEILYQQVILKGDFNYLEEFKQQRLLKSSIFEEISKKYKQHQPTDMVMENLKKLLTYCEDVYLYYKLAYEHKFYEIVNVLLKDPQTGCCLKDMLAG

SEQ ID NO: 865430 - protein, 2285 aa, Homo sapiens
MCNEQQQEPAKISSFTSLKVSQDLDVAVIVSSSNSAVALNLNLYFRQHPGHLLCERILEDLPIQGPKGVDEDDPVNSAYNMKLAKFSFQIDRSWKAQLSSLNETIKNSKLEVSCCAPWFQDILHLESPESGNHSTSVQSWAFIPQDIMHGQYNVLQKDHAKTSDPGRSWKIMHISEQEEPIELKCVSVTGFTALFTWEVERMGYTITLWDLETQGMQCFSLGTKCIPVDSSGDQQLCFVLTENGLSLILFGLTQEEFLNRLMIHGSASTVDTLCHLNGWGRCSIPIHALEAGIENRQLDTVNFFLKSKENLFNPSSKSSVSDQFDHLSSHLYLRNVEELIPALDLLCSAIRESYSEPQSKHFSEQLLNLTLSFLNNQIKELFIHTEELDEHLQKGVNILTSYINELRTFMIKFPWKLTDAIDEYDVHENVPKVKESNIWKKLSFEEVIASAILNNKIPEAQTFFRIDSHSAQKLEELIGIGLNLVFDNLKKNNIKEASELLKNMGFDVKGQLLKICFYTTNKNIRDFLVEILKEKNYFSEKEKRTIDFVHQVEKLYLGHFQENMQIQSFPRYWIKEQDFFKHKSVLDSFLKYDCKDEFNKQDHRIVLNWALWWDQLTQESILLPRISPEEYKSYSPEALWRYLTARHDWLNIILWIGEFQTQHSYASLQQNKWPLLTVDVINQNTSCNNYMRNEILDKLARNGVFLASELEDFECFLLRLSRIGGVIQDTLPVQNYKTKEGWDFHSQFILYCLEHSLQHLLYVYLDCYKLSPENCPFLEKKELHEAHPWFEFLVQCRQVASNLTDPKLIFQASLANAQILIPTNQASVSSMLLEGHTLLALATTMYSPGGVSQVVQNEENENCLKKVDPQLLKMALTPYPKLKTALFPQCTPPSVLPSDITIYHLIQSLSPFDPSRLFGWQSANTLAIGDAWSHLPHFSSPDLVNKYAIVERLNFAYYLHNGRPSFAFGTFLVQELIKSKTPKQLIQQVGNEAYVIGLSSFHIPSIGAACVCFLELLGLDSLKLRVDMKVANIILSYKCRNEDAQYSFIRESVGTAPFIWPALFREGVTRSKALNCECLGRKWLSSWFYPFPAECVFFVSLSWALELGSEMALSHTIQTEMLQVLTFSLHHILLFIFLTAEKLSKLADGEKTTTEELLVLLEEGTWNSIQQQEIKRLSSESSSQWALVVQFCRLHNMKLSISYLRECAKANDWLQFIIHSQLHNYHPAEVKSLIQYFSPVIQDHLRLAFENLPSVPTSKMDSDQVCNKCPQELQGSKQEMTDLFEILLQCSEEPDSWHWLLVEAVKQQAPILSVLASCLQGASAISCLCVWIITSVEDNVATEAMGHIQDSTEDHTWNLEDLSVIWRTLLTRQKSKTLIRGFQLFFKDSPLLLVMEMYELCMFFRNYKEAEAKLLEFQKSLETLNTAATKVHPVIPAMWLEDQVCFLLKLMLQQCKTQYELGKLLQLFVEREHLFSDGPDVKKLCILCQILKDTSIAINHTIITSYSIENLQHECRSIWKDCRQMDKFALARRVAELAELPVDNLVIKEITQEMQTLKHIEQWSLKQARIDFWKKCHENFKKNSISSKAASSFFSTQAHVACEHPTGWSSMEERHLLLTLAGHWLAQEDVVPLDKLEELEKQIWLCRITQHTLGRNQEETEPRFSRQISTSGELSFDSLASEFSFSKLAALNTSKYLELNSLPSKETCENRLDWKEQESLNFLIGRLLDDGCVHEASRVCRYFHFYNPDVALVLHCRALASGEASMEDLHPEIHALLQSAELLEEEAPDIPLRRVHSTSSLDSQKFVTVPSSNEVVTNLEVLTSKCLHGKNYCRQVLCLYDLAKELGCSYTDVAAQDGEAMLRKILASQQPDRCKRAQAFISTQGLKPDTVAELVAEEVTRELLTSSQGTGHKQMFNPTEESQTFLQLTTLCQDRTLVGMKLLDKISSVPHGELSCTTELLILAHHCFTLTCHMEGIIRVLQAAHMLTDNHLAPSEEYGLVVRLLTGIGRYNEMTYIFDLLHKKHYFEVLMRKKLDPSGTLKTALLDYIKRCRPGDSEKHNMIALCFSMCREIGENHEAAARIQLKLIESQPWEDSLKDGHQLKQLLLKALTLMLDAAESYAKDSCVRQAQHCQRLTKLITLQIHFLNTGQNTMLINLGRHKLMDCILALPRFYQASIVAEAYDFVPDWAEILYQQVILKGDFNYLEEFKQQRLLKSSIFEEISKKYKQHQPTDMVMENLKKLLTYCEDVYLYYKLAYEHKFYEIVNVLLKDPQTGCCLKDMLAG

SEQ ID NO: 865431 - protein, 2351 aa, Homo sapiens
MCNEQQQEPAKISSFTSLKVSQDLDVAVIVSSSNSAVALNLNLYFRQHPGHLLCERILEDLPIQGPKGVDEDDPVNSAYNMKLAKFSFQIDRSWKAQLSSLNETIKNSKLEVSCCAPWFQDILHLESPESGNHSTSVQSWAFIPQDIMHGQYNVLQKDHAKTSDPGRSWKIMHISEQEEPIELKCVSVTGFTALFTWEVERMGYTITLWDLETQGMQCFSLGTKCIPVDSSGDQQLCFVLTENGLSLILFGLTQEEFLNRLMIHGSASTVDTLCHLNGWGRCSIPIHALEAGIENRQLDTVNFFLKSKENLFNPSSKSSVSDQFDHLSSHLYLRNVEELIPALDLLCSAIRESYSEPQSKHFSEQLLNLTLSFLNNQIKELFIHTEELDEHLQKGVNILTSYINELRTFMIKFPWKLTDAIDEYDVHENVPKVKESNIWKKLSFEEVIASAILNNKIPEAQTFFRIDSHSAQKLEELIGIGLNLVFDNLKKNNIKEASELLKNMGFDVKGQLLKICFYTTNKNIRDFLVGKGDDYIVYIFQKAWVKNLEENLGRKTLSNFNVQLISNKKKCDNPFIFFSPSSFFNDYFTFVAKEKFVLTYINSNVQNIILEMAYYLMTFFNESLIPSTTLFDNLMTFFAKVLDFLESHCFNYFLFKVEILKEKNYFSEKEKRTIDFVHQVEKLYLGHFQENMQIQSFPRYWIKEQDFFKHKSVLDSFLKYDCKDEFNKQDHRIVLNWALWWDQLTQESILLPRISPEEYKSYSPEALWRYLTARHDWLNIILWIGEFQTQHSYASLQQNKWPLLTVDVINQNTSCNNYMRNEILDKLARNGVFLASELEDFECFLLRLSRIGGVIQDTLPVQNYKTKEGWDFHSQFILYCLEHSLQHLLYVYLDCYKLSPENCPFLEKKELHEAHPWFEFLVQCRQVASNLTDPKLIFQASLANAQILIPTNQASVSSMLLEGHTLLALATTMYSPGGVSQVVQNEENENCLKKVDPQLLKMALTPYPKLKTALFPQCTPPSVLPSDITIYHLIQSLSPFDPSRLFGWQSANTLAIGDAWSHLPHFSSPDLVNKYAIVERLNFAYYLHNGRPSFAFGTFLVQELIKSKTPKQLIQQVGNEAYVIGLSSFHIPSIGAACVCFLELLGLDSLKLRVDMKVANIILSYKCRNEDAQYSFIRESVAEKLSKLADGEKTTTEELLVLLEEGTWNSIQQQEIKRLSSESSSQWALVVQFCRLHNMKLSISYLRECAKANDWLQFIIHSQLHNYHPAEVKSLIQYFSPVIQDHLRLAFENLPSVPTSKMDSDQVCNKCPQELQGSKQEMTDLFEILLQCSEEPDSWHWLLVEAVKQQAPILSVLASCLQGASAISCLCVWIITSVEDNVATEAMGHIQDSTEDHTWNLEDLSVIWRTLLTRQKSKTLIRGFQLFFKDSPLLLVMEMYELCMFFRNYKEAEAKLLEFQKSLETLNTAATKVHPVIPAMWLEDQVCFLLKLMLQQCKTQYELGKLLQLFVEREHLFSDGKRIRLPSAKSVTEAMQTAQPSGEGPDVKKLCILCQILKDTSIAINHTIITSYSIENLQHECEIYLERLQTDGQFALARRVAELAELPVDNLVIKEITQEMQTLKHIEQWSLKQARIDFWKKCHENFKKNSISSKAASSFFSTQAHVACEHPTGWSSMEERHLLLTLAGHWLAQEDVVPLDKLEELEKQIWLCRITQHTLGRNQEETEPRFSRQISTSGELSFDSLASEFSFSKLAALNTSKYLELNSLPSKETCENRLDWKEQESLNFLIGRLLDDGCVHEASRVCRYFHFYNPDVALVLHCRALASGEASMEDLHPEIHALLQSAELLEEEAPDIPLRRVHSTSSLDSQKFVTVPSSNEVVTNLEVLTSKCLHGKNYCRQVLCLYDLAKELGCSYTDVAAQDGEAMLRKILASQQPDRCKRAQAFISTQGLKPDTVAELVAEEVTRELLTSSQGTGHKQMFNPTEESQTFLQLTTLCQDRTLVGMKLLDKISSVPHGELSCTTELLILAHHCFTLTCHMEGIIRVLQAAHMLTDNHLAPSEEYGLVVRLLTGIGRYNEMTYIFDLLHKKHYFEVLMRKKLDPSGTLKTALLDYIKRCRPGDSEKHNMIALCFSMCREIGENHEAAARIQLKLIESQPWEDSLKDGHQLKQLLLKALTLMLDAAESYAKDSCVRQAQHCQRLTKLITLQIHFLNTGQNTMLINLGRHKLMDCILALPRFYQASIVAEAYDFVPDWAEILYQQVILKGDFNYLEEFKQQRLLKSSIFEEISKKYKQHQPTDMVMENLKKLLTYCEDVYLYYKLAYEHKFYEIVNVLLKDPQTGCCLKDMLAG

SEQ ID NO: 865432 - protein, 2291 aa, Homo sapiens
MCNEQQQEPAKISSFTSLKVSQDLDVAVIVSSSNSAVALNLNLYFRQHPGHLLCERILEDLPIQGPKGVDEDDPVNSAYNMKLAKFSFQIDRSWKAQLSSLNETIKNSKLEVSCCAPWFQDILHLESPESGNHSTSVQSWAFIPQDIMHGQYNVLQKDHAKTSDPGRSWKIMHISEQEEPIELKCVSVTGFTALFTWEVERMGYTITLWDLETQGMQCFSLGTKCIPVDSSGDQQLCFVLTENGLSLILFGLTQEEFLNRLMIHGSASTVDTLCHLNGWGRCSIPIHALEAGIENRQLDTVNFFLKSKENLFNPSSKSSVSDQFDHLSSHLYLRNVEELIPALDLLCSAIRESYSEPQSKHFSEQLLNLTLSFLNNQIKELFIHTEELDEHLQKGVNILTSYINELRTFMIKFPWKLTDAIDEYDVHENVPKVKESNIWKKLSFEEVIASAILNNKIPEAQTFFRIDSHSAQKLEELIGIGLNLVFDNLKKNNIKEASELLKNMGFDVKGQLLKICFYTTNKNIRDFLVGKGDDYIVYIFQKAWVKNLEENLGRKTLSNFNVQLISNKKKCDNPFIFFSPSSFFNDYFTFVAKEKFVLTYINSNVQNIILEMAYYLMTFFNESLIPSTTLFDNLMTFFAKVLDFLESHCFNYFLFKVEILKEKNYFSEKEKRTIDFVHQVEKLYLGHFQENMQIQSFPRYWIKEQDFFKHKSVLDSFLKYDCKDEFNKQDHRIVLNWALWWDQLTQESILLPRISPEEYKSYSPEALWRYLTARHDWLNIILWIGEFQTQHSYASLQQNKWPLLTVDVINQNTSCNNYMRNEILDKLARNGVFLASELEDFECFLLRLSRIGGVIQDTLPVQNYKTKEGWDFHSQFILYCLEHSLQHLLYVYLDCYKLSPENCPFLEKKELHEAHPWFEFLVQCRQVASNLTDPKLIFQASLANAQILIPTNQASVSSMLLEGHTLLALATTMYSPGGVSQVVQNEENENCLKKVDPQLLKMALTPYPKLKTALFPQCTPPSVLPSDITIYHLIQSLSPFDPSRLFGWQSANTLAIGDAWSHLPHFSSPDLVNKYAIVERLNFAYYLHNGRPSFAFGTFLVQELIKSKTPKQLIQQVGNEAYVIGLSSFHIPSIGAACVCFLELLGLDSLKLRVDMKVANIILSYKCRNEDAQYSFIRESVAEKLSKLADGEKTTTEELLVLLEEGTWNSIQQQEIKRLSSESSSQWALVVQFCRLHNMKLSISYLRECAKANDWLQFIIHSQLHNYHPAEVKSLIQYFSPVIQDHLRLAFENLPSVPTSKMDSDQVCNKCPQELQGSKQEMTDLFEILLQCSEEPDSWHWLLVEAVKQQAPILSVLASCLQGASAISCLCVWIITSVEDNVATEAMGHIQDSTEDHTWNLEDLSVIWRTLLTRQKSKTLIRGFQLFFKDSPLLLVMEMYELCMFFRNYKEAEAKLLEFQKSLETLNTAATKVHPVIPAMWLEDQVCFLLKLMLQQCKTQYELGKLLQLFVEREHLFSDGPDVKKLCILCQILKDTSIAINHTIITSYSIENLQHECRSIWKDCRQMDKFALARRVAELAELPVDNLVIKEITQEMQTLKHIEQWSLKQARIDFWKKCHENFKKNSISSKAASSFFSTQAHVACEHPTGWSSMEERHLLLTLAGHWLAQEDVVPLDKLEELEKQIWLCRITQHTLGRNQEETEPRFSRQISTSGELSFDSLASEFSFSKLAALNTSKYLELNSLPSKETCENRLDWKEQESLNFLIGRLLDDGCVHEASRVCRYFHFYNPDVALVLHCRALASGEASMEDLHPEIHALLQSAELLEEEAPDIPLRRVHSTSSLDSQKFVTVPSSNEVVTNLEVLTSKCLHGKNYCRQVLCLYDLAKELGCSYTDVAAQDGEAMLRKILASQQPDRCKRAQAFISTQGLKPDTVAELVAEEVTRELLTSSQGTGHKQMFNPTEESQTFLQLTTLCQDRTLVGMKLLDKISSVPHGELSCTTELLILAHHCFTLTCHMEGIIRVLQAAHMLTDNHLAPSEEYGLVSGTLKTALLDYIKRCRPGDSEKHNMIALCFSMCREIGENHEAAARIQLKLIESQPWEDSLKDGHQLKQLLLKALTLMLDAAESYAKDSCVRQAQHCQRLTKLITLQIHFLNTGQNTMLINLGRHKLMDCILALPRFYQASIVAEAYDFVPDWAEILYQQVILKGDFNYLEEFKQQRLLKSSIFEEISKKYKQHQPTDMVMENLKKLLTYCEDVYLYYKLAYEHKFYEIVNVLLKDPQTGCCLKDMLAG

SEQ ID NO: 865433 - protein, 2396 aa, Homo sapiens
MCNEQQQEPAKISSFTSLKVSQDLDVAVIVSSSNSAVALNLNLYFRQHPGHLLCERILEDLPIQGPKGVDEDDPVNSAYNMKLAKFSFQIDRSWKAQLSSLNETIKNSKLEVSCCAPWFQDILHLESPESGNHSTSVQSWAFIPQDIMHGQYNVLQKDHAKTSDPGRSWKIMHISEQEEPIELKCVSVTGFTALFTWEVERMGYTITLWDLETQGMQCFSLGTKCIPVDSSGDQQLCFVLTENGLSLILFGLTQEEFLNRLMIHGSASTVDTLCHLNGWGRCSIPIHALEAGIENRQLDTVNFFLKSKENLFNPSSKSSVSDQFDHLSSHLYLRNVEELIPALDLLCSAIRESYSEPQSKHFSEQLLNLTLSFLNNQIKELFIHTEELDEHLQKGVNILTSYINELRTFMIKFPWKLTDAIDEYDVHENVPKVKESNIWKKLSFEEVIASAILNNKIPEAQTFFRIDSHSAQKLEELIGIGLNLVFDNLKKNNIKEASELLKNMGFDVKGQLLKICFYTTNKNIRDFLVGKGDDYIVYIFQKAWVKNLEENLGRKTLSNFNVQLISNKKKCDNPFIFFSPSSFFNDYFTFVAKEKFVLTYINSNVQNIILEMAYYLMTFFNESLIPSTTLFDNLMTFFAKVLDFLESHCFNYFLFKVEILKEKNYFSEKEKRTIDFVHQVEKLYLGHFQENMQIQSFPRYWIKEQDFFKHKSVLDSFLKYDCKDEFNKQDHRIVLNWALWWDQLTQESILLPRISPEEYKSYSPEALWRYLTARHDWLNIILWIGEFQTQHSYASLQQNKWPLLTVDVINQNTSCNNYMRNEILDKLARNGVFLASELEDFECFLLRLSRIGGVIQDTLPVQNYKTKEGWDFHSQFILYCLEHSLQHLLYVYLDCYKLSPENCPFLEKKELHEAHPWFEFLVQCRQVASNLTDPKLIFQASLANAQILIPTNQASVSSMLLEGHTLLALATTMYSPGGVSQVVQNEENENCLKKVDPQLLKMALTPYPKLKTALFPQCTPPSVLPSDITIYHLIQSLSPFDPSRLFGWQSANTLAIGDAWSHLPHFSSPDLVNKYAIVERLNFAYYLHNGRPSFAFGTFLVQELIKSKTPKQLIQQVGNEAYVIGLSSFHIPSIGAACVCFLELLGLDSLKLRVDMKVANIILSYKCRNEDAQYSFIRESVAEKLSKLADGEKTTTEELLVLLEEGTWNSIQQQEIKRLSSESSSQWALVVQFCRLHNMKLSISYLRECAKANDWLQFIIHSQLHNYHPAEVKSLIQYFSPVIQDHLRLAFENLPSVPTSKMDSDQVCNKCPQELQGSKQEMTDLFEILLQCSEEPDSWHWLLVEAVKQQAPILSVLASCLQGASAISCLCVWIITSVEDNVATEAMGHIQDSTEDHTWNLEDLSVIWRTLLTRQKSKTLIRGFQLFFKDSPLLLVMEMYELCMFFRNYKEAEAKLLEFQKSLETLNTAATKVHPVIPAMWLEDQVCFLLKLMLQQCKTQYELGKLLQLFVEREHLFSDGPDVKKLCILCQILKDTSIAINHTIITSYSIENLQHECRSIWKDCRQMDKFALARRVAELAELPVDNLVIKEITQEMQTLKHIEQWSLKQARIDFWKKCHENFKKNSISSKAASSFFSTQAHVACEHPTGWSSMEERHLLLTLAGHWLAQEDVVPLDKLEELEKQIWLCRITQHTLGRNQEETEPRFSRQISTSGELSFDSLASEFSFSKLAALNTSKYLELNSLPSKETCENRLDWKEQESLNFLIGRLLDDGCVHEASRVCRYFHFYNPDVALVLHCRALASGEASMEDLHPEIHALLQSAELLEEEAPDIPLRRVHSTSSLDSQKFVTVPSSNEVVTNLEVLTSKCLHGKNYCRQVLCLYDLAKELGCSYTDVAAQDGEAMLRKILASQQPDRCKRAQAFISTQGLKPDTVAELVAEEVTRELLTSSQGTGHKQMFNPTEESQTFLQLTTLCQDRTLVGMKLLDKISSVPHGELSCTTELLILAHHCFTLTCHMEGIIRVLQAAHMLTDNHLAPSEEYGLVVRLLTGIGRYNEMTYIFDLLHKKHYFEVLMRKKLDPSGTLKTALLDYIKRCRPGDSEKHNMIALCFSMCREIGENHEAAARIQLKLIESQPWEDSLKDGHQLKQLLLKALTLMLDAAESYAKVTQRLFSDWPWDLLSAVKLFSFVLGLFPGEAGGHHRPTRNRRGEYRCEGSHRRRQLGLSLLCLSTLVPQDSCVRQAQHCQRLTKLITLQIHFLNTGQNTMLINLGRHKLMDCILALPRFYQASIVAEAYDFVPDWAEILYQQVILKGDFNYLEEFKQQRLLKSSIFEEISKKYKQHQPTDMVMENLKKLLTYCEDVYLYYKLAYEHKFYEIVNVLLKDPQTGCCLKDMLAG

SEQ ID NO: 865434 - protein, 2137 aa, Homo sapiens
MCNEQQQEPAKISSFTSLKVSQDLDVAVIVSSSNSAVALNLNLYFRQHPGHLLCERILEDLPIQGPKGVDEDDPVNSAYNMKLAKFSFQIDRSWKAQLSSLNETIKNSKLEVSCCAPWFQDILHLESPESGNHSTSVQSWAFIPQDIMHGQYNVLQKDHAKTSDPGRSWKIMHISEQEEPIELKCVSVTGFTALFTWEVERMGYTITLWDLETQGMQCFSLGTKCIPVDSSGDQQLCFVLTENGLSLILFGLTQEEFLNRLMIHGSASTVDTLCHLNGWGRCSIPIHALEAGIENRQLDTVNFFLKSKENLFNPSSKSSVSDQFDHLSSHLYLRNVEELIPALDLLCSAIRESYSEPQSKHFSEQLLNLTLSFLNNQIKELFIHTEELDEHLQKGVNILTSYINELRTFMIKFPWKLTDAIDEYDVHENVPKVKESNIWKKLSFEEVIASAILNNKIPEAQTFFRIDSHSAQKLEELIGIGLNLVFDNLKKNNIKEASELLKNMGFDVKGQLLKICFYTTNKNIRDFLVGKGDDYIVYIFQKAWVKNLEENLGRKTLSNFNVQLISNKKKCDNPFIFFSPSSFFNDYFTFVAKEKFVLTYINSNVQNIILEMAYYLMTFFNESLIPSTTLFDNLMTFFAKVLDFLESHCFNYFLFKVEILKEKNYFSEKEKRTIDFVHQVEKLYLGHFQENMQIQSFPRYWIKEQDFFKHKSVLDSFLKYDCKDEFNKQDHRIVLNWALWWDQLTQESILLPRISPEEYKSYSPEALWRYLTARHDWLNIILWIGEFQTQHSYASLQQNKWPLLTVDVINQNTSCNNYMRNEILDKLARNGVFLASELEDFECFLLRLSRIGGVIQDTLPVQNYKTKEGWDFHSQFILYCLEHSLQHLLYVYLDCYKLSPENCPFLEKKELHEAHPWFEFLVQCRQVASNLTDPKLIFQASLANAQILIPTNQASVSSMLLEGHTLLALATTMYSPGGVSQVVQNEENENCLKKVDPQLLKMALTPYPKLKTALFPQCTPPSVLPSDITIYHLIQSLSPFDPSRLFGWQSANTLAIGDAWSHLPHFSSPDLVNKYAIVERLNFAYYLHNGRPSFAFGTFLVQELIKSKTPKQLIQQVGNEAYVIGLSSFHIPSIGAACVCFLELLGLDSLKLRVDMKVANIILSYKCRNEDAQYSFIRESVAEKLSKLADGEKTTTEELLVLLEEGTWNSIQQQEIKRLSSESSSQWALVVQFCRLHNMKLSISYLRECAKANDWLQFIIHSQLHNYHPAEVKSLIQYFSPVIQDHLRLAFENLPSVPTSKMDSDQVCNKCPQELQGSKQEMTDLFEILLQCSEEPDSWHWLLVEAVKQQAPILSVLASCLQGASAISCLCVWIITSVEDNVATEAMGHIQDSTEDHTWNLEDLSVIWRTLLTRQKSKTLIRGFQLFFKDSPLLLVMEMYELCMFFRNYKEAEAKLLEFQKSLETLNTAATKVHPVIPAMWLEDQVCFLLKLMLQQCKTQYELGKLLQLFVEREHLFSDGPDVKKLCILCQILKDTSIAINHTIITSYSIENLQHECRSIWKDCRQMDKFALARRVAELAELPVDNLVIKEITQEMQTLKHIEQWSLKQARIDFWKKCHENFKKNSISSKAASSFFSTQAHVACEHPTGWSSMEERHLLLTLAGHWLAQEDVVPLDKLEELEKQIWLCRITQHTLGRNQEETEPRFSRQISTSGELSFDSLASEFSFSKLAALNTSKYLELNSLPSKETCENRLDWKEQESLNFLIGRLLDDGCVHEASRVCRYFHFYNPDVALVLHCRALASGEASMEDLHPEIHALLQSAELLEEEAPDIPLRRVHSTSSLDSQKFVTVPSSNEVVTNLEVLTSKCLHGKNYCRQVLCLYDLAKELGCSYTDVAAQDGEAMLRKILASQQPDRCKRAQAFISTQGLKPDTVAELVAEEVTRELLTSSQGTGHKQMFNPTEESQTFLQLTTLCQDRTLVGMKLLDKISSVPHGELSCTTELLILAHHCFTLTCHMEGIIRVLQAAHMLTDNHLAPSEEYGLVVRLLTGIGRYNEMTYIFDLLHKKHYFEVLMRKKLDPSGTLKTALLDYIKRCRPGDSEKHNMIALCFSMCREIGENHEAAARIQLKLIESQPWGE

SEQ ID NO: 865435 - protein, 2327 aa, Homo sapiens; identical to SEQ ID NO: 865429

SEQ ID NO: 865436 - protein, 2009 aa, Homo sapiens
MCNEQQQEPAKISSFTSLKVSQDLDVAVIVSSSNSAVALNLNLYFRQHPGHLLCERILEDLPIQGPKGVDEDDPVNSAYNMKLAKFSFQIDRSWKAQLSSLNETIKNSKLEVSCCAPWFQDILHLESPESGNHSTSVQSWAFIPQDIMHGQYNVLQKDHAKTSDPGRSWKIMHISEQEEPIELKCVSVTGFTALFTWEVERMGYTITLWDLETQGMQCFSLGTKCIPVDSSGDQQLCFVLTENGLSLILFGLTQEEFLNRLMIHGSASTVDTLCHLNGWGRCSIPIHALEAGIENRQLDTVNFFLKSKENLFNPSSKSSVSDQFDHLSSHLYLRNVEELIPALDLLCSAIRESYSEPQSKHFSEQLLNLTLSFLNNQIKELFIHTEELDEHLQKGVNILTSYINELRTFMIKFPWKLTDAIDEYDVHENVPKVKESNIWKKLSFEEVIASAILNNKIPEAQTFFRIDSHSAQKLEELIGIGLNLVFDNLKKNNIKEASELLKNMGFDVKGQLLKICFYTTNKNIRDFLVEILKEKNYFSEKEKRTIDFVHQVEKLYLGHFQENMQIQSFPRYWIKEQDFFKHKSVLDSFLKYDCKDEFNKQDHRIVLNWALWWDQLTQESILLPRISPEEYKSYSPEALWRYLTARHDWLNIILWIGEFQTQHSYASLQQNKWPLLTVDVINQNTSCNNYMRNEILDKLARNGVFLASELEDFECFLLRLSRIGGVIQDTLPVQNYKTKEGWDFHSQFILYCLEHSLQHLLYVYLDCYKLSPENCPFLEKKELHEAHPWFEFLVQCRQVASNLTDPKLIFQASLANAQILIPTNQASVSSMLLEGHTLLALATTMYSPGGVSQVVQNEENENCLKKVDPQLLKMALTPYPKLKTALFPQCTPPSVLPSDITIYHLIQSLSPFDPSRLFGWQSANTLAIGDAWSHLPHFSSPDLVNKYAIVERLNFAYYLHNGRPSFAFGTFLVQELIKSKTPKQLIQQVGNEAYVIGLSSFHIPSIGAACVCFLELLGLDSLKLRVDMKVANIILSYKCRNEDAQYSFIRESVAEKLSKLADGEKTTTEELLVLLEEGTWNSIQQQEIKRLSSESSSQWALVVQFCRLHNMKLSISYLRECAKANDWLQFIIHSQLHNYHPAEVKSLIQYFSPVIQDHLRLAFENLPSVPTSKMDSDQVCNKCPQELQGSKQEMTDLFEILLQCSEEPDSWHWLLVEAVKQQAPILSVLASCLQGASAISCLCVWIITSVEDNVATEAMGHIQDSTEDHTWNLEDLSVIWRTLLTRQKSKTLIRGFQLFFKDSPLLLVMEMYELCMFFRNYKEAEAKLLEFQKSLETLNTAATKVHPVIPAMWLEDQVCFLLKLMLQQCKTQYELGKLLQLFVEREHLFSDGPDVKKLCILCQILKDTSIAINHTIITSYSIENLQHECRSIWKDCRQMDNSALARRVAELAELPVDNLVIKEITQEMQTLKHIEQWSLKQARIDFWKKCHENFKKNSISSKAASSFFSTQAHVACEHPTGWSSMEERHLLLTLAGHWLAQEDVVPLDKLEELEKQIWLCRITQHTLGRNQEETEPRFSRQISTSGELSFDSLASEFSFSKLAALNTSKYLELNSLPSKETCENRLDWKEQESLNFLIGRLLDDGCVHEASRVCRYFHFYNPDVALVLHCRALASGEASMEDLHPEIHALLQSAELLEEEAPDIPLRRVHSTSSLDSQKFVTVPSSNEVVTNLEVLTSKCLHGKNYCRQVLCLYDLAKELGCSYTDVAAQDGEAMLRKILASQQPDRCKRAQAFISTQGLKPDTVAELVAEEVTRELLTSSQGTGHKQMFNPTEESQTFLQLTTLCQDRTLVGMKLLDKISSVPHGELSCTTELLILAHHCFTLTCHMEGIIRVLQAAHMLTDNHLAPSEEYGLVVRLLTGIGRYNEMTYIFDLLHKKHYFEVLMRKKLDPSGTLKTALLDYIKRCRPGDSEKHNMIALCFSMCREIGENHEAAARIQLKLIESQPWGE
